United States Patent Application Publication US 2009/0191548 A1 - sequence listing, part 2

SEQ ID NO: 2019 - DNA, 2435 bp, Artificial Sequence
  chemically treated genomic DNA (Homo sapiens)
attagttgttttagaaattgtagattgtgttgatttggagggaggaagatttttttaaatttttatttagatttttataagatttagatttttaaaataaagtaaaatataaaagtaattttttgtttgcggatgatttaattttttttttggtaggtttaattttgttttttaggaattagtagtgattagtgatagaaagagtagtttttatgattttaggtgattattaggacgttagggtaggaaggagtttgttgattgagtgttgatttgtaaaattattagtataggtgtttaataattttatttttgagaagttagagttgagtttttggggttgttttggagggtttaggatatgttgtagggtaataggaaggatatggggtgagaaaaaggtttttgttaagttgttgaaagatatatgatagtttaatagggaattaagagttaggtttaatattgtttttgtattatatttaataattgaggttaatggtttattaagtttttattgagggttatagagaggataggtttttaagtgtagagaggtagtagtaaaggttgaggttgcgggaaatataattagagtttaaaatattaatatttatttgttggtatggttgagaggtattttaataatttttggtttttgattttttattgtgttaaaatttaaattattatattaggttttgaataatttttgaaaatgtgtgtttttttatttagttaaggtaaagttgttttaaagataaatattatattagtatagatgtttttataagagtaattattattaatggttattgtttggaagttggatttggaaatgatatgttggatggttatagttttgttagatgaggtgtgcgtgtgatgataagtgggaaatagtttgatttaagggatattttagtttatggttagtatagtaatgattttgggaagtttgaagttatgttttttgttgagtaataaggtatagggcgtagaaggggtaaaataagttagggagtttagttaatatgtgagatggaaatttaaggatagggatagagtacgtataaagtttagggatatagttttttgttggatattttgtttgtattaattggtaaattagattgtataataggaaagaagtttgtgatagtaaaaggggtcgaaaacgggaaggatatttagagggtaggaattatgacggggttttgcggttttgtgggtagtagggagagtgtatttttggtttgcgggtttcgtgagttggaagaaattaggaaagggaagttgagtatttaattttatatagattataggttaatcgtgtttatttagtgtttgaaagtgagaagttgttaaggttttgtgatagttttgaaatcgtaggtattagaggatagaaattttgagtttagagggaggtaggtatttttatttgtttaatttggtttttaatagtttttaattttttaatatttttaagtagaattagattaagtagaagtgtttataatagttttttaatttagtttgtatttttttttttttttttttgttttgggggttatgtgttattaggagtagaggttgtgaatgttttagaaatttttttgggatgtaggttttttttttatgtagaaaatgtttattgaatatattaaatgttaggtatatgttttgtattggggtgtaatggtgaggggtgatatttagagggagtgttttttttttttgtattattttttgtttgatttttttagtagattttagagttggttattatgattttttgaatttatttttttttattttttttttttgagttttgagaagtaaagttaatttaaatttaaagtgttgggtataggagtttgtttcgtaagaatttaaattttattgttttatttttaaatttggtttgtttttatagtgtttgagatttagtaattttttattatttttagttgtttttgttgttgtggttgttaatattatttaaaattgataaaaattgtatagggaagttgatatagttagatattaagttgatatgtttattattgaatgtttggagtaaggtaattttattttagatttgatttttaataaattttagtgaatatttaatttttgttttattataaatgtattattatatttgtttatatgggaaggtgaagatgggttagttgtttgttttgaaaggaggaaagagtgagaatgtataattgaatgaaaaaaaatattttggttatagatatttttttttttggttttataataataaaatatgtagtgggatttttattttgttttagaatttttagttgtttttttttttttgaagtgtttttttagaggaaataaatttttttattgatattgaaaatgagttataagagaagtgttgttattttttttttgag

SEQ ID NO: 2020 - DNA, 2435 bp, Artificial Sequence
  chemically treated genomic DNA (Homo sapiens)
tttaaaaggaaagtagtaatattttttttatgatttatttttaatgttaatagaaagatttgttttttttgaaggagtattttaaaaaggaaaaaataattaaaaattttaaagtaaaataaaaattttattatatattttattattgtaaagttaagagaaaaagtgtttgtggttaaaatatttttttttatttagttgtatatttttatttttttttttttttaaagtaaataattggtttatttttatttttttatataggtaggtgtaataatatatttgtgataaaataaaaattgaatatttattgaagtttgttaggaattaagtttgaggtgaggttattttgttttagatatttaatgataggtatattaatttaatatttgattgtgttaatttttttgtgtagtttttattagttttaaataatattgatagttataataataaaaatagttaagagtagtgagagattgttaagttttaagtattatagaagtaggttagatttagaggtaaaataataaagtttgaatttttacgaaataaatttttatgtttagtattttggatttgaattgattttgttttttagagtttaggagagaaagatggaaggagatgagtttaggaagttatgatgattaattttgaagtttattgaaaaggttaggtaaaaagtaatatagaagagggggatattttttttgggtgttattttttattattgtattttagtataaggtatgtgtttggtatttagtgtgtttagtaggtattttttgtatgggaggaaggtttgtattttaaagggatttttggaatatttataatttttgtttttaatggtatatggtttttaggataaaagaaagagagagaagatataggttaaattggagaattattatgagtatttttgtttaatttgattttgtttgggaatattgaagagttggaagttgttgaagattaaattgggtagatgggagtgtttgtttttttttgggtttaggatttttattttttaatgtttgcggttttaaggttgttataaagttttgataattttttatttttaaatattaaatgggtacgattagtttgtgatttatgtaggattaaatgtttagttttttttttttgattttttttagtttacgagattcgtaggttaaaaatatattttttttgttgtttataaggtcgtagagtttcgttatagtttttgttttttgagtgtttttttcgttttcgattttttttgttattataagttttttttttgttgtgtagtttaatttattagttagtataggtaaaatgtttagtaaaaagttgtgtttttgggttttgtgcgtgttttgtttttatttttaagtttttattttatatgttaattggattttttgatttattttgttttttttgcgttttgtattttattgtttaatagaagatatagttttaggttttttaagattattattgtgttggttatggattaaagtgttttttaaattaagttgttttttatttattattatacgtatattttatttaataagattatgattatttagtatgttatttttaggtttaatttttaggtagtgattattgatggtaattgtttttataagagtatttgtgttaatgtgatatttgtttttgaggtaattttgttttaattaggtgggaaagtatatatttttaaaagttatttaagatttagtgtaatagtttagattttggtatagtgaaaagttaggggttaagggttattggaatgttttttaattatattagtaggtaagtgttagtgttttaaattttgattatgtttttcgtagttttagtttttattgttgtttttttgtatttagaagtttgttttttttgtggtttttagtgaggatttgataaattattgattttaattattaagtgtggtgtagaaataatattaaatttgatttttggttttttgttgagttattatgtgttttttagtaatttggtaggaattttttttttattttatgttttttttattattttgtagtatgttttgaattttttaaagtaattttagaaatttaattttggttttttaagaatgaaattgttggatatttgtgttggtaattttgtaggttagtatttaattaataggtttttttttgttttagcgttttgatggttatttggggttatgagggttattttttttattattaattattgttgatttttgggaagtagagttgagtttattaaaaaggaagttgagttattcgtaagtaaagagttgtttttgtgttttgttttgttttaaaaatttgagttttataggagtttggataggggtttggaagggtttttttttttttaggttagtatagtttgtaatttttaggatagttgat

SEQ ID NO: 2021 - DNA, 2450 bp, Artificial Sequence
  chemically treated genomic DNA (Homo sapiens)
ttaaagttagaacgtatattatattatttttttgtttagtttttttttttggtttggttaaatttgttatttttgttttttgaggatttatttttaataaattatacgtgtttgaaattttatttttagttttttttttttttagatttttttatttaggatagttgtaggtaaagtgaggaattttaagagagaatttagaaaagtagaaattataaaggtaatttagttaatagtgaaatgtatgataaaatggagggattttgtcgataaataaaatgatatttgaaaagttttattaataaatattaaagattattaaatgtatattaatttttggatgttgaaattaatattgaatgtttaaaattaatttaaataattatattaaatatatatgtatatatgtgtatatatatatattaattataaggatttaaaatattttgaaattattttattttttttttttttttttttttattaaaaaaaaaaaataatggttagaatattggtttttataatattagtttttgttttggtagattaaaagaggtagaatttttttagtataattttgttttttaaatattttaaaagtatttaattatttggttttgtattatttataaaattttgtagttatgaagaaagtttttttttttaaatttagtttatttttttaaattaaaagtgtttttataaataagaagagaagttgtttttgttaaaattttgggtttatttaggattaatggagtttttttgtttcgtaggaaaattttttgtttttagattagttgttaaagttgaatattatagatgatttttttaaagcgattttgaaaaattatatgttggaatttaaattttttaaattttatatataagattagaattttatattttaatagttatataattttataaagaattatttttgatttttttggtagattattattgtagaaggaataaaaaaaggttttataaaagtattttatttgtattgttggtagatgatttataaatgtcgtatagatacgggttgattattggtttatagaagaagtattaaatgaacgacgagatatttgttggtaaatatatagtaaataaaaaatgtaatttagagttaaatatgtgtatagtgtgggttttatttttgtttataaattaagtaatgtgttttgttaattattagtagagttattgattttagatgtgtattatatagttataattttgttagagagtagattatataagttgttttttttttggttgttttattttgttttattttaagagttcgtaaattgacgatcgggataaaaattataattgatattatttgtgggaaatattttataaaataataggtttagatgtaggattaaagttatgtggtagtaaaatattttattgaaaaggggttaggttttatgattttttaagaaaatagatgtgttttttttttttttgtttgttttttaattttttttttttaaataaatttttttttaattattaacgtttttttttttttgtttttttacgattgtattggagagagtttataaatggattatagatgtaggtttgtattttaaaattttaattgttataatttttggaataaaataaatgaaatatttggaaaaattatattgaattattgtaaaggtaatgatgattatgtaaatatgtttgtttgatatttatttagtatttttgggtatgagtatatgattttttagatattttaagttggagtttagggagtaggaagtaatttagagtttgtttaaaatgtagtaatagtaattttttttgaaagttttttgttttgaaggggaagtttttatttttgaagtttcgataagttggtaaaagggtttttacgtattttttttttttttaaggtgagatttttggataaaatagtataggaaaataagaatttaatatattttagtttttatttatttaagttttttttatttatattatgttttataattttttttttggaaatgttgtgaattataagaaaaggattttagggtataaatataggttatattgtttaataattaatttataagtgttgtgaagaattgtatataatcgggtttttgttaaaaattttggtgttatatggaatttattgtagtattattgattataattaattaatttagtatttatgttgtattttagtatttatttttagtaatgtgttaagatggtttagtgttgggagaaaataataaagtgtaaaagaaattaaatttttattatgtgttacgttaagattttaatagaatatttgtattttttaattgtttttttttagttttttaaaaattgaagtaaatagtatataaatttgtttagaaattagaggagtttgattttaatttttttgtattgtttttttagtttgt

SEQ ID NO: 2022 - DNA, 2450 bp, Artificial Sequence
  chemically treated genomic DNA (Homo sapiens)
atagattaaagaaataatgtagggaaattggagttaggtttttttggtttttaaataaatttatgtattgtttgttttagtttttgaggggttgaaaagggatagttggagagtgtagatattttgttgaaattttaacgtgatatatgatggaaatttagttttttttatattttattatttttttttaatattaagttattttggtatattattggaggtggatgttgagatatagtataaatgttgaattaattaattgtaattagtgatattgtaatggattttatatgatattaaggtttttggtaaaaattcggttgtgtgtagttttttatagtatttgtagattagttgttaaataatatagtttgtgtttgtgttttaggattttttttttgtggtttataatatttttaaaggggaaattgtagagtataatatagataaaaggaatttgaatgagtagaggttgagatatattgggtttttatttttttgtgttgttttatttagaaattttattttaagaagaaaaaaagtacgtgagaatttttttattaatttgtcgaaattttaaagataaaagttttttttttagaatagggggtttttagaaggagttattgttgttgtattttggataaattttaaattattttttattttttgaattttagtttgaggtatttgggagattatatgtttatgtttaaagatgttagataaatgttaagtagatatgtttgtataattattattatttttataatagtttaatgtaatttttttaaatgttttatttattttattttagagattgtgatagttagaattttgaagtataagtttatatttgtaatttatttatgaattttttttagtgtaatcgtgaggagatagagaggaaaaaacgttggtggttggggggggatttatttggagaaaaaaaattgaaaaataagtagagggaaaaagagtatatttgtttttttaagaaattatggaatttggtttttttttagtggggtattttattattatatggttttaattttatatttgggtttgttgttttatgaaatattttttatagatgatgttaattataatttttgtttcggtcgttaatttacggatttttggaataagataaaatgaaataattagaaaaagaataatttatgtggtttattttttgataaaattatagttgtgtgatatatatttaaaattaataattttgttaatgattagtagaatatattgtttggtttatgagtagagatggggtttatattgtgtatatgtttggttttgagttgtattttttgtttgttgtgtatttattagtagatgtttcgtcgtttatttaatgttttttttatgagttagtagttagttcgtgtttgtgcgatatttataagttatttgttaataatataggtggaatgtttttatgaagtttttttttgttttttttgtagtgatgatttattagagaaattaggggtaattttttatagagttatatggttattaagatgtggagttttgattttgtgtgtaaagtttaagaaatttagattttagtatatggttttttagaatcgttttgaaagaattatttgtggtgtttaattttagtagttggtttgagggtaaaaggtttttttacgaaataaagaaattttattagttttaagtagatttaaagttttgatagaaatagtttttttttttatttatagggatatttttaatttagggagataaattgaatttaaaaaaaagaattttttttataattataagattttgtaagtaatataaagttagataattggatatttttaaaatgtttggagggtaaaattgtgttgggaagattttgttttttttggtttgttagagtagggattaatgttatagaagttagtattttggttattattttttttttttaataagaaagaaagaaaaggaaagatgaaataattttagaatattttaaatttttatgattagtgtgtgtgtgtgtatatgtgtgtatgtgtgtttgatataattatttgaattaattttggatatttaatgttgattttaatatttaaagattaatgtatatttaatgatttttaatatttattagtgagattttttagatattattttgtttgtcgataagatttttttattttgttatatattttattgttgattaggttgtttttgtgatttttgtttttttgggtttttttttaggattttttattttatttataattgttttaggtagagagatttaggagaggaagaggttgggaatgaagttttaggtacgtgtgatttattaaaggtgggtttttaggaagtaggaatggtaaatttagttaggttagggaggggaattgagtaaagaagtggtatgatgtgcgttttgattttag

SEQ ID NO: 2023 - DNA, 2493 bp, Artificial Sequence
  chemically treated genomic DNA (Homo sapiens)
tttagttaggtagtaaattttgaaatttttggttatagaggtttttatttttatattatgatgttttttttttttagttgttatcggtaatggtttttattttataatgagataagtcggaaattgtagttgttattttattatgtttgttttttttttttttttttttttttttttttttttttttttttttttttttttttatatatatatatatatatatatatatatatatatatagagtaggttatattgttaataatatatattattttgttattgggatattttgagaggtagtgtatttttaaaattttaaataggaaaaatagtaattgtatttgtttttttttttttaattgattgataaagatattttataagatttgagagaggaatgtaaaggtattgtatgaatttgatttgttgttttttttttttattgattttttttttttttcgataatttatataggtagaagttttgggatgtttttattttatttttttttggttggtattttttttgttatatttttttttttattggtatattaaagtttaaggtttaatttaattagtgaaataatttatgatttaggtaaattagatatgattttagtatagaattgttagatattttaggaataaggtaattggaggatgatagtttattagttaatattttaaaaataatatttttagattattatttttttttgaaaattattttttttagtatgttgcgtagaatgattttagatttttaatgagtttagttttttaacgagtgagagtagagagttttaaatatttttgtgttttgttttggatggagatttttgtttaagttattggtttaatggtttaatttttgaggagatagaatttaagtaggtagatttgtatatttttatatgatatttattattttttttttcgtgtgttttttttttttttttttttttttttttattttttttttttgtttttttaaattttttagttaattttttttttgttttttagtttttgtttatatagaaaatttggttttagagaatagtatttaaatagtttttaattaaaatgtattacgtgtggtaatgtaaaaaattattagaatagtttttttttatttaaaatatgatttttgtttattgttttggtttttttgtttttgtgttttaggttaaatattatttagatttttgcgaggttaggtgtttttttattaattatttgaaaggtttagagaatggtatttatattaaagttagttttaatgataaaggatatttggttacggtaaatataagtattttttagtttttcgttttatttggtaaaaagttatttttattttagttataatataataaaggattaattgatgggagtattttttttattttttaaaaaataaattgagttaattttacgagtttatttagaggaattaattagggaataggaaatttttaaagttatttttaaattgatattgaataaagtttagggaatagatggttttttatttgaattttttaaaatttttagtattttattaatttttttataggaatgaaaaaaaattgttaaatgaatttgagtaaattattttattaggtgtttagtttttttaagattttttttgtattaagaaaaaaagaaaatataataggtattttttttattgatattattataattttatttgtatatgtgagttttttttttagggtttattttaaattttttttgtatttttgattattaagttgggggaatgatttttttaattggtgtagttgattatgtataattgtttagagtataaggatagtgttaatatatataaagtcgagaatgaggttattgtttaagtaaaatagaaaaatagaaaataatttttgttattttgttttagatatttggagatttttggggtaagagatggagaggataaattgtattattttaatagttgagtagatttttttttttcgtataaatttgatatgtagaaatattgtgaataagagagatattgttttttatttgtatagttaataagaagttgttttattaaagtttttagaaggatgaattgttggaatttatattttatttatttaaaggatgtttatatataattttttaagataatttggtagaaaattttaaaatatttttttttttttaaaatttgatagataaaattgtatatatatattatgtataataggatgttttaaaatatatggatattgtaggatagttaaattaagttaattaatatgtatattattttatatagttgttatttttgtaataagtatatttaaaatttatttttttagtattttttaagaatataatatattgtgatgaattatatttttatgttgtagaatagagtttttaaaaatattttttttatttaattgaagttttgtaattttttattaataggtttttattatttttttt

SEQ ID NO: 2024 - DNA, 2493 bp, Artificial Sequence
  chemically treated genomic DNA (Homo sapiens)
gaggaaggtaatggggatttgttggtaaaaagttataaaattttagttaaataagaagaatatttttaagagttttattttataatatggaggtatagtttattataatgtattatatttttgaaaaatgttaagagagtagattttaaatatgtttattataaaaataataattatgtaaggtaatgtgtatattaattagtttaatttagttattttataatgtttatatattttaaaatattttgttgtatatagtatgtatatataattttatttgttaaattttaaaaagaaaaaagtgttttaaaattttttattaaattattttggaggattgtatgtagatattttttgaatagataaagtataaattttagtagtttatttttttagaggttttaataggatagttttttattaattatgtaaatgagaggtaatgttttttttatttataatgtttttatatgttaaatttgtacggggaaaaaaaatttatttaattattgggataatatagtttattttttttattttttgttttagaaatttttagatatttgaaataaaatgataaaaattgttttttatttttttattttgtttgaataatggttttattttcgattttgtgtgtgttgatattgtttttgtgttttgagtagttgtgtatgattagttgtattaattaagagaattatttttttagtttggtagttagaaatgtaggggaagtttagaatgagttttgggggaagaatttatatgtataaatgaaattatagtaatattagtagagaggatatttgttgtatttttttttttttttagtgtaaaaggaattttaggggaattgaatatttggtgaaatagtttgtttaaatttatttagtaatttttttttatttttataggggaattagtagagtgttaaaggttttaaagaatttagatgaaaagttatttgttttttgggttttgtttaatgttaatttaaggatggttttggagattttttattttttaattaatttttttagatgagttcgtggggttggtttaatttattttttgaaagatggaaaaaatgtttttattaattagttttttgttatgttgtgattgagatggaaatagttttttgttaaatggagcgaggagttgagagatgtttgtgtttgtcgtggttaggtgttttttgttattaggattggttttgatgtaagtattattttttgggttttttagataattggtgagaaagtatttggtttcgtagaaatttgagtaatatttagtttgaagtataaagatagggaaattaaagtagtgaataggagttatattttaaatagaaaaaaattgttttaataattttttgtattattatacgtaatgtattttagttggaggttgtttgagtattgttttttagaattagattttttgtgtggataaggattagggggtagggaaagggttaattgaggggtttggagaaatagaaaagggaaatagagaaaaagaggagggggaaaaagagatatacgagaggagaggtgatgggtgttatgtaaaagtgtatagatttgtttgtttaaattttatttttttaaagattggattattgagttagtggtttgagtaggaatttttatttaggataagatataaagatgtttgaggttttttgtttttattcgttgggagattaggtttattgggagtttaaggttattttgcgtagtatattgaaagaaatgatttttaaggaaaaatgatgatttgagagtattatttttagaatattaattaatgagttattattttttaattgttttatttttaaggtgtttgataattttgtattgaggttatgtttggtttatttaaattataggttgttttattagttaggttaagttttgaattttagtatgttagtgggaaggagggtatgataggggaaatgttagttagaaaggaataggatgggaatattttagaatttttgtttgtgtggattgtcggaaagagaagggaattaatgaggagggagagtagtaggttagatttatgtagtgtttttatattttttttttaaattttgtagggtgtttttgttaattagttaagggaaagaaaataagtgtagttattgttttttttgtttgggattttgggaatatattgttttttaggatattttagtaatagggtgatatatattattagtaatgtgatttgttttgtgtgtgtgtgtgtgtgtgtgtgtgtgtgtgtgtgtgagagagagagagagagagagagagaggagagagagagaaagagagagagagaataggtatgatggagtagtagttgtaattttcggtttgttttattatggagtggaagttattgtcgatgataattagagaggaggaatattatggtgtaggaatagaaatttttgtagttaagagttttagggtttattgtttggttaaa

SEQ ID NO: 2025 - DNA, 2438 bp, Artificial Sequence
  chemically treated genomic DNA (Homo sapiens)
gagttagtgaaatttaatttcgttgtttataattaaagaattttaattaagtatgttatttattaaaatggagatagttaaagtttaatgtttagtatttaaaatttttagtaaatttttgtgatataaaaaaaaattattgttcgggcgtagtggtttacgtttgtaattttagtattttgggaagttgaggtaggtagattacgaggttaggagatcgagattattttggttaacgtggtgaaatttcgtttttattaaaaataaaaaaaaattagttgggtatggtggcgggtgtttgtagttttaattattcgagaggttgaggtaggagaatggcgtgaatttaggaggcggaggttgtagtgagttaagattatattattgtattttagtttgggtaatagagtgagatttcgttttaaaaaaaaaaaattattaaatttttatttgttttgttgatatatattgtagtttaagtttatttttttaattttattaggaattagaatttttttatgttttatttgtttttattttaaaaaatatttatgtttattttgttttaaaaataagatgatgtaattgatatttatatagaaaattgaaataatgaaggaaaagttaaaatgaagggttttttttttaaaaagagttataaaataaatttaaaagtttataattttgattatcggattaatttgttttaaatattttatttttggtttgttattttattttggtttttttttagatttatttgggaagatttttttttttaaatatatgtgattagtttttattaaagattagttttatttgaagatttaggtgtaggatttgggatgtaaatatttttaaatgtatcgggtaaattttgatgtataataaaggttgagagtttgagatttagggatttaattaattatgtaagatgtttaaaatggaacgttgatttttatatgatatttgttaaatgtagaaaattttgtttggatttggaaataaaaatgtgagtatgaagtttcggtaaaataaatttttttgaaaaatattaatattttataattatttttttattaaaataaaatagtgttaagtatatagttttttttaagtaataaatttttaaaattaaagtgaaattttgaaattatttttttaaatagtattcgttcggtagatagatggtatgttttattttatttttcgtttttatttggtggagtttatggggtattttgagaattaatgggtaattaagaattgggtgttaatttaggtatttgatttggaaattgagtttttgaaaattattaattttaaatatagcgtaagttttttttattatgttattttagaaattggtaataagaatattttaaaaatatttagaaatgtaggagttagattttttgggttgtaggtggaggatatatagttgttaggaaatggaagatatttgttatgtttttgagtttttttttggcgggtagtggatggaggataataaggtttgttgtagtattaatttgggtattaaatagtaataaataaatgtgatttaagagtattgttgggagatttttttgaaagagtatgtatagtagtttttggtagtaaggaattaaggttggtagttttaagttatttttgttaaatgtaaagagtgttgaaaaagttttatatttgtaattattagttagtagtattttaggagatattattttattagatacgattaattttttgttttagagagtttagtagaagtttatagaaatttatagtttatgtgatattgtgttaggttgataggtattaatttgagattgaggtgtgaaaaaagattatttgaaaattttattaaaaggtagatttttgaggtttagttttatatattttgatttataaaaattgtagaggaattaggaatttgtattttattaagtattttaggggtatttttggtataagtggtttgtaggtaatatttggggaaattaataatgattaatattatgtttttattaaggaaagttaattttagggaaaaaagagtatttgaaaatttgagtaaagaaggatttggtaggggtttttggtttaagtaagaaagttttaaagaatagggagtgataggtaagtttagattgtaagatattttagaaagaaggggagaattaaagggaggagaggtgagtagttgttaggaataaattttagaattataaaattttttttaagatttattttggggaggagaatagtttgagaagtaaaagattataaggaaatatcggattatttaatattgattaaatgttattattagttagtattgtattaggtgttttagaaatattattattattaataggtagttgtagtttataggttaggtgcgtggattttaggggtagtggttgtttacgtat

SEQ ID NO: 2026 - DNA, 2438 bp, Artificial Sequence
  chemically treated genomic DNA (Homo sapiens)
atacgtgagtaattattgtttttagagtttacgtatttaatttataggttgtagttatttattagtgatggtgatatttttaaagtatttggtgtaatgttgattggtagtaatatttggttaatgttggatgattcgatatttttttatggttttttattttttaaattgtttttttttttagaatagattttaggaaaagttttgtaattttgaggtttgtttttagtaattgtttattttttttttttttggttttttttttttttttggaatattttgtaatttggatttatttattattttttgttttttgaggtttttttatttgagttagaaatttttgttagatttttttttatttaggtttttaaatatttttttttttttaaaattaattttttttaatggaagtatgatattaattattattggtttttttaagtgttgtttatagattatttgtattaaaagtatttttggaatgtttgataaagtgtaggtttttgatttttttataatttttgtaaattagaatatgtgaagttgagttttagagatttgttttttaataagatttttaagtgatttttttttatattttagttttaggttgatgtttgttagtttagtataatgttatatagattgtaaatttttatagatttttgttgaattttttagaataaggagttaatcgtgtttgatgaagtaatgttttttaaggtgttattgattggtagttgtaggtgtgaaatttttttagtattttttatatttaataaaaatggtttagggttattagttttgattttttattattaaggattattgtgtatgtttttttagaaaggttttttaataatgtttttaaattatatttatttattattatttagtatttagattaatattatagtagattttattgttttttatttattattcgttaaaggggggtttagggatatagtaggtgttttttattttttggtagttgtgtgttttttatttgtagtttagaaaatttggtttttgtatttttaaatatttttagagtgtttttattattagtttttgggatagtataataaggagggtttgcgttatatttggaattgatggtttttaaagatttaatttttaaattaaatatttaaattggtatttaatttttaattatttattgatttttaaaatattttatgaattttattaagtagaaacgggaaatgaaataaaatatgttatttgtttatcggacggatgttatttgaaggagtggttttaaaattttattttggttttaaagatttgttatttggaagaagttatgtatttggtattattttattttgatggaaaaataattgtagagtattagtgttttttaagagagtttattttatcgaagttttatgtttatatttttgtttttaaatttagataaaattttttatatttgataagtattatgtgaagattaacgttttattttaagtattttgtatgattgattggatttttaagttttaagtttttaatttttattgtgtattagaatttattcgatatatttgaaaatgtttgtattttaggttttatatttagatttttagataaaattggtttttagtgagagttagttatatgtatttaaaaaaaaaaatttttttaagtgagtttaagggaaaattagagtagaatagtagattagaaatgaagtgtttgaaataaattaattcgatgattaggattatggatttttaaatttgttttataattttttttggaaaaaaaattttttattttaattttttttttattgttttaattttttatgtaaatgttaattatattattttatttttggaataagatgagtataaatattttttagagtggaagtaaataaaatatgaaagaattttgatttttaatggaattaagagaatgaatttaaattatagtgtatattaataaggtagatggaggtttaataattttttttttttgagacggagttttattttgttgtttaggttggagtgtagtggtgtgattttggtttattgtaattttcgttttttaggtttacgttatttttttattttagtttttcgagtagttgggattataggtattcgttattatgtttagttaatttttttttatttttagtagagacggggttttattacgttagttaggatggtttcgattttttgatttcgtgatttgtttgttttagttttttaaagtgttgggattataggcgtgagttattgcgttcggataataatttttttttatattataaagatttattgagaattttaagtgttagatattgggttttggttgtttttattttggtagatgatatatttggttagggttttttggttgtaagtaacggaattaaattttattaattt

SEQ ID NO: 2027 - DNA, 2449 bp, Artificial Sequence
  chemically treated genomic DNA (Homo sapiens)
taattgtggttattaaattttgtttttgtaatgtaaaagtatagataatatgtaaatgaataagtgtggttgtgtttttataaaattttatttataaaaataggtggggggttagattgttttttttttattgtatataaattgaaaaataagaggtaaaattagagggattttagggtggtttttaattttgtttttttttaattgtgttagagaaagagagaatataagttatatttgtttttttggttgttaatttttttgttaattttatttttatatataaaaggtgagtattaagtttatttggtagtgttgacggggggattaagtgaaataatgtaaaaatttgggacgatgttagatttgtttaaagatatttatattttttttgttttttgttatatttttttatttgtttttagaatttagttttaaggtttgggaatttaaatattgtttttaattaagtagttaaggttttagatgataagtttgtgtgtgtttggaaaacgtggttttatgatgtgtatatttaggattggtgtagttgttatattgttattttttagtgtagggtgttggggtttgaattttgataatttttgtgggatattttagaaggattaggttttatttttaaaggggttatagtgagtagagttttggttttatttttaaaggggttatagtgagtagagtttaggatgttatggggttgtagtttagaattattaggtatttagttttattttttttttaagaagatatgttgttttttgtaaatattatattttagtttttcggtataattttaaataatgttatttttgggaaaagttgataagtggtgagaatttaagtttttttatttgttgggaataaaagtgggtagatatgtagaagtttttttttattttatatagttgtattttttcggtatttattttttttttattttttggaattgagttggttagagatgaggatcggtatgttgttttttttagttttgttttgtgtggcgtttgttttgtaatttttttatgtttgttttaataggaaaaaaagtaaagagattgatatatagttatttcgaggttagattgttatcgaaatagatttttttaaataaaaataagggtcgtttttgtttgtaaggttttgtaatgaaatagagttaataaaaattgtatgggaaatttatattgtagttataaaaatattaaaaaatagaatttttagttaaagttagtagtgattgttggttcgaggtagaaattagggagtaaaatattttgaaatatttattgaaagtgaagagagggaagaattattattttttatttatttggttaattttttagaagtaaagttagagttatatttgtttagtaagtgattaagtattgggtttttaagcgtaggatagattatttttttttgtggttaatttgtaataaatagaaaatagggttatttaaaaattagtataaatatatataagaaataaagttgttttaataggaaaatttggtaagattattgacgaaaacgtttatagttttattcgttttttttttttagtttttgtttttgtgtgtgtatattagatgtttttgaggttaaagtttgtgtgtttttttgggttggagtatagggatattttttattattttttagtttttagtgtttagtgttattatttggaatattttttggaattttggagggatggtttgtttttatagttttttattagtaggggttttttttttaagaatggtgtttttaggatttttttaggtttagttttaggcgttattagattattagggaatggtgattgattatttgagaaatgtatttatttgtatttaggatttattaagttattattttaatgggaatttattaattggttttattaatttttatttagaattataagtattaaaagttatagtatttaagataagtgagtttttagtttttggttgtaataggggaatttataagaatatttagaagtgatttaggtttttttttttttttttttttaaagtatataaattttggttatttttataggtttttgttaattaatattattattgtggaaatgggggttgttttataaataagttgtaataaatgggatttttattgttggtggaaaagtttggggaataattagtagatttatggagattttttgatttcgggtatttgtatggtaatggttaattttggagattatttagggaaatggggtcggattttttattttagggtatatttatattgttagttatagtttttaaattgtagtgggataaatgtgggaaaatattttgtgaaatattagataaatgaatttggtgttgattaattttaattaggaaaattggttttgttttgttaagtgttgtatagtagttaagattcg

SEQ ID NO: 2028 - DNA, 2449 bp, Artificial Sequence
  chemically treated genomic DNA (Homo sapiens)
cgagttttggttgttgtatagtatttagtaaagtagagttagtttttttagttgagattggttaatattaggtttatttgtttagtattttataaaatatttttttatatttgttttattgtagtttgaaggttgtaattgataatataaatgtgttttaaggtggaaagttcgattttatttttttgagtgatttttagggttggttattattatgtagatgttcggagttaagggatttttatagatttgttaattattttttagatttttttattagtaataaaaattttatttgttgtagtttgtttgtagaatagtttttatttttatagtggtggtattaattagtaaaaatttgtgaaaatgattagagtttatgtgttttaaggagagggaaagaaaggaatttggattatttttaaatatttttataaatttttttattgtaattaggagttaaaagtttatttgttttagatattgtgatttttaatgtttgtagttttaagtgggaattagtgaagttaattagtgagtttttattagaatagtgatttggtgaattttgaatgtaaatagatatattttttagataattaattattattttttgatgatttagtggcgtttgaaattgagtttggagagattttggaagtattatttttagaggaaagatttttgttagtggggagttgtagaaataaattatttttttagggttttagaagatattttagatgatgatattgggtattggggattggagagtgatgaagggtgtttttgtattttagtttaggaggatatataagttttaattttagagatatttgatatatatatatagggatagaggttgaaggagaagaacgaatgaagttgtagacgttttcgttaatgattttattaagtttttttgttggagtagttttgttttttatatatgtttgtgttaatttttaagtggttttattttttgtttgttataggttagttataggagaaaatggtttgttttacgtttaaaaatttagtatttaattatttgttaagtaagtgtgattttagttttatttttgaagggttaattaaatggataaagggtaataatttttttttttttttatttttaatgagtgttttagaatgttttattttttaatttttatttcgagttaataattattgttgattttagttaagaattttattttttaatatttttatagttgtaatgtgagttttttatgtagtttttattaattttgttttattgtaaggttttgtaagtaaaaacggtttttatttttatttggagaaatttatttcggtgataatttagtttcggggtagttatatgttaatttttttgtttttttttttgttgaaataagtatgggaaagttgtaagataaacgttatatagggtagggttgaaggaagtagtatatcgatttttatttttggttagtttaattttagaaagtgaaaggaaagtgaatgtcgaggaggtgtaattatgtaaggtagaagaaaatttttgtatgtttatttatttttatttttaatagatgaaaaggtttaaatttttattatttattaattttttttagaaatgatattatttgggattatgtcgggaggttggagtgtaatgtttataagaagtagtatgtttttttaaaaaagaaatgggattaggtgtttggtgattttggattgtaattttatggtattttaaattttatttattgtgatttttttggagataaagttaaaattttatttattgtgatttttttggagataaagtttagtttttttgaggtgttttatagggattattaaaatttaaattttagtattttatattaagaaatggtagtatgatagttgtattagttttaggtgtgtatattatgaggttacgttttttaaatatatataagtttgttatttgaagttttggttgtttgattgaaaatagtatttggatttttaaattttaaagttaaattttgaaaataaatgggaaaatataatagagagtaggggaagtgtgaatatttttgaataagtttgatatcgttttagatttttatattattttatttaattttttcgttaatattattaagtagatttaatatttattttttatatatgaagataaggttggtaagagaattagtagttaaagaagtaggtataatttatattttttttttttttagtataattagaaaaagataaagttggaagttattttagagtttttttggttttattttttgttttttagtttatgtgtaatagaagagggataatttagttttttatttgtttttgtaaatgaagttttatggagatatagttatatttgtttatttatatattatttatatttttgtattgtaaaggtagggtttaatagttataatta

SEQ ID NO: 2029 - DNA, 2482 bp, Artificial Sequence
  chemically treated genomic DNA (Homo sapiens)
tatttattattttttataaatttatggattggttggttcggaagttttgttgatttggtttgagtttggttgatttagtttggtttgatttattaatttttggtttgtttggataattcgtttttttttatgttgttttttaatttttagtagattagtttggttttttcgcgtggtggagtttgagattttaaagagtaagtaaaagtttgtaaggttttttgaggtttaggtttggaattggttttgttatttttgttatattttatgtgttagtttaagatatatggttaaatttaggtttaaggaatggaaaataaatattattatttgatggaagaaattgttaaattatattgtatggaagagaaataattggaggaaattttgtaattaatttataatagagtagtttgattgttttaataaataaattttaaattttaggattaaatattataatgtttattttttgtttatagtttaattttgtattatagtttaatagaggtgggtaggggagtgagagagattgttttatatagttatttaggtattaagtttttttttgtttagttgttgtgttatttaaagttatagagtttttgattgggttttgcgtttttatttattagatgagagaagagagtaaatatgtagaagaaatatttgtttttaattgttttaatttggaggtgttatatatattatttttgtttttttttagggttagaatttggttatatgattgaatagaattgtaagggaagttgggaaatgtggtttagttgttaggagaaagaggaaaatggtttattgagtatttagttagattttgttgtagttataggttttgtgattgaggaatttatttttaaagaaagtgtattgggatatattttaaaagttgatgtatgatagtatggggtagataaaggttaaaaagataaggttatgattaagtaggggagaaatatatagatatttatgtaaatatttagggtatgagtaagaatttggggaaagatttggagttaggaggaggtgggtgtttggtaggcggtgagattttaataggtagaggtagaagtgaagggtaaagggaaattttgggttatacggggaaattagatttgtttgtttgtttaatattgtggtttttagtgggatttaaagtcgatgttttaatgtaggacggttatgttagtgttgattagaataatgtattttttagggttatattaaaaaattatgtttagtgttttatttgtatttttaaaatatgtatatatatgtgtgggttagaaaaggttgcgtttaggatatgtatttttatgtgaatcgtaggtaattgtataagtaaataggaagttgcgtaggtatgtaggtagttgtttgttgagaggtgcgtgtgggtatgggtaggcgtgggttttgtttgtttgagtataattttaaaggttttttttgatggaagggagggtaagtaagtttttgggtatttgtttttttaattgttgttgtcgtttgttttttttaaggttttttttttgggtagggttatgttagggagtatttgtggttgtaagaaaaaggtgtcgttttaaggtttttgttaattgtcgagttggtgaataaacgttttgaaattttttttgttgagaattttattttttggttttttttttgattttatggtttagtttttttagtttattttttgttttttttttttgtttgttttttagatgttttttcgtgaatttgtttttaattattttttgattttttgaattagagttatttaatagaattatttgtaaaggtatttgtattgttttttgttgtagttattagttatatatagttattgagtatttgatatggggtttatgggtttgagaaattgatttttaaattttatttaagttaaatataaatagatatatgtggttagtggtttttttattggatagtatagttttagaatagtttttatgggtaataattttttttttatagtttgttttattatttttagtttgtatttttttattttatttgtttttttgaattatgtttataaatattttaatttgattattttgtggtttttttaatgtaatgtggttaaggttgaattttttgtttttatttataaaatttatttttttttgattttttttttgttattttatttttggtttttttttattagggaatagttttgattagattatgttatttatatatattattattaagataggtttaggttttgtggatttgagttaatttgggatttttatttaaaaaaaaaattatagagtataaatgtaaaattagatttagagttttggagtattttcggtaagtgaagatgtttgtgaagtttaagttttatttgttttattgtaaattggttttagtttattattggaatattttatagtttttgggtttgaattttagtttgattatt

SEQ ID NO: 2030 - DNA, 2482 bp, Artificial Sequence
  chemically treated genomic DNA (Homo sapiens)
agtggttagattgagatttaaatttagaaattgtagaatattttaatgataaattgaggttaatttgtagtaaagtaaataaagtttaagttttatagatatttttatttgtcgaggatgttttaaggttttaaatttaattttgtatttgtattttgtaattttttttttaagtagagattttaaattgatttagatttataaaatttggatttattttgatgataatatatatgagtaatatggtttgattagaattgttttttaataagggaggattaaggataaagtgataggaggaaggttaagaagaaatgagttttgtgggtagagataaagagtttaattttagttatattgtattaaggggattatagaataattaaattggagtatttgtaaatatggtttaggagagtaggtagggtaaggagatatagattgggaataatggggtagattgtaagggagaaattattatttataaagattgttttagagttatgttgtttaatagagaagttattagttatatgtgtttatttatatttaatttaaataaaatttaaaagttagttttttaggtttataagttttatgttaagtgtttaatgattatatgtggttagtggttataataaggaatagtgtaggtatttttgtagatagttttgttggatagttttggtttagaaggttagaaagtgattagggataggtttacgggaaaatatttgaggaataaatagaagaagaagatagggaataaattggggaaattgggttatagaattaggaagagaattaggagatggaatttttagtaaagagaattttaaaacgtttatttattagttcggtagttagtaaagattttgaaacggtattttttttttatagttataaatattttttgatatggttttgtttagaaaggaaattttgagaaggataaacgatagtagtagttagggaagtaggtgtttagaggtttgtttgtttttttttttattaggagaagtttttaaaattgtatttaaatagataaggtttacgtttgtttatgtttatacgtattttttaataggtagttgtttgtatatttacgtaattttttgtttgtttgtgtaattatttacggtttatataagaatgtatgttttgagcgtagttttttttggtttatatatgtatgtgtatattttgaaggtgtaaatgaggtattgagtatagttttttaatgtagttttaaggggtatattattttgattagtattaatatagtcgttttatattaaggtatcgattttaggttttattggaggttatagtgttaaataagtaaataaatttagttttttcgtgtggtttaaagtttttttttgttttttatttttatttttgtttattaaagttttatcgtttgttaagtatttatttttttttaattttaagtttttttttagatttttgtttatattttaggtatttatataggtatttgtgtgttttttttttatttaattatgattttgtttttttaatttttgtttgttttatattattatgtattaatttttgaaatgtgttttagtgtattttttttgggaatgagttttttagttatagagtttgtgattgtagtagagtttagttaggtgtttaataagttattttttttttttttttaatagttggattatattttttagttttttttgtagttttatttaattatgtgattaagttttagttttggaaaggggtagaagtgatatgtatgatatttttaggttgaggtaattaaggatagatattttttttatatatttgttttttttttttatttagtggatggaaacgtaggatttaattaaaggttttatggttttggataatatagtaattagatagaaggaaatttggtatttgaatggttgtgtggagtaattttttttatttttttgtttatttttattggattgtgatataagattggattgtgaataagaaataaatattatgatgtttaattttaagatttgagatttgtttattagagtaattaggttattttgttgtaaattgattgtaaaattttttttaattattttttttttatataatgtgatttagtagttttttttattaagtggtggtgtttattttttattttttggatttaggtttggttatgtgttttgaattggtatatgaaatgtagtagaagtgatagagttagttttaagtttaggttttaagagattttgtaggtttttgtttattttttgagattttagattttattacgcgaagaagttagattagtttgttgaaggttgagaaataatatggagaagagcgaattgtttaagtagattagaagttaataaattaagttaagttgaattaattaaatttagattagattagtagaattttcgagttagttaatttatagatttatgaaaaataataagtg

SEQ ID NO: 2031 - DNA, 2492 bp, Artificial Sequence
  chemically treated genomic DNA (Homo sapiens)
ggttattgatatggtttggttttgtttttatttaaatcgtattttgaattataataattttcgtgttaaaggcggggttaggtggagaattattgatttatgggggtagttttttttatgttgtttttgcggtagtgaataagttttatgagatttgatggttttaaaaaggggagtttttttgtataagtttttttttttgtttgttattatgtaagatgggatttgttttttttttgttttttgttatgattgtgaggtttttttagttatgtggaattgtgagtttattaagttttttttttttataaattgtttaattttaggtatattttgattagtagtttgagaatagattaatatagttatttaaattaattttgtaatgattagaggtataaatatagatgatgatgatggtgatgaagataatagatttattttagaataatgagaaattgtggaaagtttgtttgagtcgattttaaaatagatattagtagataatattatagatgaaattaaattgtagttttaggaaaaatattatttttaaatttagggttattaattattttggaattattttatagttgtttaaacgtagtttgtatgtggtcgtttatttgatggttttatttttttttgattttttttttattttaattttgttgaagagattaaatgatcgtttgttaaaaaggtgtataaagtggaattttgtagaagaaataaaaataaatttttttgtgtatttgaatttattgatatatttagtgtttgattttattttttagtgtttgtgattttgggtaagattttttgtttagggatttggagttagttaggtaacgatcgttgcgtgtatttagtatgtacgttaggtatagttgtaaggtttttaattttttcgtttgtttgttagttattattttagatttatttgaaagttagtaaggagatagtggttgtaaagcggttttttgtttttaaagtttaggttttttgaggttttagaatgataaaatggagaggtagggttaggggaagagggtttggtgagattcgttttggttttcgtcggttttttgttaatgttcgtagatggtgggggtttatggtcgggacgttcgtttaggttttggtagttttatgtgttttagtatttttttaaaagttgattattcggtttgttttttttgtgagtcggtttattattattttattgtgtggtggtaatttttattcgtattatgaatattgattttatgtttgtttttttatttgaattataggcgggtaggtcggcggttcgtattgtttgtttagttttagtttttttggtagttatttgaatagttttaaagaaaagttgtttgtttgagtatttagggataatagagagcggttataggtcgttatagtgatttattaaaagataggaaaatgagagaaaagatttttattttttgtattagttgtttgtttttttgtttttttttattttttgttttttttttttttttttttttttttttattttttttttttttttattttttttttttttttttttttttgtttttttttttttttgtgtttttttttttgtttttttttttgtttttttttttgttttttttttgtttatatttttaaaatgagagagggaaaaagacggttgtgtttttaaaatttgtataaatttatgggatataaatattattttattatatggatatattgtatagtagtgaagcgtgagttttttgtgtgttcgtcgtttaaatgttgtgttaagtagatgtttgagggacgttgggtttgtttgttatatttaatgatatattttattaaaggtagatagaatttagggttagtttttgaaggatatgagaggagattgagtatttgtaggtgtgtgtgtgtatttagtgtatatatatatatatatatatatatattgtaaatggtgttagttgttttggaaaaaggaagttttttttttagaaaaataaggtagggtgttttttttttttaatttttttttttttagatatattttagtagtttatgattttttgagtttttattttgaatatagtgtttgttatttgaagaggttatttttgtattgtttagtttgggttttttttaagggaatgatgtatggagagttttttttttttggtgtgttggtttttttagttttaggtttagttttattattatttcgatggtttttttttatatgtaggaaatttgtgggaagtaaatatggttggagtgtgtgtagatttttaaagtgaaggttatattttggtgataatttttgtttaattaattgatttattggagtattaagtaagttgggttaggaaggatacgggagggtgggttgggtgattttggtatgttggtcgtttggtgtgagtaattgtatgggggtagtttttttaaattgagtcgtaaggattttgtttttagatttt

SEQ ID NO: 2032 - DNA, 2492 bp, Artificial Sequence
  chemically treated genomic DNA (Homo sapiens)
aaggtttggaaataaagtttttgcggtttagtttggaagagttgtttttatgtaattgtttatattaagcggttagtatgttagggttatttagtttattttttcgtgttttttttagtttagtttgtttagtgttttaataggttagttggttgaatagaaattgttattaagatgtagtttttattttgaaggtttgtatatattttagttatgtttattttttatagattttttgtatgtagggaggagttatcggggtggtgatggggttgaatttgggattggaagaattagtatattaaggagggaagattttttatgtattatttttttgagagaagtttaggttggatagtgtaggggtggtttttttagatggtagatattgtgtttagggtaggaatttagaaggttatggattgttggagtatgtttggggagaaggagattgagaggagaggatattttgttttatttttttgagaagagagttttttttttttagaatagttggtattatttgtagtgtgtgtgtgtgtgtgtgtgtgtgtatattaaatgtatatatatatttgtaagtatttaatttttttttatattttttaaaggttaattttgggttttatttatttttaatgggatgtgttattagatgtagtaaataagtttaacgttttttaagtatttgtttaatatagtatttgggcgacgaatatataaaaagtttacgttttattattatgtaatatatttatgtagtaaaatggtatttgtattttataaatttatataaattttaaaagtatagtcgttttttttttttttttattttaaaaatgtgaataaaaaggaggtagagaaagagatagaaagaaaggtagagagggaggtatagggagggaggaagatagagaaagggaaaaaaggaaaggatggaagggagggaggaataaagagaaaagagaaaagaggagagagatagagaataaaaggaagtaagagagtaggtagttggtgtaagaagtaagggtttttttttttatttttttgttttttaataaattattgtagcggtttgtgatcgttttttgttatttttaaatgtttaagtaaatagtttttttttgagattatttaagtggttgttagggaggttggagttgagtaagtaatgcgagtcgtcggtttgttcgtttgtaatttaggtagaaaagtaagtataaagttaatatttatggtgcgggtaagaattgttattatataatgaaatggtaatgagtcggtttataaaggagataagtcggataattagtttttaaggaggtgttggggtatatgaggttgttagggtttgagcgggcgtttcggttatgggtttttattatttgcgggtattggtagaaggtcggcgggagttagggcgggttttattaggttttttttttttggttttgtttttttattttgttattttggggttttaaggagtttaaattttgaggataaaaagtcgttttgtagttattgtttttttgttggtttttagatgagtttggggtgatggttggtaggtaaacgggaaaattggaaattttgtagttgtatttggcgtatatgttaaatgtacgtagcggtcgttatttgattagttttagatttttaagtaggaaattttatttaaaattatagatattggggagtggagttaggtattgggtatgttagtaaatttaaatatataaagggatttatttttattttttttataagattttattttatatatttttttaataggcgattatttaatttttttagtaaaattagaataaaagaagggttaaaaggaaatgaagttattagatgaacgattatatgtaaattgcgtttagatagttatgggatggttttagggtgattggtggttttggatttgaagataatgttttttttgagattataatttgattttatttatggtgttgtttattgatgtttgttttgagatcgatttaaataggttttttatagttttttattattttagagtaaatttgttgtttttattattattattattatttgtatttgtatttttagttattataaaattaatttaggtgattgtattggtttgtttttaagttgttaattaagatatatttgagattgggtaatttataaaggaaagaggtttaatgaatttatagttttatatggttggggaggttttataattatggtagaaggtaaaggagaagtaagttttattttatatggtggtaggtaagagagagagtttgtgtaggggaatttttttttttaaaattattagattttatgagatttatttattatcgtaagaatagtatggggaaaattgtttttatgagttaatgattttttatttggtttcgtttttgatacggggattattataatttaaggtgcgatttgggtggggataaagttaaattatattagtgatt

SEQ ID NO: 2033 - DNA, 2491 bp, Artificial Sequence
  chemically treated genomic DNA (Homo sapiens)
gaaaaaataaaaaaagtagttttaaataaatgaaacgaatgattgtaattaaaatttttttagttatatttttttatgatttttatgtgttgagaggattttaagtaaaaatagagacgggtcgtttgtttattttaattattaaaagttttttataagtgagttgaattttgtttaaaaggatattagattttgttatttaattattgtttgttttttagagttattatgaggaagtttatttttaagaatttgggaggttttagttgtagtggattataagaggtattggaatagttgatatattgaggtgttattaagaattatattattatcgaagtataattttgttgtagatatgattgttttgggcgtaggtttttatgttagtgttaaaaacgttaagatttggagaaaggagaggagaaagtagagttattttttttgtatgttttgttgtttggaaaggagatagaaaaatagtaggaaatgtttatttttttttttgggattttttagggattttttatttgaataggacgattgaattttgttttggtaagggatgatttgttggaagatgaaaagttttgtggtggaatatgagtggagttttttatagttttttaggtattgttggtgtagtacggggtagagggtgtggtataggtgaggaggtgggtgtggttttagtttacggtcgatagtttttttgttttttgttagggtagttttggtatgagtagttgggaattagattttgggtaaagtaggagtaaagagtttttttgagttttttcgattgattttaatggatttgtttttagaggggtatgaaggtggttgtgattttataagtagaatggaagtgatttgatttatatcgggtttgggaaaattggtttaggtgtggtaaaggtatagagtgtgaaataggtggggaaaataaatttaagattttgaatttttttatggtttttaaaggggaagttatgggtatagtgaatggaggggttgtttttagtttatttggcgttgtggtgaattgttttagggtttggtatattgttattattttaagatagatgggaaataaatattattagtatgtcgataagtgtttgtttttttttagtattagggttaagaaaaataaagtggggagggtattaagttttggagtaagtttttaaaaggtttttttttttgaattttttacggttgtttatttataatagttataattataatagagaggaaaagattttaattatttttgggatatattttgttaaaattatatttaagtattttttatttgtaagcgagaagtattattttttattatgtttttaaagtagcgtggggaagttgtgtgtataaattaaggtgttgttgtggtttgttgttttttgtgaatttttggaaaggattattaagaaggatgttttgataattgtttgttaggtaatttgtataagaggaaagaggtttttttgaagattattaaaaatgatttattattattggttatatatatatatgttgttttattatttaaaagtataaattatatattggtaagtaattgtgtttattagattattttaggttttgggaggagtagagaggtataaagtgtggtgattatttttaaggaaagtgtattttaattagggagataagaataattatacgtgtagtagttaaaagttatataaaagtttatgattaagtggtgagttgtgaataataggttatttatgttgtgatttttttagcgatgatataagcgatattttggaagaggtaaaatttgagataggtttttaaggattggtgttatttggataggttgaagaggagtaggagggttttcggatgtggagaatggtatgtataaaagtacggaggtgagaatgtatatatgtgtttgggatttttaaaatagggtagtttgattggattggagtttttgggtaatgatgagtgagtaataaaatggaagagaatagggttagaaggggtagataggagttatttatttttataatatgtatttattttttaattttattataaatttatattaaatttttttgtgttgattatttgagtattgtaatttaaaaagagtaattcgtgtatagagttttgtattgggttatagagtttgttttagttgagttttttttagaagtagatatagatagaaagagtttagagtaagtagtttattagggaggttattttaggaaattttagtagaggggtaggaaagtgagataggaagggaaaggaaggtagttagggaagtgttattaagatattaatatggataaatggagtaaaattttagtggtgaattttagaaattagtgtataaaatgtgttttagagtgaatttatttgggaggtgaggaagttggggtatttatttattagttgttattagttattgggtgagggttgtttttgagggtattaattt

SEQ ID NO: 2034 - DNA, 2491 bp, Artificial Sequence
  chemically treated genomic DNA (Homo sapiens)
aagttaatgtttttaaaagtagtttttatttagtgattgatggtaattggtggataaatattttaatttttttattttttagatgagtttattttgaggtatattttatatattgatttttagagtttattattgggattttgttttatttgtttatgttggtattttaatagtatttttttgattgtttttttttttttttttgttttatttttttgtttttttgttaaagttttttagaatgatttttttagtaaattatttgttttggattttttttatttgtgtttgtttttggggaaaatttaattaagatagattttgtaatttagtatagggttttgtatacggattattttttttaaattataatatttaaatagttaatatagaaaaatttggtgtgggtttgtaatggagttgagaagtgaatgtatgttatgaggatgggtaatttttgtttgttttttttgattttgtttttttttattttattgtttatttattattgtttaaaggttttaatttaattaggttgttttgttttagaagttttagatatatatgtgtatttttattttcgtgtttttgtgtatgttattttttatattcgaaagtttttttatttttttttaatttgtttagatggtattaatttttgaagatttgttttaagttttgttttttttaagatgtcgtttgtgttatcgttaagagaattatagtatgggtagtttgttatttataatttattatttaattataggtttttgtatagtttttaattattgtacgtgtaattgtttttgtttttttaattaaaatgtattttttttgggaataattattatattttgtatttttttattttttttagggtttaaaatagtttgataaatataattatttgttaatgtatgatttatgtttttaagtaataaaataatatgtatgtgtatgattaatagtaatgaattatttttaatgatttttagaaaggtttttttttttttatgtaaattgtttggtagatagttattagagtattttttttggtgattttttttagaagtttataaaagataataggttatagtaatattttggtttatgtatataatttttttacgttgttttaaaggtataataaaagataatgtttttcgtttataaataaaaagtgtttaaatgtaattttgataaaatgtgttttaggggtgattgaagtttttttttttttgttgtgattgtaattgttataaatagataatcgtaagagatttaaaaggggaaattttttaaaggtttattttagggtttgatattttttttattttattttttttagttttaatgttgaaggaaaataaatatttatcgatatattaatggtgtttattttttatttgttttggaatggtggtaatgtgttaagttttgagatagtttattatagcgttaagtgagttgaaggtagtttttttatttattgtatttatggttttttttttgggggttatggaaaagtttaggattttgaatttattttttttatttgttttatattttgtatttttgttatatttaagttaatttttttaggttcggtgtagattaaattatttttattttgtttatgaagttatagttatttttatgtttttttagaaataggtttattgaagttagtcgaggaaatttagaaaggttttttgtttttgttttgtttagagtttgatttttaattgtttatgttagagttgttttagtagggaataggaaagttgtcggtcgtgagttggagttatatttatttttttatttgtattatattttttgtttcgtgttgtattagtaatgtttggggagttgtgaagagttttatttatgttttattataaggttttttattttttagtaagttattttttattaaagtaaagtttaatcgttttgtttaggtgggaggtttttgaaagattttaagagaagaagtgagtattttttgttgtttttttgttttttttttaagtagtaaagtatatagaggaagtagttttattttttttttttttttttttaagttttagcgtttttggtattgatatgggagtttacgtttaaagtaattatgtttatagtaagattatgtttcggtggtgatataatttttaatggtattttagtatattagttgttttagtgttttttataatttattgtaattgaaattttttaagtttttgaaaatggatttttttatggtgattttaaaagataagtagtaattaggtaatagaatttaatatttttttagataaagtttaatttatttgtaaggggtttttagtgattggagtgaataggcggttcgtttttatttttgtttaaaatttttttaatatatgagagttataaaaggatatggttgagaaagttttagttgtaattattcgttttatttgtttagaattgttttttttattttttt

SEQ ID NO: 2035 - DNA, 2463 bp, Artificial Sequence
  chemically treated genomic DNA (Homo sapiens)
gaaggtatttatgtttttatttaagttatttagaggaaagaagttgttgtgtgttatattttcgggtagagaagagagtatttaatgaagtttttataagtgaatttttatgttatatgtattttttgtgtataattttttggagtaatgttaagtatatattggtatttatagtaatattttaatgtttttagtttgtttaattaatttttttttaatatatgtttatataatattaaaaatgttttattaagttagatattaggatattgttgaatatgtagatatttattatatatagatggatttaaatttattttgagtttatttatttatttattagtagtgtttgtggttttgtgatattatttgtgatttaattttaagtgtgattttatttatatgtggaaattaaataagtttattttatagaagtagagagtagtaaaggtagtagaggttggggaggagaggaagagaaggggtaagcggagatattgattaaagggtataaagtttttgttagattggaggaataagttgtagtgatggatagtattgtatggagattatagttaataataattgtatcgtatattttaaaattgttaaaagaatagatttttaatgtttttattataaaaaagtatgttggtgaggtgatggatatgttaattagttttaatgaatttttttataatgtatatatagtttaaaatattatattgtatttaatagatataaagaattattatttgtaaattaaaaattaattaataaaaaattagaaagttgttattttttaaatatatttacgggttaatttttttatgtggaaaagtaatgtcggttttattataaatatttttttagttggttaagtagattatttaatttgaattaatatattttttttttatgaggttaataaagatattttaattaaaattaaaaaaaaattttagttttattttttttttttgttttttgatttagtttttgtaggtaagaagttgtttattattgatagagataaaatattttaatgagtgatggaatttttattttttatttaaatattacgttaatatttaatataaaatattattgttttgttttatatagaaattgtaagtttattttgtttgaaatatggggaaataaattttcgttttgattttttttttgttgttttagttgtgtgttattgatattggcgtgatttgttatgggaaggtgtaatgaggtaagattgggattgtaataattattaatttataaatacgttatggtaaagttaaggtaagttagagtgatatttttaaatattttaggaaatagtatttatgtttgaattatttattttattagttcgttttgatgaatatgggagaaattaataattttttaatataaagagtaatttaatgttattaattgggtattttatatgggttgatagattgtttttttttattttcgtttttttggtggtaatttattgagttgggaaagtttgagttcggtgtagtatttggtttttagtgatattttgttggttttatttaattttttagttgggagtatgaggtatagggaggtcgaatgatttgtttaaaggttatttggtagtttaattgggattataatttaaaatttttttgatttttttattttttgtttattggattataaaatttttttgattttgtttttttaagtttgtttgagtaggaagtaaatgtttaggtttagaaaaaagaattttaaattaagtattggttaaaattatttttaaaaatgtgtgaaatttttattggtataatttttaagaaatattttatttttattttaatatttgagaatatgtgtgattatgggagtgttgtttttttttaaggggttattatgggaaagtttatatttattattgtttggatgttgttttggttaaaatattttaggaattttaaaatttgatgtttgtggtagaatataattatttgaatatataatggattttgtttatattatatttagaaatagggtatttgattttattaagtgttataaattatttggtttattttgtagtagaatttttaggtttgttttttttttagtttgtaaatttttttcgggatttttttatggttggtaattttttattatttaggttttagtagaaataatatttttttagagtgagatttgttttaattttttgatgtaatggttttttttgtttgatggttttatttttttttttattatatttattagtatttataattattattgattttattttaaaaattcggtatgttttaattttgagcgtaggagtttgatttgttttgttttttagtatattttagataatgtttgatatataaaagaagtttaataaatattttttgaaagaatggatagttatttttggtaaaagaaggtttttttttt

SEQ ID NO: 2036 - DNA, 2463 bp, Artificial Sequence
  chemically treated genomic DNA (Homo sapiens)
agaagagagatttttttttattaggaatggttatttatttttttaaaaagtgtttattgagttttttttatatattaaatattgtttaggatatgttggaaaataagatagattagatttttacgtttagagttaggatatatcgaatttttaagatgaaattaatgataattgtaaatgttgataaatgtaatgaagaaaaaaatggggttattagataaagaaagttattatattaggaggttagagtaagttttattttgagaaggtattatttttgttaagatttgaatgatgaaaagttgttagttatgaggaaatttcggggaaaatttgtaggttgagggaggagtaagtttaagagttttattataggatgagttagatggtttatagtatttggtggagttaagtgttttgtttttgagtataatatgagtaaggtttattatatatttaagtggttgtattttattataagtattaaattttggagtttttaaaatgttttggttaaagtagtatttaaatagtgataggtatggatttttttatggtgattttttggaaagggataatatttttatggttatatatatttttaggtgttagaatgaaaatgaggtattttttaagagttatattaatggaaattttatatatttttaaagatgattttggttagtatttaatttgggatttttttttttaggtttaaatatttgttttttgtttaggtaagtttgagaagataggattaagggagttttgtggtttagtgagtaaaggatgggaaaattagaaagattttgagttataattttagttgagttattaggtgatttttaggtaagttattcgatttttttgtgttttatgtttttagttggaaaattggataagattagtaggatattattgaaaattagatgttatatcgaatttaagtttttttagtttaataaattattattaaaggggcgggggtggggaggggtaatttattagtttatgtgaaatgtttaattaatgatattaggttattttttatattaaaaagttattaattttttttatatttattaaaacgaattaataaaatgagtaatttaaatatgagtattattttttgagatatttagaagtgttattttggtttgttttgattttgttatagcgtatttgtaggttaataattgttataattttagttttgttttattatatttttttatggtaagttacgttagtgttaatgatatatagttagaataataaagagaaggttaaaacgggagtttatttttttatgttttaaataaaataaatttgtagtttttatatgaaataggataataatgttttgtgttagatattaacgtgatatttagatggagagtaaaaattttattatttattagaatgttttgtttttgttaataatgaataattttttatttataaagattaaattagaaaataaaaaagaaaaataaaattggagtttttttttagttttaattaaaatgtttttattagttttatggaaaaaaagtatattaatttaagttaaataatttatttgattaattagaaggatgtttgtgatgaaatcgatattgtttttttatatgaaaaagttaattcgtgagtatatttgagaagtagtaattttttaattttttattaattaatttttaatttataaataataattttttatatttattgggtataatgtgatgttttgaattatgtatatattatagaaagatttattaaagttaattaatatatttattattttattaatatatttttttgtggtgaggatattggaaatttatttttttagtagttttgaaatatgcgatataattgttattaattgtggtttttatgtagtgttatttattattataatttatttttttagtttaatagaaattttgtattttttgattaatattttcgtttgtttttttttttttttttttttttagtttttattatttttattattttttgtttttatgagatgaatttatttagtttttatatataaatgagattatatttaaaattgggttatagatagtattataagattataaatattattgatgggtaggtagatgggtttaaaataggtttaagtttatttatgtgtaataagtatttgtatatttagtaatattttggtgtttggtttagtggaatatttttaatgttatatgaatatatgttgaaagaaaattaattaagtaagttgaagatattaaaatattattgtgggtgttagtatatgtttaatattattttaaaggattatgtatagagaatgtatgtggtatgaaaatttatttatgaaaattttattaagtgtttttttttttattcgaaaatgtaatatataatagttttttttttttgagtgatttgggtggaagtatggatgttttt

SEQ ID NO: 2037 - DNA, 2485 bp, Artificial Sequence
  chemically treated genomic DNA (Homo sapiens)
atagtttaaagtttaagttataaggagtgtatttgagaatttttagttggttttatagtagtttttgaggtttttttagtatatagttattaatgaagttttttaatggtttatggttatattatgtttttgttatattttgtatttttgggattttattttgaatatgtgttagtagtaaataatttttttgttttatttattattaaagttaggaaataatttttagggatgatttttaagataataattatttgttggaagtggaagttatgagtttgtttagtggtatagaatattttttttttattgagagttttgaaaatttgttgtttttatgtataatagagattataggtataatagagagaagaatggtatgtattttaagttttaattttaagaatttatttggtattagtgagtagtataattttattttttttttaattttgttttttttgaattaattttttttattgtttgataaattatatggtttgattgtgtatgttatatgaaaatatatttgaaagatatttagatttttttttggaattaagtaaaagaagtatttggttataaatatgtggtaattgggtttgaggttatgtatatatatttttttttagttgtagttaaaattaggtttgggggtttttgatgagtttttttgtggttattgttattaaagaaaaatggatttttttgttgtatgtttagaaaattagatattattattatttgattatttatttattggtatagtttgttttatttattaaagaaaagataaggttgaaattggatttatttaatgtatgttcgtggttttatgtgtttgtagataataagtagttttgggtgtttgtttagggttgattttttaggttataattggtattattttgatttttttttggatgagtttatatcgttatggagtttgtagttttaaataagaaaatatttataaaaatgagaggggtaaaatgttttttttggaagtagtaggggagggggtaggaaggggaggtttttgtttatttatggaaaatggacgtgtgttttatggtagtcgtagtttaagtaaatataaattttgaattagagattatattcgttatttttttagtattagtaatattaaattaaaatatagttttatttggttaattttaaagtaggatgtgggtgttagttttgaaaattatatgatcgggtttttagtagatattattagggttatgtttttgttttaagtaagaaagttataaaggtaatattttttgtagtattattattatgtttagtaaatagatgtaattataataatagttaattttagagataatagtttattatagaaaaaggttaagagggttttttattttttatgcgtagaatttgagttattttatattataattttattgagagaagaggtattaaaagagagataatgagaatttagggtataggtttaggtagtggggttgggtggggaaagaatttttttatttttttatgagttttagagtcggttaatttggaatttatgtttagaagtattattttgatttttgtggaaagtcgttttttttaaatagtaatttagtaatgagtaaagtattaaattgtgattttgatatgtttttattttgtttttttttttataaagaagattttttagggtttagggttattttagttattttaagttcggtaagtatttagttagggtttgttgttttagaggtttttatggtgtggttttatttatttatttattatgaagttgttgttttttttttttttttggagttagggagggaggggtagatgatagagttgggtgttttgagttaatgattagttttatatttataagtttatttatttttgtttttatttggcgttttaatgttgttaatgagtgggaattaattttattgagggttatttagttttttaaaagaaaattgtttatttggttggaaatgttttgatagaaggtagagtagtcggttatatttgaatattgtgttttttagatttgggggtagagggggagtggtagatttagagggagaggggattaagtagttattttatatgagttattatggggtggtcggaattttagtagagtttattaatagattttcgtgttaaagatatagtttgttgtttttttatttgttattttttattaaatttgtgtatgattttttagtattttttttaataattagttgttcgtaagaaggtaattattttatggtgaattggagaagaagaaaagatattttaggaaaatgttatgataatagaaaattttttagtgttgtaattatttggtgtgttacggtgataaagaagtcgataattgagtgtttaataattttttttggtttgagataatgggtatttattttgatttgtgttttttataagagtaattcgttattattttatattatat

SEQ ID NO: 2038 - DNA, 2485 bp, Artificial Sequence
  chemically treated genomic DNA (Homo sapiens)
atgtggtgtgaaatgatggcgaattatttttgtgaagaatataaattagggtgagtgtttattattttaggttaaaagaagttattgggtatttaattatcggtttttttgttatcgtagtatattagatggttataatattgaagagttttttattattataatatttttttagagtgttttttttttttttttaatttattataagatgattatttttttacgggtagttgattgttgagaagggtgttggggggttatgtatagatttagtggggagtggtagataaagagataataggttgtgtttttagtacgagagtttgttgatggattttgttgggatttcggttattttataatagtttatgtgaaatgattgtttggttttttttttttttgaatttgttattttttttttgtttttaaatttagaagatatagtgtttaaatgtgatcggttgttttattttttgttaaagtatttttagttaagtgagtagtttttttttaaggaattgagtggtttttaataaaattaatttttatttattggtagtattgaggcgttaggtgaggataaaagtaaatgagtttgtgaatatagggttagttattaatttagggtatttaattttattatttgtttttttttttttggttttagagaagggagaaaaataatagttttatggtaaataaataaatgaaattatattatgaaaatttttgaaatagtaagttttgattggatgtttatcgaatttgggatgattggaatgattttgggttttgaagaattttttttataagagaaaagataaaatgaggatatgttaaaattataatttaatgttttgtttattgttggattattgtttggaaaaaacgattttttatagaagttaaggtgatgtttttaaatatggattttagattggtcgattttagaatttataagaagatgggaggattttttttttatttagttttattatttgagtttatgttttaggtttttattgttttttttttaatgtttttttttttaatagagttgtaatatgggatagtttagattttacgtatgaagagtaaaagatttttttgatttttttttgtagtgaattgttgtttttgaagttaattgttgttatggttgtatttgtttgttaaatataatgatggtattataaggagtattgtttttgtgatttttttgtttaagataaaagtatagttttggtggtgtttgttggaaattcgattatgtggtttttaaggttggtatttatattttattttggggttagttaaataaaattatattttggtttggtattgttagtgttgaggaaatggcgggtatgatttttggtttagagtttatgtttatttaaattgcggttattatgagatatacgtttattttttatgagtgaataaaagttttttttttttgtttttttttttattgtttttaaagggaatattttgttttttttatttttgtaggtgtttttttatttaaagttatagattttataacgatgtgggtttatttaaagaaaaattaaaatgatgttaattatagtttagaaagttaattttgaataaatatttaaggttgtttattatttatagatatataaagttacgaatatgtattgaatagatttaattttaattttgttttttttttaataagtgaaataagttgtattagtaagtaaataattaagtggtgataatatttggttttttaagtatgtagtagaaagatttatttttttttaataataataattataaaagagtttattagaaatttttaaatttgattttggttgtaattagaaaagaatgtatgtatatgattttagatttagttattatatgtttatagttaaatgttttttttatttaattttaaagaggaatttaaatattttttaaatatatttttatgtgatatatataattaaattatataatttattaaataatgagagaagttagtttaaaaaagataaaattaaagagaagataagattgtattgtttattaatgttagataaatttttgagattgaagtttgagatgtatgttatttttttttttattgtatttataatttttattgtatataaaggtaatagatttttaaaatttttaatgagagaaaaatgttttgtattattggataagtttatgatttttatttttaataagtggttattgttttgaaggttatttttaaaagttattttttaattttagtaatgggtagaataagagaattgtttgttgttgatatatgtttagagtagagttttaggaatataaagtgtgataaagatatgatgtagttataggttattaaagagttttattagtggttatatgttaaaaagattttaaaaattattgtgaagttaattaagaatttttaaatatattttttatggtttaaattttgggttgt

SEQ ID NO: 2039 - DNA, 2485 bp, Artificial Sequence
  chemically treated genomic DNA (Homo sapiens)
tgaagtttttaattttttttaaagtatatttttgtggagaaggatagattataaagaagtgaatatataaataagatataatatagtataaatatttaggaaaataaaaatgtagtaatgtgataaattttagtaggttattatatatattttatgtatatatataatataggtttatatatataatataggtatatatatattttttattattaatttaatttagtgataaattattaagttttatttttttattagatgttttttttgtttaaaggattttatatttagatggttgtatgaagtatttgggttttagttaaatgttagttttttattgaagttttttttgatgagttagtttataatagtttattaagatttattatattattggattttagtttttttgaatatttttgttatattatagtgtttgtttatttatgtgtttatttttttgttatttgtttttttttaaaagaatgtgttagggattttatgttttttatttattgatgtatttttagaatgattagtgtttggtatatggtaattttagttataatttttttaattaatggtttatttttgttttttatggatataatattattttatttgaaaaaaataagtatttttagtttatgattatttttgagtaaatgaggatagtaatagtataagatttttagtggtatttttaatgaaagaattatataataatttttgattattttttgtttttatgtgtttataattttattgttaatattaagagagtgtattttgttgttattaattttggttatatttttataagtatatatagtaggttattattttgttttataaatagaagttgattaagttgtttattttgtaggatttataataaattatagtttaatatagtagtagaatgtaaggatttagaaggtttaaaatttataagtttaggaagatatttaattaatagaaattaaagtttaaatttgatttatttatttattggaaattttgggttgttaaataatatttaagtttattttgtaattagattaaagttttgggttttgtgggggtcggagattggaattttattttaaaaagaaacgtgtaaggtattttgttttttattaagaagtgtaatgagtaggttttatttatgatttttagttttaaatgattgaattggtattagtgttaaaaaaattgaaaatgttttaatatgtattaatcgtttaatggatgtgttgtttgtttgaaaagggcggggtggtatttaggttgtttaatgattttatatttttttatggtaaaatatttgtgatttgattatgttgtaattaaagagttatataaataatatttttggaaaggaataaacgggtttttttgaaagagggattttggttagttttagttggtattttaggtttttttatgaggagaaaatttttatttttaggtaaatttttttttttgttttttagaagttgtttttagttttatgtttgtttgtgtgtgtgttgtgagtgtagattatgggagatggggagtgggtagagggaggattttttaaaaaataaatgatatttttaatagataattttaaaataggttgaaatataagtaataaagataagtattttaaatttagaaaaggtttgggattttgaagttaaaaagtttagtaatgagaaattttaagggtagagtgggatttgttttgtaaaattagtcgattaaatgtttattattgtataaggaagaatttttgaatttatgtggtttgtttttatgtgttttagaaattattttttttaggagtatagattttaagttttttaattataggtttttcgtaatttttggtagttaagagaggtttttagtagggaaggtgggtattttattttttaaagaaagtatattagttaggataatttagaaagaaatttagaggtttggttttaggtttatattgaatttttatttttgggtattaggagcgtttttttttttaagtttttattgtaatttttgtttattatatagttataagaaaggtgggaattaatgagaataaatgttaaattatttaattatagttaatttttatagtatatttttttttaattttttagattttaattttttttatgttgtaatttttgttatatttggtaatgagttatttattatgtttattgatttaagttttttattaataatttataatttatttttaaataaaaataaatattaattgtaattttatttttttttagatatttttatttttttagtttttaaatattagaaattaaattttatgagttttttatttattaaatagtttaagttagtaaattgagttgaaattaatttgtttttttattagatatattggtaatttttttaaagttggaatgagagaagaggtttggggtttggggagtttgttttagaggttgtggta

SEQ ID NO: 2040 - DNA, 2485 bp, Artificial Sequence
  chemically treated genomic DNA (Homo sapiens)
tattatagtttttaaggtaaattttttaaattttagatttttttttttattttagttttagaaaaattgttaatatgtttaatggaaaagtaagttgattttagtttagtttgttggtttaagttatttagtaaatgaaaggtttataggatttagtttttaatatttgaaagttgaggaggtgaaaatgtttaaagaaaaataaagttgtagttgatgtttatttttatttaagaataggttgtaaattattggtgggaaatttggattagtgaatatgatgaatgatttattgttaaatgtagtaaagattataatatgaaaaagattgaaatttaggaaattaaaagaaaatgtattgtgaaagttaattatagttaaataatttgatatttatttttattggtttttattttttttgtaattgtataataagtagggattgtagtagggatttgaaaagaaaagcgtttttaatatttaaagataaagatttaatgtaaatttgaggttaaatttttgggtttttttttaaattattttgattggtgtgttttttttggaaggtggaatgtttattttttttgttaaagattttttttgattgttaaaagttgcgagaaatttatggttaagaaatttagaatttgtgtttttggaggaaatagtttttgggatatatgagagtaaattatatgagtttaaaggtttttttttatatagtaataaatatttgatcgattggttttataagatagattttattttgtttttggggttttttattattaggttttttggttttaagattttaagttttttttaaatttaaagtgtttgtttttattatttgtattttaatttgttttaaaattgtttattaaagatgttatttattttttaaaaaattttttttttgtttattttttattttttatgatttatatttataatatatatataggtaggtataaaattaagggtaatttttaagaggtagagagaggagtttatttgggggtgagagttttttttttatgaaggggtttgagatattagttggagttgattaaaattttttttttaaggaagttcgtttgtttttttttaaagatattgtttatgtaattttttaattatagtataattaaattataagtattttgttatgggaaaatgtaaagttattaagtaatttaaatattatttcgttttttttaggtagataatatatttattaagcgattaatgtatgttaagatatttttaatttttttggtattaatgttagtttaattatttgggattggggattataggtgaaatttatttattatattttttgatgggaagtagagtgttttatacgtttttttttaaaatagaattttaattttcggtttttataaggtttagagttttaatttgattgtaaaataagtttggatattgtttgatagtttagaatttttagtaggtggatgagttagatttgaattttaatttttgttaattgggtgtttttttgagtttgtagattttaggttttttaaatttttatattttgttgttatattgggttgtggtttgttgtgggttttatagaatggataatttaattaatttttgtttgtaaaataaaatagtgatttgttatatgtatttgtgaagatgtggttagagttgataatagtaagatatatttttttagtgttagtagtaaaattatggatatataaagataaagagtaattagggattgttgtataatttttttattgaaaatgttattaaaaattttatattgttattatttttatttgtttaaaaatagttatggattgggggtatttattttttttagataaaatgatgttgtatttatgagaagtaagaatgaattattggttgaagaaattgtaattgaaattattatgtgttaggtattggttattttggggatatattaatgaatgagaagtatgaagtttttagtatatttttttggagaaggatagatgataaagaagtgaatatataaataaatagatattataatatagtaaaaatatttagaaaagttaaaatttagtaatgtgatagattttagtaggttattataaattggtttattagggaaggttttaatgaagaattgatatttaattgagatttagatattttatgtagttatttaagtgtagagttttttaggtagaaaaagtatttaatggaaaggtgaagtttaatggtttgttattaaattaagttaataatagagaatatatatatgtttatattatatatataagtttgtattatatatatatataaagtgtatataatagtttattaagatttattatattattgtatttttgtttttttaaatgtttgtgttatattatattttgtttatgtgtttatttttttgtagtttgtttttttttataagaatgtgttttaggggagattagggatttta

SEQ ID NO: 2041 - DNA, 2432 bp, Artificial Sequence
  chemically treated genomic DNA (Homo sapiens)
ttaaagtggaagagtttttagggagaagtttttggaattgtttttagtgaaattaatataaatatgtatgatgtttgattgtttgagtttttatgtgaatatatttaaatatattataatatatatttaatatataggttatttatatatatataaaatatatattatattttttatattatatatttttgttatttattgttttttttatattaaatattttcggtaagtatgttaatgggtttatttattttgtagatgaatgagggttaagtttgtaatgggttttttgtgtttttagaaaatttgtaatttaattgggggatatatattgtttgatgaattttgaaatttgaggtgttatgttttagtttttttttaagtttttttaaagttgattatttaggtattgatatattttgtttatttataaagttatttttgagtaagggaggaattaaggtggaagaaagtttttaaaatttttttgtttaggggaaaattttgtttaaggtattgattattaatttagattttagtaaaagttttaaggggatagtgatttttttgtttaagtgtaatacgtgttgttagtgtttatttatattttaagtttttatttgttagtgaatagaagtttaatttttaaagtttaggatttgtattttttggtttgagggttttttttagattaagaaggtttttttgtttgtttttgtattaagttagtagttgatattattaataagtaattttttttttgtgattgatagcgaggtatgttttgtacgggttttttagaattttttatcgggattgagttttagttgtttatagtggtgattggtttgagtaaatattttttattgattgtatttttttttttggtttatttttttatatttttattaatgttttttgggattattttttagataatttatttgtattgaaatttttattcggggttagtttttatagaatttttattaagatattaggaaagggggaagttttttgtaagtatacgtgataaaagaaagataaagtttagtttgttaaaagggattagagttataaatatgtttataaaaattttgttttgttatttatatttgatttataatgattatttgggaaatttgtttttttgttggggtagggatttgattgattatgtaaaggggaaatagatgtatttagtttgcggttttatatatttgttggatgagtaacgattataatttgttaggaggagataataaaaaaatttatataaaattttttattgtgtaagtgatattggttattgtagtcggtaattagaaagttatttcgaggatagaatttttttgtttattaatgtagagaaaatggttagtttgttttttacgttttagaatataatattggagatgttaggatttattttagaggagttatgatattagtaaaatataaaaaggatgtagtaaatgtgtgttatagtaaagattataaaataaaatttaagtattttagagtttttggggtaaattgaatttatgggaattgaaaaataaatggtttgaaaaaaagtatgttttttttatagagaataggaaaataatatattttttttttttatgaagagtaagtttttttggttttaaaattgtaattgagatattttttaatatataaaaatattattttataaggatttatttatagttttggtatttgtaattaggttttagtttaaaggttttttttttagcgtggatagatgttaatataggaatataatttgtaaataatgagagtaattagtatttttttttatttgtttttattatttaatttttcgtttgatattgacgtttttttttgtagatttagtttttgtgggagtagttagggtgttagcgtttttatttattttatattttttattttaatatagttttagaaggttttgtatttatcgtagggtgtgggagagtttgggatgatgaaggggttagttttataatattagtattattaataaattttaaatatttgaggaaaggggtttattttgaggtattttttagtttaatttaagcgttataataaagattagtatttgtatttgtttttatattttaagttttgatatttaataaaattaaaaaaaaaatagtgtttatattataatttaatgtatgttagtggaggggtaaagggatttagtttatgtagttatatagggatttaggttgtttttgtatattggttttataatgttttaggatataggttagtaagtattatgtttaaagagttagagagtaaatatttttagatttgtgaggtatatagtttttgttttaattattgttattatagtgtgaaagtttttataaataatatatgaataaacggttatagttgtatagtaataaaat

SEQ ID NO: 2042 - DNA, 2432 bp, Artificial Sequence
  chemically treated genomic DNA (Homo sapiens)
gttttattgttatgtagttatggtcgtttgtttatgtattatttatggaggtttttatattatagtggtagtagttgaaatagagattatatgttttataaatttgaaaatatttattttttggttttttaaatataatgtttgttgatttatgttttaggatattgtagaattaatatataggggtagtttagatttttgtgtgattgtataaattaggtttttttgtttttttattaatatgtattaggttgtgatatgagtattattttttttttaattttgttaaatattaagatttggggtataaaagtagatgtaaatgttagtttttgttatagcgtttgggttgggttaaaagatattttagaatagatttttttttttaaatatttaaggtttattgatgatgttaatgttgtaaaattgatttttttattattttaagtttttttatattttgcggtgaatgtagagttttttagagttgtgttggaatggagggtatggagtaggtgaagacgttggtattttggttgtttttatagaggttgaatttgtaggagggagcgttagtattaaacgggaggttggatgatgggggtaaatagaggaggatattgattatttttattatttataaattgtatttttgtgttggtatttgtttacgttgaaaaggaaatttttagattaaaatttgattataaatattaaaattgtgggtgagtttttataaaataatgtttttatatgttaggaaatattttagttatagttttggggttagaagagtttattttttataaaaaggagaaatatattatttttttgttttttgtaaaaagagtatatttttttttaagttatttattttttaatttttatggatttaatttgttttaagagttttgaaatgtttggattttattttatgatttttattgtaatatatatttgttatattttttttgtattttgttggtattataatttttttggaatgaattttagtatttttagtgttatattttgagacgtgggaagtaggttagttattttttttatattaataggtagaaaagttttgttttcggggtaattttttgattgtcgattataataattagtgttatttatataataaaaagttttatgtgaatttttttattgtttttttttggtaaattatagtcgttgtttatttagtagatgtgtgaggtcgtaggttgagtgtatttgttttttttttatatggttagttaggtttttattttagtaaagaggtaaattttttaagtggttattgtaaattaagtataggtaataggatagagtttttgtaaatatatttgtgattttggttttttttgataaattgaattttgttttttttttgttacgtatgtttgtagaggattttttttttttttggtgttttagtaggggttttatagaggttgatttcgagtaagaattttagtgtagatagattatttgagaggtaattttagaaagtattggtaggggtatgggaaagtgagttagagaaaagaatgtagttaatgaagagtatttgtttaagttagttattattgtagataattggggtttaatttcgatggggaattttagaagattcgtgtagagtatgtttcgttgttagttataggaagagagttgtttgttggtggtgttaattattagtttggtatagaagtaggtaaagaagtttttttagtttagagaaagtttttaggttaagaaatgtagattttgggttttgaaagttgagtttttgtttattgatagataaggatttgggatgtgggtaggtattgatagtacgtgttgtatttgggtagaagaattattgtttttttagggtttttattgaggtttgagttaatagttagtgttttaaataaaatttttttttgggtaaaggggttttgagggtttttttttattttgattttttttttatttaagagtggttttgtaggtggatagggtatgttagtgtttaaataattagttttggggggatttggaaggagattgggatatgatattttaaattttaaagtttattaggtaatgtgtgttttttagttaaattataaattttttgggggtatagaaagtttattataaatttaatttttatttatttatagagtgaatgagtttattgatatgtttatcggagatgtttgatatgggaggggtagtggatgataggggtgtgtgatgtgggggatgtggtgtatattttgtgtgtatatgagtggtttgtgtgttaagtgtgtgttgtgatatgtttggatgtgtttatatgaggatttaggtaattaaatattatatatgtttgtgttggttttattgagggtagttttaagagtttttttttaaggatttttttattttga

SEQ ID NO: 2043 - DNA, 2411 bp, Artificial Sequence
  chemically treated genomic DNA (Homo sapiens)
agagtttttttagaggtagtatttgaataattatgttattaaatgttatcgtggtagtagagaataagtatgttaattttttttagttttttagaaaaaggatatttttgtttttttttttttaattttttttatttatttgggagagtatgttataaatgtggtttttaaatatatgaatcgatgtttttattttaatagttaagaatatggtttttagaattatatagagttgaatttatatttagttttattatttattaggtatgatcgttggtaagttaattttttgggatttagttttttttttcgtaatatgagggtaacgtagttataatattttaaggaagttttggggattaaatgagaaaacgtgagtttgaaaaagtggggtatattttttatgttttttgtggttttttttaattttgtaattttgtaataggatttaataaatattttttgtggatttgtaatgtggttttattttgtatgatttttagagtaattttatggagttaaattattttaaattttagtaatttgaaataataaatttttattattttttaaaattttgtagatgagttggttggttttttttatttgagttggtttggttaggtttttttatgtatttgtgatgaaacggaggaatagttgttggttggttgttttaggatggttataattatatatttggtagttggatggttattagtgttgtaggatgattagtaggtgttttttttttttcgtaggttagtttgggttggtggtttattttgtggttataagagagtgagaaaaagtgtgtaatattttttgaagtttaagtttagaattgatatatgtttatttttgttatatttgattagttaaagtaagttttaggttagtttaggtatagtaggcgaggaattagattttattttttgatgagaggagttgtaaagttatgtgtaagtttaggaagatttcgtggttattttagtagtcgattaggttatttagttagttttttggagttatatatgtgggttggtttttttaagtttttttcgtttaaaaagttagatagagtttgtttttttagtagggcgtatatcgtaggtttgggtgggttgtttgtttttgtgtttgttttgatttttagttatttttaggatgttttttttatggaggagaacgatttagttttgtttgttatgtgtattaagatgagttataagagagtattgtttttttgtaatgtaagaaatgtaatgtagttagaggttttgaaatttggtggggatagcggtagtagagattgtgatagtttcgggatataggaggttattttggtttttagttttaggtgtttggagttattagatagttaaagttgtataaggtataggtatgatttgttaggttgtttagttaggttagggatgatagggtacgtttattttattagttaattagagataattttcgtttgaggaatgagcggaatttttagtttttagatgacgttgggtttgagttttttttgttagtatatttggagattttataagagttataaaagtttgtaaagggttttggagtgttttatttaatgaaattatatttttttttttggattgggttaaggaggggttatatatattcgatagggtgtttttagatgggggtgtgtagaggatgggtttttatttagtttcggttattttttattttttttaaaaatttattgtgggttaggataaggagaaataagagatcgtgattggtagagatataggaaggaatgttttaaaaagagtaaaaaatttgtttttatgtattttgttgattgagtttttgggaatggagtttttttttgaggaaatattataatatggtttagaggcggaaggtttcgagaagggttttggtaagtaggggaaaatgtttttttaacggtttttttgattttaggtagagttttatttagtgatatttttgggtgagtgggtaaaatgagaaattttttttataattttttttgtttatagaaggtattaaatgaggttcggtaagaggttaggattaggtaagtttagaggttagaaattttagttaggtttatttagtatttaggaagagtagaggtttagtagtttttgagggaggtatagtttggtttttggaaaatggttttattgggttttattttttaggtatttggtttttggttttagagataatgttgagtttagtttttatttatgtgaaagtttttaaatttaaaagttagggagacgttttatattatatttagatagagggataaggaataaaatttatttattttttttttatgcgtttttttttgtaggttgcggttttatcgtttttaggcggttggatggggtcgtttt

SEQ ID NO: 2044 - DNA, 2411 bp, Artificial Sequence
  chemically treated genomic DNA (Homo sapiens)
ggggcggttttatttagtcgtttggaagcggtggaatcgtagtttgtagggagaaacgtatagaaaggaagtgggtgagttttattttttgtttttttgtttgggtatggtgtgaggcgtttttttggtttttggatttgaaaatttttatatgggtgagaattgaatttagtattgtttttagagttaaaaattaagtatttggagaatgaggtttagtagggttattttttaagagttaagttgtgttttttttaggggttgttgagtttttgttttttttgagtgttgggtaggtttggttgaggtttttggtttttagatttatttgattttggttttttgtcggattttatttaatattttttgtgggtagagagaattgtaggaggaattttttattttgtttatttatttaggaatgttattgagtggggttttgtttgaggttagagaggtcgttgaagggatatttttttttatttgttaggatttttttcggagtttttcgtttttgagttatgttgtggtatttttttaggagaaggttttatttttagaggtttagttagtaaagtatatgagagtaagttttttgttttttttgggatatttttttttatatttttgttagttacgattttttgtttttttttgttttggtttatagtgggtttttggaaggggtgagaagtgatcggagttggataaggatttattttttatatatttttatttggaggtattttgtcgggtgtgtgtgatttttttttaatttagtttagaagggagggtgtgattttattgaatgaggtattttaaggttttttgtaaatttttatggtttttgtgaaatttttaaatgtgttagtagagaaaatttaagtttagcgttatttgagggttgggagtttcgtttattttttaggcggggattgtttttgattagttggtgaggtgaacgtgttttgttatttttggtttggttgggtaatttggtaggttatgtttgtgttttgtgtaattttggttgtttggtagttttaggtatttaagattgaagattaaggtggttttttgtgtttcgaggttgttatagtttttgttgtcgttgtttttattagattttagagtttttgattatattgtattttttgtattataagaaagtaatgtttttttgtagtttattttaatatatatggtagatagaattgagtcgtttttttttatgaaagaaatattttggaaatagttaaaagttaaaataaatataaaaataaataatttatttaggtttgcgatatgcgttttgttggaaaaataaattttgtttggttttttgggcggagaagatttgggaaggttagtttatatgtgtggttttagaaaattggttgagtagtttaatcgattgttaaaatggttacggagtttttttaggtttgtatatgattttatagttttttttattaaggggtggagtttagtttttcgtttgttatatttgggttggtttgggatttgttttgattaattaaatgtggtagaaatgaatatgtgttagttttgaatttaggttttaaggggtgttgtatatttttttttatttttttgtgattataaagtgaattattagtttaggttagtttgcgggaggaggagaatatttgttagttattttgtagtattgatagttatttaattattagatgtgtgattgtggttattttagaatagttagttaatagttgttttttcgttttattatagatgtatgagagagtttggttaagttagtttagatgagaagaattaattaatttatttgtagaattttgaaaaatgatagaagtttgttgttttaagttgttaaggtttgggatggtttaattttatagggttattttgaggattatgtaagataaggttatattataagtttataagaaatgtttgttgaattttattatagagttatagaattggaagagattatagagaatataaaaaatatgttttatttttttaagtttacgtttttttatttagtttttaaaatttttttgaaatattgtgattacgttatttttatgttacggaaaagagggttgaattttaagaagttaatttgttaacggttatgtttagtaagtggtgaagttagatgtgaatttagttttgtgtgattttaaaggttatgtttttaattattaggataaaagtatcggtttatatatttaaaaattatatttgtggtatatttttttaaatgggtaaaagaaattggaaaaggaaagataaaagtattttttttttggaggattgggaaaagttagtatgtttattttttgttattacgatgatatttgatgatatgattatttaagtgttatttttggaagaatttt

SEQ ID NO: 2045 - DNA, 2457 bp, Artificial Sequence
  chemically treated genomic DNA (Homo sapiens)
aatgttaaagggattttaatagtgatttacgtttggaaatagttcgcgggaatttgtgttgatttatcggaggatttagtggaatatggtagttttaaggtagagttagtttgaaattttgtgaatatgttttaggataattagacggttagagcgagatggggttagggtgggggatattttgagttaaggagttagtgatttttagaagagtgaggagaaaatttaaggttttttttatgaaagggggtagagtcgggataatatttaaggaggttagggggatgttgagggggtttggttggagggtttggtaggtgtatggagagtttttttttagataaagatttgggtttagtttttgagaagtattgaggtatttattaggttggaagtagagtttttttcgttttcgtttcggttatatttatagtttgttggtatttgttggtttttattttaggtttagttgagttaaggaattttaaggaatagttatttttttttatgtttattaaggcgattttttatggttttcgtgggacgtttggttatattgggtttagaaatttgtattttgtaaatttatcggttttttcgtgattggggtttttttttgtgttttagtgtttttttgggaaatgtttaatttttttttggtttagttaaggagaaaggaatttttttagatttagttagagatgttggtttagtttgattgggagggaagggtgattttaataaggtcgggggtggtagtggggataatgtgtgattttttcgggaagtgggatcgtatacggtatcggggtgggtagttttggttttttttgatttggttgtttttttttagtgttatgagttttgagtttggttgttttggtgattcgtttttagtttttatttattttttaattattttatgttttttcgagtttttttttatttttagtatagtttatatataatgtaagtgtttaaaagtcgaattgtagtattgagttgaggggtggttagtttcggtgagttttggtgttttattatggtttttttatggttgtttttattttttttttagaaaagttattgagaaatggaattttttgatattatttttagttaaagttgttgaaaatagtttagaggagtgaattttatagagttttatgtttcgtttagatttttggggttttttgttttatggagtttgtagagtcgcgtttagattttttattttggatcgttattcggtatcggttttttttacgtagtttttttgtttttattgtaatttgattttttgttaaattattttttttttggttttaaatttttgtcgggaaagagatgaaattagtatttggagagttggaaagggaaaaatagttgttttttataaaatgggttagggagggggaagcggagtagtatagttggattttggtgggaaagttagagtttggtgggaacgtatagtttatagtaggagagataaatatataaatttagaggggtttagcggtagtagtttaggggtttgtttgttaatggtattttgtgtcgtattttttagatatagttatattttatatttatattaattattttagggttgtagagattttttttattttagagaggtaggtataaaaaaaaaaaaaagatttttttttttttttagtttttttataagaataattatagtgcgtgtgtttgggataaatagagagtggtggggtttgtggtattaaggtcgttaggtaaaattgtttaggttgggcggattttgtggtattttgtaattgtggtcgtgtggttatgtgggtttttgataataattatgattttttaagaggagttagggatttggatttttatttaaaaattatttgagatttaaatattggtaattaatttagaagttttacggtattgagtagttagtagtatattgtgggttaagtaaaatatgtttgtgggtagagttggggttgagggttggagtttgagtttttttttatgggtgagaattgatatatgtattttagttaggagtaggtattgttagtattttatttattttttaaattttttttttttttttttgttttcgtgatttttttagtttcgaagggtttttattttttgtagtatgtatttgatttattttatggtataatttgttttttattattttattttttatttgttttttttaatgataattttaatataatagtatataatagttgttttttgtttggttggttttttgttttttttgttttttttttgagatagagttttattgtcgtttagtttggagtgtagtggtacgattttagtttgttgtaatttttatttttcgggtttaagtaatttttttgttttagttttttaagtaattgggattaaggtgtttattattatatttagttaattttttgtatttttagt

SEQ ID NO: 2046 - DNA, 2457 bp, Artificial Sequence
  chemically treated genomic DNA (Homo sapiens)
attaaaaatataaaaaattagttgggtgtagtggtgggtattttagttttagttatttgggaggttgaggtaggagaattgtttgaattcgggaggtggaggttgtagtaagttgagatcgtattattgtattttaggttgggcgatagtgagattttgttttaaaaaaaaaataaaaaaaataaaaaattaattaaataaaaaataattattatgtattattatgttagagttattattgaggaaggtaggtgaaaagtggaatggtaagaaataggttatattatgaggtaagttaggtgtatattgtaggaagtgaaagtttttcggagttggaggggttacggaaataaaaaagggaggaagggatttgggggatgggtagagtgttgataatgtttgtttttggttggggtatatgtgttagtttttatttataaaggaggatttaaattttagtttttagttttaattttatttatagatatgttttgtttggtttatagtgtattattgattgtttaatatcgtaaagtttttgaattagttgttaatgtttaaattttaggtaatttttaaataaaaatttagatttttggttttttttgaaaaattatagttgttattagaggtttatatagttatacggttatagttgtaagatgttatagagttcgtttaatttgagtaattttatttggcggttttgatgttataggttttattattttttatttgttttaagtatacgtattataattatttttataggagaattaaggggaaagagaaattttttttttttttttgtgtttatttttttaaaatggagaaaatttttatagttttaggatggttaatgtggatatgagatgtgattgtatttgaagaatacggtataaggtgttattggtaagtaagtttttgagttgttgtcgttgggtttttttaggtttgtgtgtttgttttttttgttgtgagttgtacgtttttattagattttggtttttttattaagatttagttgtgttgtttcgtttttttttttttagtttattttgtgaaaagtagttgtttttttttttttagttttttaagtgttgattttatttttttttcgataaaagtttgaagttaggagggaaatggtttggtagaaagttagattgtagtgggagtaagaagattacgtggaggaggtcgatgtcgggtagcggtttaggatgaggggtttggacgcggttttgtagattttatgagataagaagttttaggaatttaggcggggtatagggttttgtggaatttatttttttgagttgtttttagtaattttagttaggggtgatgttaaagagttttattttttaatagtttttttggaagaggggtggagatagttatggggaaattatgatgagatattagggtttatcggggttgattattttttaatttagtgttatagttcgatttttgagtatttatattgtgtgtggattgtgttggggatggaaggaggttcgagagaatatgagatggttaggaggtgaataaggattgaaaacgggttattaaggtaattaggtttaaaatttatggtattggggagggatagttaggttaggaggagttagaattgtttatttcggtatcgtgtgcggttttatttttcgggggggttatatattgtttttattattattttcggttttattaaaattattttttttttttaattaagttgagttaatatttttgattgagtttggaaaaatttttttttttttaattaggttaaaaaaaggttgaatattttttaaaggaatattgaggtataaagggaaattttagttacggagaaatcggtgagtttatagagtgtagatttttgagtttagtgtgattaaacgttttacggaaattatggaaggtcgttttgatgggtatgggaagaggtggttgttttttggaattttttgatttagttgggtttgaggtggaggttagtaaatgttagtaaattgtggatgtggtcggggcgggggcgggaagggttttgtttttagtttggtgggtgttttagtgttttttagggattgggtttaggtttttgtttgggaaggggttttttatgtatttgttaggttttttagttaggtttttttaatatttttttggtttttttgaatgttgtttcggttttgtttttttttatgaggaaagttttgaattttttttttatttttttggaagttattggttttttggtttagggtgttttttattttgattttatttcgttttgatcgtttggttgttttaaagtatgtttatagggttttaggttggttttgttttggagttgttatgttttattgggtttttcgatgagttagtatagattttcgcgggttgtttttaaacgtgaattattgttggagtttttttggtatt

SEQ ID NO: 2047 - DNA, 2446 bp, Artificial Sequence
  chemically treated genomic DNA (Homo sapiens)
tatatgtgtggagagattgtgaattgtgaattatatttacgtaattttgaattcgagttttgtttataagatttagtttatgttttttgcgttgcgaagttttttaggaatggttcgtggttgttttgtttattgttgtatttgatatagggttttgttaaggtatttattatatttgtttgtatatttatttttttattagattttgggtaagtttttaatttttaaattattattatttttttgagatagtgatttgttttgttgtttaggttggagtgtaatattggtgttaatatggtttattgtagtttcgaatttttggattttagtgatttttttattttagttttttatgtagttgggattgtaggtatgtgttattatgtttggttgattttaatagtttttgtagagataggggttttgtaattttgtttaggttggtttcgaatttttgattttaagtgatttatttaatttagttttttaaagtgttgagattatatgtatgagttatcgtgttcggtttaaattttttattttatgttttttttgtttttggtttaatttagtgtttggtatgtggtagatatataggttagtgttataaatgattatatttttatattcgttgttttaaatgatggttttttattaagaatttgagaatttttgtttgcgggttttgtttgggtgcggattaggttaaagttttatggagttaatattttggggtaatatttaagtaatgaaaattagtagttagtggatgaatagtttagtacgggataattttggggtaggttttgtatagttatttggttagatttagtagtattgagttttggttgtttatagtagtgattgtttataattattttgtttttttttttagttttattttttttttattattttacgttttttgggttaaagaaattattattttggggtttgtttttgttggagtttaaattaagataattggttagttggttgattggttgtgtgaatgggtacgattagtagtaaagaaagaaatggaagttcgcgcgtcggttgggttttggtatatgcgttgtttttatagtgtgtttagattacgtcggggtacgtgtatagttaatagattcgatataggaaaaagtattttttagttgtttttattattttgttatttgttattttatttatttgttgtttttacgaaacgtttatttacgttagttaaaatggtatattgggtttggaatcggttggggaaatgttaggttgatagaataggggggataattgaaatagtaattgtgtggacggtggtggtgatataaatttgtttttttgcgtagaaggtaggatttttagagtttaggaggttttttgcggaggaattggtatgtggcgaaggttgtagggagggggttttgggatttaggggtagttagagtagggttttttgttttgagagttttttattttttttttttagaatagaggagattgtttaaatatagaatttagtttgtttaaagttattgtttatttttaaatgtttagttcgttttttaattaattttttacggtgtagtttaagaaaaatgtgtggatttttatgtttgaggttagttgtaggatgtatttcgtagaatagcgtgtgtttttgtaagttggggattgagtgttttgttttgttttgtttttttagggtaaaggggttattttaaaagtaggattgtttggattttagaagattggatatttatttattatttaaattttttttttttttttttttttttttttttgagatgaagtttcgttttgttatttaggttggagtgtaatgggatgattttagtttattgtaattttcgtttttttagtttaagcgattttttcgttttagtttttttaattagtcgggattataggcgtgtattattatgtttggttaatttttttgtatatttagtatagatggggttttattttgttggttaggttggtttcgaacgtttgattttaagtgatttatttatttcggttttttaaagtgttaggattataggtatgatttatcgtgtcgggtttattttttttttaatttattttagagagaaggtttttttatgttgtttaggtcgtttttatatttttgggtttaaatgatttgtttacgttggtttttaaaagtgttaagattataggtgtgagttatcgcgtttggttatggatatttatatattttttttataaatatttattgagtgtttgtgttgatttaggtattgttttgagttttaggaagaaagtagtgagtaaatttaataaaattttttattttttcgagattatagatttgtgggagggttggatagtaaataaatatatgtataaatgttaggagattttaagtgtgaagaaaagtataggggttaggtgt

SEQ ID NO: 2048 - DNA, 2446 bp, Artificial Sequence
  chemically treated genomic DNA (Homo sapiens)
atatttggtttttgtgtttttttttatatttaaaattttttgatatttgtatatatatttgtttattgtttagtttttttataggtttgtaatttcgaagaggtggggaattttgttgaatttgtttattgttttttttttggagtttaagatagtgtttagattaatataggtatttaataaatatttgtagaaagaatgtataagtatttatggttaggcgcggtggtttatatttgtaattttagtatttttggaggttaacgtgggtagattatttgagtttaggagtatgagaacggtttgggtaatatagggagattttttttttaaaataaattaaaaaaaaaataggttcggtacggtgggttatgtttgtaattttagtattttgggaggtcgaggtgagtggattatttgaggttaaacgttcgagattagtttggttaataaaatgaaattttatttatattaaatatataaaaaaattagttaggtatggtggtgtacgtttgtaatttcggttggttggggaggttgagacgggagaatcgtttgaattggggaggcggaggttgtagtgagttgagattattttattgtattttagtttgggtgatagagcgagattttattttaaaaaaaaaaaaaaaaagaaaagaaaaaaatttaaataataaataaatatttaattttttaagatttaaatagttttgtttttagaatgatttttttattttgagaaaataaaatagaataaaatatttaatttttagtttgtaggggtatacgttgttttgcgaggtatattttgtaattgattttaggtatgaaaatttatatattttttttgaattgtatcgtggaagattgattggaaaacgaattgaatatttaaaaataaataatgattttaaataaattgagttttatgtttggataattttttttattttgggaggaaggggtgaagagtttttagggtagagggttttgttttagttgtttttgagttttagggttttttttttgtagttttcgttatatattaattttttcgtaagaggttttttgagttttgggagttttgttttttacgtaaaggggtagatttgtgttattattatcgtttatatagttgttattttagttgttttttttgttttgttagtttgatatttttttagtcgattttaagtttagtgtattattttagttgacgtgggtgagcgtttcgtggggatagtagatggatggaatgataaatagtaggatggtggggatagttgagaagtgtttttttttgtgtcggatttgttggttgtgtacgtgtttcgacgtagtttagatatattgtgggggtagcgtatgtgttagggtttagtcggcgcgcgggtttttatttttttttttgttgttaatcgtgtttatttatatagttaattagttaattagttagttgttttggtttgagttttagtagaagtagattttaagatagtagtttttttgatttagaaagcgtgagatggtagaggggaagtgagattgaaagagaaggtagagtggttatgagtagttattgttgtggatagttagggtttagtgttgttgggtttggttaggtgattgtgtagaatttgttttagggttgtttcgtgttgggttatttatttattaattgttggtttttattgtttaagtgttgttttagggtgttaattttatggaattttggtttgattcgtatttagataaaattcgtaggtagaaatttttaggtttttagtaagaagttattatttggaatagcgagtgtgagggtatggttatttgtaatattgatttgtgtgtttgttatatattaggtattgagttagattaggggtagaggaaatataaaatgggaggtttaggtcgggtacggtggtttatgtatgtaattttagtattttggaaggttgagttgggtggattatttgaggttaaaagttcgagattagtttaggtaaaattgtaagatttttgtttttataaaaattgttaaaattagttaggtatagtagtatatgtttatagttttagttatataagaggttgaggtgggaggattattagagtttaggagttcgaggttgtagtgagttatgttggtattagtgttgtattttagtttgggtaatagagtaagttattgttttaaaaaaataataataatttgaaagttggaggtttgtttagagtttagtggggagatggatatataagtagatgtggtgaatattttggtagagttttgtgttaaatgtaatagtagatagaataattacggattatttttgggaagtttcgtagcgtagggaatatgagttgggttttgtgagtaagattcgagtttagggttacgtaagtgtagtttatagtttatagtttttttatatatatg

SEQ ID NO: 2049 - DNA, 2476 bp, Artificial Sequence
  chemically treated genomic DNA (Homo sapiens)
agatttttgtttatttattgatatgtattttttagttatagatttatgtttttttatttgttgaaacgtttttaaatatcgtttttaatgttttgtttgtgtcgttggttttttgttatttagttaataatgaaatagttttagtgaatttgtagtagtagttgttttagttttagtgtttatttatttttgtagttgaattattttgaatattttttgatggtgtaagagatagttttattattttttttattggtttttttttgtgttcgttacggttggtatgagttattttttgtgtatgttatggcgagaagggatgaatgaggaaagatagggtggttttatatttgattttgggatagttattgggtaaggaagggtttggggttgtttttttaggttttttttaatgcgtgaaggtttgagttaggttagttggtagaggtgtgtgtatgtttaatttagaattgaatgttgaaggttttgtgatttaaagggaagaattattgggatttgatgttttagtaggggaaattttaagtttaaaaagttatagttagaatttagaattgtgttgttattttgtttttgagtttttttttacgtttagttttttttttgtggatgatcgtgaagttgtttatatgttgttttttttcgtgaattgatttttgtaaatagtgataggattttatttaaatatttttgatttttaagggaaaaatagagtaatttttttttagtgtttttttgttgattttgtttgggggagaggttagtagagttaaggatgattttatttttttttagtaggattttttgggatgtatagaatttttttttttagttgtttttttgtgattagttatatttaatttataaatttttagtgtagatgatggggatatttaatattgggtttgtttatattttagtaggaggtgaaatatataaagtaattattaggttttttgaagttttaaggattttttacgttagtggtagaggtgggaggtgggttggcgaggtggggtagtttaggaattgcgttggtggggataggaaattgggttgaagggagatgtaaggttttggtgggaaataaatggtattgtgttgttgacggaaaaagattttggtaggattgttgttgtgagtgttttgtggtttagaaaggaattttttataggttggattaattattaaaaatgtttttatttttaggagttttcggcgtgtagtggagtttcgttgggggaaatgatagtttggattatgggcgttcgcggtttggataagcgaggaagtttttttaaggtaaaaggaagttttgattgggattttaattcgtcggtttgttgtttgagtttgggagttgcggtgttttatggagttgttgagggaagtttgttttttgagttagtatcggttaagggagtttgttcgagtttagttgttgattgttattagggtttataataggttgcggggtttgtgatttagtgtttttatataggtataggattcgggtacggagaggggtcgtgttgtgtaagacggttgaggttgtttttatttgagagttgtttagtttgtttttttttagttgtagggttttatggtggaagttgtattttgttttttagtgaattaatgttgtcgtttatgtgttttttttttggtttgtttgtatgaattattgaagggttttaaaataaataaataaataaataaataaataaaaaatagttttttggatcgtattttagaatgatgaaatattattttttggtatattttattaaatatttttaaaggttttttatgataatgaggaagtatgattataattgtttaatttttttgtgtttatattgatgttaatgggattaaattattttgttagtttaatgagataagattttaaatgggtgttttatgtattttgtgtgtgtgtatttaatgaagatttggtggtcgtttttgatttatatttgggaattaattttttttttgtggttttttgttttgtttttttttatttattttcgaattaaggtatttttagtatagaaaattttgaaaatatagaattatgtttaaaaaggtagaaaaatggaggtaaaatatgtatttgaaatttgttataggtagtgttttaatattaggttttgtttttagaggaggaagacggaggagattttattatcgaggataagtgattatgtttaataattaattaatttttatgggttggaagtatttattaatatttatttatatgttttttgtttttaagagattaaaattgatatattgtgttaattgttgattttataaaaaaaaaaaaaaaaaaaaaaaattattagaagaatttgttgataaagtaaagtttatgagatttattgaaataaggaagaatattattaggatatagttttatttatgtttaagttaggggagattaagaggt

SEQ ID NO: 2050 - DNA, 2476 bp, Artificial Sequence
  chemically treated genomic DNA (Homo sapiens)
gttttttaattttttttggtttagatatgaataagattgtgttttggtgatgtttttttttattttagtaaattttatgaattttgttttattagtaggtttttttgatggttttttttttttttttttttttttgtagagttaatagttgatataatatattagttttggttttttggaaataggaaatatgtaaataagtgttaatagatatttttaatttataaaggttggttaattgttaaatatagttatttgttttcggtaataaaatttttttcgttttttttttttgaggataagatttggtgttggaatattgtttatgatagattttaagtgtatattttatttttatttttttatttttttaaatataattttgtatttttaaaattttttatattgaggatgttttaattcgagggtgaatgaaaggaaataaagtaaaaagttataagaggggaattgatttttaagtgtaaattagaagcgattattaagtttttattaaatatatatatatagagtatataaaatatttatttaaaattttattttattaagttagtaaggtaatttagttttattaatattaatatgaatatagaagagttagatagttataattatgtttttttattattataagaagtttttggggatgtttgataaaatatattagaaaataatattttattattttaaggtgcggtttaggaagttgttttttgtttgtttgtttgtttgtttgtttgttttggagttttttagtgatttatataaataagttaaggagagaatatatggacgatagtattgatttattggaaagtaaagtatagtttttattataaaattttgtagttgaaaaaggataaattgagtagtttttaaataaagatagttttagtcgttttgtatagtacggttttttttcgtgttcgagttttgtgtttgtatgaaagtattaaattatagatttcgtaatttgttataagttttggtaataattagtagttgggttcgggtaagtttttttagtcggtgttggtttagagagtagattttttttagtagttttatggagtatcgtagtttttaggtttaggtagtaagtcgacgagttgagattttaattaaggtttttttttattttaaagaaattttttcgtttgtttagatcgcgggcgtttatggtttaagttgttattttttttagcgaggttttattgtacgtcggggatttttgaaggtagagatatttttaatggttagtttagtttgtaggaaatttttttttaagttatagaatatttataataatagttttgttaagattttttttcgttaataatatagtgttatttattttttattaaggttttatatttttttttagtttaattttttgtttttattagcgtagtttttagattgttttatttcgttagtttattttttatttttgttattgacgtagaaggtttttgggattttaggaagtttaatgattattttgtgtgttttattttttgttgaaatgtgaatagatttaatattagatgtttttattatttgtattggaagtttatagattgaatgtggttgattatagagggatagttgaagaaggaggttttgtatattttaggaaattttgttggaagggggtgaggttatttttagttttgttggttttttttttaggtaaggttaatagaagggtattgggaagaaattgttttattttttttttagaaattagaaatatttggataaaattttgttattgtttatagggattagtttacggaagaggataatatgtaaatagttttacgattatttataaaaggggagttgaacgtagaggaaaatttagaggtagggtaataatatagttttgaattttaattgtagttttttgggtttggaattttttttgttagggtattagattttaataatttttttttttgggttataaagtttttaatatttagttttaagttaaatatatatatatttttgttagttgatttggtttaggtttttacgtattgaggggggtttgggggagtaattttaaatttttttttatttagtgattgttttaggattaagtataaaattattttgtttttttttatttattttttttcgttataatatgtataggaggtagtttatgttaatcgtgacggatatagaggaaggttagtgaagggaatagtgagattgttttttgtattattaaggaatatttaaagtggtttagttgtaggggtgggtaggtattgaagttaaggtagttgttgttgtaggtttattgaggttgttttattattagttgagtggtagagagttagcgatataaataggatattgagggcgatatttagggacgttttaataagtggaaaagtatgaatttatagttgagaagtgtatattagtgagtgagtaaggattt

SEQ ID NO: 2051 - DNA, 2463 bp, Artificial Sequence
  chemically treated genomic DNA (Homo sapiens)
gtgatttgtttgtagaaataattttgaaagttttttgaggaaaataaaaattaagaagaatattttttttttttttttatataaattaaaatttaatagtattaaattattgggattagaaattaagtaatgtataatgtggtttttgttgagttaaataagatgttatataatggagaagaatttgaaaatgtataaaaaaattaatttatattattagaatttgtagtgaaattaaatttatgttaaataaaattagtttgtaggtgtataaattatgagggttttgtatttacgtaatataggtagttataaaaatatgttattgtattgtgtaaagatgtatagttattttatttggttggttttgtattttgtattttttttagttttggtttttgttgaattagaatttttagtatatattgtgttgtatttttgtaaatgattttttaaatggaattttgtatataatatattgtaatattgtatgataattatgtgtgaaaataatttttgaaatattttttggttgtttttttttttttttagagtaagaatatatttatgtattacgtagtgttatggatagatgaaattcgaattagggtttgtggttagataatgtatcgtgggggtgagtagaaaagtttatattttttagaagttttttttgatatggggtaaaagttaaggagtagaaggaaaagattatttttttatttgaaagtgtttttattgttatttagtgttgtatttggtttagtgggatttagagtaaattataggtaatttgaattcggagttagttggggttttgtagatagttttattttgtttttacgtaatttttgtaatgttttgggtgatagtttagtgttgttgtaaaattgatagcgtagaggtttggatttttcgttgttatattttttatgtttggaagggtgtttggtatatattaatagtaagtgtttaataaatttttgttggttgaaggaaggaaaatatgagtttagaagggtttttaatttattagtgggagagattcgtaaagattagaatgagaattgaatgggttgtttgtttttgatatttataacggattaaaagatgatagtttaatttatatggttgtttttttaattttttaaattaagattattatgttttgttgatttaaagtaggttatagtttttggatgcgaggtagttttgtagttttcggtgggacgagagcgggtttagaagaggaaaaggtagcgtgggtagaaagtaatattataagacggtttttggttttgttattgggtaatgttttttcgttaaaattataatataatatgtgtttttatttttttttttacgtaggtattttttattttttaaattgttaggaaatagatttgggtgaaggttggagggaataagaggagagtaaaaatatatatgttgggtggaggaagaggagaacgtatttttaaatttaaaaatatattatagttgaggtgggaggatcgtttgattttaggagtttgagggtgcggggagttatgatttcgttattgcgttgtagtttggacgatagagtaattttgttttttttttataaaaaagtaaaaataaaaatatgttataaaagttgaacgtcggttaaaggaagggatttttttttttttttatgttgtatgcgttgttaaatatttttattttagtattatttttatattttcgggatatagaatagaaatagaaattgttgaagtagtttatattatgtggaggttataattttagatttataagaaaatataaaggataggaaatttagttatgaatgtttttatttataaatgcggtttcgtttttattgggtagttgttatttttattttttttaagagatttgaaatgaggtagcgttttaatttttaacgtttgtttatgtcgttatgtttggttatatttagttatttttggttttttattagtagttttagagaaatagaaatagtataagaaggatttcgaagggtatagtgtgtgtggaatataggtattttaattatttggtagtatttgatagtaaaattttaagtgtttttattttttcggtttatttttatgatggtgaattagagattaaaagtattttttgttatttggttaattttaatttagttggaaatatgggaaagaaatcgtttaatattgtaaaattttaaatacgtgataaggaaaggaaggaaagaaggtagagaggggttaggcgcggtggtttatgtttgtaattttagtattttgggaggttaaggtgggtgaattatttgaggttaggagtttaagattagtttggttaatatgtgaaattttatttttattaaaaatataaaaattagtcgggtatggtggtaggtatttgtaattttagttattcgggaagttgaggtaggagaattttttgaag

SEQ ID NO: 2052 - DNA, 2463 bp, Artificial Sequence
  chemically treated genomic DNA (Homo sapiens)
ttttaagggatttttttgttttagtttttcgagtagttgggattataggtgtttgttattatgttcggttaatttttgtatttttagtagagatggggttttatatgttggttaggttagttttgaatttttgattttaagtgatttatttattttggttttttaaagtattgggattataggtatgagttatcgcgtttggtttttttttgtttttttttttttttttttttattacgtatttaggattttgtaatgttaggcgattttttttttatatttttaattgaattagagttaattaaatgataaaaagtatttttggtttttaatttattattatgaaaatgggtcgaaaaaatgaggatatttagaattttattattagatattgttagatgattaaaatgtttgtgttttatatatattgtgtttttcggagttttttttgtgttgtttttgtttttttgagattgttggtaggagattaggagtgattaggtgtgattaggtatgacggtatgagtaggcgttaaagattggagcgttgttttattttaagttttttaaagaagatgaaggtaatagttgtttaatgaggacggaatcgtatttgtgaatggaagtatttatagttgggttttttgttttttgtatttttttatagatttgaagttgtaatttttatataatatgaattattttaatagtttttatttttattttgtgtttcgggggtgtgggggtggtattagagtgaaagtatttggtagcgtatgtaatataaaaaaaaaaaaaaatttttttttttggtcggcgtttaatttttataatatgtttttatttttatttttttgtagggggaagatagggttgttttgtcgtttaggttgtaacgtagtggcgggattatagtttttcgtatttttaaatttttgggattaagcgatttttttattttagttataatgtatttttaaatttggaaatgcgtttttttttttttttatttagtatgtatatttttattttttttttattttttttaatttttatttaagtttgttttttggtaatttgagaagtgagaaatgtttgcgtgggggaaaaagtggaggtatatgttgtgttgtaattttaacggggaaatattgtttaatgataaaattagggatcgttttgtgatgttgttttttgtttacgttattttttttttttttgagttcgttttcgttttatcgaaggttgtaaggttgtttcgtatttagaggttgtgatttgttttaaattaataaagtatgatgattttagtttgaagagttgggaggataattatatggattgagttgttattttttggttcgttgtaaatattaaaagtaggtagtttatttaatttttattttgatttttacggattttttttattgatgagttagaaatttttttaaatttatgtttttttttttttagttagtaaggatttattgagtatttattattaatatatgttaggtatttttttaagtatggggagtatggtagcgaggagtttaagtttttgcgttattaattttgtaatagtattgaattgttatttagggtattgtagaggttacgtgaggatagggtggggttgtttgtaggattttagttaatttcgggtttaaattatttgtgatttgttttaagttttattgagttaagtatagtattagataataatgaaaatatttttaggtgggaggatgattttttttttttgttttttaatttttgttttatattaggaggagtttttgagaaatgtgagtttttttgtttatttttacgatatattgtttaattataaattttggttcggattttatttgtttatgatattgcgtggtgtatgaatatatttttattttaaagaaaaaaaaaaatagttaaaggatattttaaaaattatttttatatatgattattatatagtattataatgtattatgtgtaaaattttatttaaaaaattatttataaaagtataatatagtatgtgttgagggttttagtttaataaaagttaaggttaaaaaaggtataaggtataaagttaattaaatgagatgattatgtatttttatatagtataataatatgtttttgtaattatttgtgttacgtggatataagatttttatagtttgtgtatttgtaaattggttttatttaatataagtttaattttattgtaggttttgataatgtagattgatttttttgtgtatttttaaatttttttttattatatagtattttatttaatttaataaaagttatattatatattatttggtttttggttttaataatttgatgttgttaagttttaatttgtatggaaaagggagaaaagtgttttttttgatttttattttttttaaggggtttttaaaattgtttttataagtaaattat

SEQ ID NO: 2053 - DNA, 2483 bp, Artificial Sequence
  chemically treated genomic DNA (Homo sapiens)
gaaggaatggtatggggtggaaaagtttttttttttttttagggttgggttttttttttgttgttttttgtttttttttgtaggtttgtttttttttttttatattgttgttgtttatatattatttggttagagttatttggtttttttttttttttttagataggttattgttttttgatataggtgttttaattatttgtgtgttttgttatggattcgagtttgttatttttatggtaaaagttgatgtgtagatttaagggattatgtagaatttttgtattattagcgttagaaaatagtttagatttatagaaatggatcggtaagttaaatatttttttgtagaagttattgatagttttgttttttttattttgtatatatatagttatttattggtatatgttggggattggttagggtatatatatatatttaaatttgtatattttgagttttatagttagttttgttgtgttatacgaaaaatttgtgttatatgaaaatttgattttttatatataagtgggttttatatttttcgaatgttgtatttttaatttttgtttggttgaaaaaaaatttgtatgtaagtgtaattgtgtagtttaaagttgtgttatttaagggttaatggatatatatatattttttttttaattgaagaaaagtttatttttagtggttagtttttattttgtgatgtgatattattttagtattgtttgttatttttttgaatattattaaattgatttaaaatatttttttaatttgtttaattaagaagttggaatttaaaaaattttattaggagtgtttcgtgtgttttttgtaatatttagtttgttatgaagttaattagttgtgttatagtcgaatgttagtaaaagaatgttaagttgtaaaaggagattagaagtatattttgtgatttattttttggtaggtggtattgtttgtttgaaattatatattagtgttattatatatagttaagagggtttttagaatggattattttattgttttttttttatttaagaattttattttttgatatagatggatgtagggatgggagtcggggtagtttgggagatggaatttggcggtttaggtgttgaagggtcgagatagatttaggatggttaatgataggaaatttatttggttgtttaaatacggtgttaggtaattagtagttatttaggtaatcgatggggttggggaagtttagtaagaggtgatagcgggttttgatgataggattgatttgttttcggaggtaggttatggaagtaggtattatttagagacgtaggtaggtggttggttttggggacgtttgttagttgtagggatgggacgttaggttttgggaagagtaagagtaagatagtattttaggattagggtaattggagttcgtggatgttgttaagaaggaggtgggtattggggaaagagatgtaggagcgagtaggtggtttaggatgttaggttcggtaggattttaagagtaagtagatttcggggtagttgaagggttaagaattgtggtgttgtgaagtggtttttaggattttttaggttttttttttaggaaggtttattaaagggttttaggtgtgaaaatagcggattatggaagtgggaataggacgggatatttttaagttgggagtttttggttagaagttattggattggaaattatggagggttttttttggaagggattgttattttatagtttgtgtgtgtgttcggggtgtgtgtgtaagtgagagtgtgtgtataggtatgtgagtatatataggttaatgtgtagggttgtgagtgtgtagagttgtaagtgtgtttatatgtgagtgtgtacggagttgtgagtatgtgttggtgtgtgagtgtgtgtaggtatgtgattgtatatatatatgtgaaatattggttgggaagttttttttaagtggttagaagatggaatgttgttattttagtaataattttgtgtgcgaggtttaagcgtgggttgtgtttataaggtagggattggagtattatttttatttttttagaaggtgttcgtttatgtttaatttttatttattagatgggtagattgataagtgagttttgatataataatttttttcgttttgaatagagagcgttagaaaaggaagttagaagaggttttaggttgtttttattttgttggggtttttgtttgggtttttgtaatattaggagagtgagggtttttattttttagaaaatgtggtttggattggggagagaaatagggttatgatcgtcggagagatagggttgaagtaaagttagaattttgagtgattttagatttaagattgttttttttgtggttttgtaagtagtgaaggtcgtagagaagattatagttatttattttttttttgttcggattttttttgttggggtttatgtagtag

SEQ ID NO: 2054 - DNA, 2483 bp, Artificial Sequence
  chemically treated genomic DNA (Homo sapiens)
ttgttgtatgggttttagtaggagaaattcgaatagaaggagagtgagtggttgtggttttttttgcggtttttattgtttgtaaggttatagaagggataattttgagtttgaggttatttaaagttttgattttgttttagttttgttttttcgacggttatgattttatttttttttttagtttaggttatattttttgaagaatggagatttttatttttttagtgttatagaagtttaggtagaggttttagtagggtaaaagtaatttgaagttttttttggtttttttttttggcgttttttgtttagggcgaggggagttattgtgttaaagtttatttattagtttgtttatttgataggtggaaattaaatataggcgggtattttttgagaaaatgaaagtggtattttaatttttgttttataaatatagtttacgtttagatttcgtatataaggttattgttagggtagtagtattttattttttggttatttaagagggattttttagttagtattttatatgtatatgtataattatatatttgtatatatttatatattagtatatgtttataatttcgtatatatttatatatggatatatttataattttatatatttataattttgtatattggtttgtgtatatttatatgtttgtatatatatttttatttgtatatatatttcgggtatatatatagattgtggaataataattttttttaagaaaaattttttatagtttttaatttaataatttttaattagggatttttaatttgaaaatatttcgttttgtttttatttttatggttcgttgtttttatatttaggattttttggtaggtttttttgagagagaaatttaagaagttttgagaattattttatagtattatagtttttgattttttagttgtttcggggtttgtttgtttttggaattttgtcggatttggtattttggattatttattcgtttttgtatttttttttttagtgtttattttttttttgataatatttacgggttttagttgttttggttttggaatgttgttttgtttttgttttttttaaggtttggcgttttatttttgtagttgatagacgtttttaaggttagttatttgtttgcgtttttgaatagtgtttgtttttatggtttgttttcgagggtaagttagttttgttattaggattcgttgttattttttgttggatttttttagttttatcggttgtttgggtgattgttagttgtttagtatcgtatttaaatagttagatgggttttttgttattggttattttgggtttatttcgattttttaatatttggatcgttaggttttattttttaggttatttcggtttttatttttgtatttatttgtgttaggagataaaatttttagataaaaaaaaaatagtaagataatttattttaagaatttttttggttatgtgtaataatattgatgtataattttaaataagtaatgttatttattaagaaatgggttataaaatgtgtttttgatttttttttatagtttggtatttttttgttggtattcgattataatatagttaattggttttatgataaattagatgttataaaaggtatacgaggtatttttaataaaattttttaaattttaattttttagttaagtaaattaagaaaatattttaaattaatttaatgatgtttaaagaagtagtaagtaatattaaaatgatattatattataaaatagaaattagttattaaaaataaatttttttttaattaggagaaaagtatatatatatttattgatttttgaataatatagttttgaattatatagttatatttatatgtagatttttttttaattaaataaggattgaaaatatagtattcgagggatatgaaatttatttatatatggagggttaagtttttatataatatagatttttcgtataatatagtagggttgattgtgggatttaaggtgtgtagatttgggtatatgtgtgtgttttggttaatttttaatatatattaatgggtgattatatatgtataaaatagaaaaaataaagttattaatagtttttataagaagatgtttggtttatcgatttatttttgtaaatttgagttattttttgacgttgatggtgtaaaggttttatataattttttagatttatatattaatttttattatgaaaatggtaagttcgggtttatggtaaggtatataggtgattgggatatttgtattaaaagatagtggtttatttggaaagaaggaagaaagttaggtgattttggttaggtgatatatagatagtagtagtgtggaggagagaggataaatttgtaggggagagtaggggatagtagggagagggtttagttttgaaggaggaggagggtttttttattttatgttattttttt

SEQ ID NO: 2055 - DNA, 2493 bp, Artificial Sequence
  chemically treated genomic DNA (Homo sapiens)
gcggttttatttttttagtttcggtttcgcggttatcgcgtagttttagcggagggggtagttttttcgcgtcgcgcgcgttttgtttgttttttttgtcggattgacgtgagttaaaatattggttatatgtttagcggtaataaattgggtatgagcgtaaatatatttgggtttcgatggtttttttagttgttatatggtaggttttgcggggagggggtttttatttcgtttcggttttttgtttttaaacgcgcgggtagatttttttttttttgcgtttttttgagtaggagatttgggattttaggttttttttgattttcgtttttttttcgtttttagtagtgttttggatttcgtagtttttggcgagttcggattgttggttaataaggtcgttatttataaattgttcggtcgttaagacgttataaaattaaagggttagatgtggtacgttatttatgtgtgaaatcgcgtttatattagatacgcggatttaaggtcgatagtacgatttcgcgggaggttatagatttttcgtttcggttttaggttttttttttagtacgattttttttttaggttgaggggtgtcggttttgtcgggaaagggatttatttttgtagtttaggaggaaagtgattttagtgcgtttgtgttaaaatgttatttgtttaggattaaaggtagtttttggggtttattttcgtagttttttttttttttttgtttttggtttttttttattacgggtttttgggaggttgttttattttttaggtagttgatacgttttatgggatttagatttgatatagtaagggtagtgtgttagagatgtttaattttgtgggtgggcgggatttgagggtggggttttttgagttttgagggaaggattttgggaagcggagtagtttatttggttgagggagtatttgaaattatttttgtttcgggcggtggtcgattttagtgtcgtatgttatttgttttatttaatttgaggggtagtcggagtattgggagaggtagttttggtttcggaatatggaattcggtggttttgggtgttgtaggaaagggaagtaaatattttgttttaatagaaaataatcgttttgttttttttttttagaaggcggttttaggattgtatgtttttaaattggttatttcgtattttatttatatgaatttattaatagttattgtttttttattgttattattttattattttttgaagtgaattaaattttttttgtggttaataagtattgagttaggttttttatttttttttttatttttaaaatatttggggttttttgaatggtatttttcgtttggttaaggaaaataagagatgaaaaatgttgttttattgtagggaaaaatataagtattttattttattattattagttattttaggtttgtgtttattagataattgtttttaggtggttgttaagggtggaaaaatgatgttgttgaaagagggtgggagagaaggggagaattaatatgagttgggggtggggaggagagatttatttgataggggtaaaaagagttataaaatgaatttttgaatttgaagtgttgagtaggaatagtgattttttgggtttgtttttttgggttttagatgagtttttagaaagttttagttaattgtagaaaaatttgggattagttttagggttataggagtggttgattttgggaaattatattgttttttattttttttttttggatttttatatttttatttatggttaaaaattaaattatagggtttatttttgggtttatattatttttaagtggaagcgttgagattatagattaattgtttttttgggtgaaaatattgttttatgattaaaattagataaggggatttgaaggtaggtttttatatttgtagttttcgtgggaatgggtgtttttgttttataagtgttttgtgaagaagtttatgttttttttttgtatgtattatagatatgtgttaggtagaggattgagacgtagataaggagtttagaaagttagtgtttggtgtttttagggtggaaaattgagagatacgaagtaaagagtatattaaggtaggttttatattattttttagttaggaaaatttattttaaattagtaaatgtagtagggtatttattagttaattgataataaaaatttatgataaagaagatgtagtggggagtaagtataaatgaaatacgattgtttagatataatttttgttttttttttttggttttatttagtaattcggtgttaaattttatatattatattttttaattttaatagattgtatgttgtttttagttttattattttttatgttatttttattttagaaatatttttgttttatttatggatttaaaatttattgattttttatattggaaaaatttttttttacgaagtttttcgtagat

SEQ ID NO: 2056 - DNA, 2493 bp, Artificial Sequence
  chemically treated genomic DNA (Homo sapiens)
gtttgcggggagtttcgtggaggaaggtttttttagtgtgaaaagttagtgaattttgagtttatgagtaggataggaatgtttttgaagtaagaatagtataaaagatggtggaattaagaatagtatgtaatttgttgaggttggaggatgtagtgtatgaagtttagtatcggattgttgaataaggttaaagagaagaaataggagttgtatttaagtagtcgtattttatttatgtttgttttttattgtattttttttgttatggatttttattattagttaattagtagatgttttgttatatttgttggtttaaaatgggtttttttaattagggaatgatgtaaagtttgttttgatatattttttgtttcgtgttttttagttttttattttgggagtattagatattgattttttaagttttttgtttgcgttttaattttttgtttagtatatatttgtggtatatgtaggaagaaagtatgagtttttttatagggtatttgtgagataaagatatttatttttacgaagattataaatgtgaaggtttgtttttaaatttttttgtttaattttggttatgaagtaatatttttatttaaagaagtaattgatttgtaattttagcgtttttatttggaggtaatgtaaatttaaaaatagattttatagtttggtttttaattataaataaagatgtaaaaatttaagaaaaaagagtgaaaaatagtgtaattttttaagattaattatttttgtagttttgaagttagttttaggtttttttgtagttaattaaagttttttaggagtttatttaaagtttaagagagtaaatttagagagttattgtttttgtttagtattttaggtttagaggtttattttatagttttttttgtttttattaaatgggttttttttttttatttttagtttatgttggtttttttttttttttttatttttttttaatagtattatttttttatttttaatagttatttaaggatagttatttagtgaatatagatttggggtaattggtaatagtaaagtgaaatgtttatgtttttttttgtagtagggtaatattttttattttttattttttttggttagacggaagatgttatttagggaattttaggtgttttgaagatgaaaaggaaggtagggggtttggtttagtgtttattaattatagagagaatttggtttattttaagaaatagtaaaataatggtaatggagagataatgattgttaatgaatttatgtgagtaaagtgcgaggtgattagtttggggatatgtagttttaaggtcgttttttgaagaaggaaagtaaaacgattgttttttattagaatagagtatttattttttttttttgtagtatttagggttatcggattttatatttcgaggttagggttgttttttttagtgtttcggttgttttttaagttaaataaggtaggtgatatgcgatattggagtcgattatcgttcgaggtaagaataattttaggtgtttttttagttaggtgaattgtttcgttttttaaaattttttttttagggtttaggagattttatttttaaatttcgtttatttatagagttgggtatttttagtatattatttttgttgtgttagatttaggttttatgaaacgtattaattgtttggaaaataaaatagttttttaggggttcgtaataaaaggaagttaagagtaggggaaagaggaaagttacggaaataaattttagagattgtttttaattttggataggtggtattttggtataagcgtattgaaattattttttttttgggttgtaggggtgaatttttttttcggtaagatcgatattttttaatttggagaggagatcgtgttgggggaggagtttggagtcggggcgagaggtttgtgatttttcgcgaagtcgtgttatcggttttggattcgcgtatttagtgtaaacgcggttttatatataaataacgtgttatatttggttttttggttttatggcgttttagcgatcgagtaatttatagatggcgattttgttaattagtagttcgggttcgttaggagttgcggagtttaaggtattgttggggacggaggaggggcgagggttaggagaaatttggggttttagattttttgtttagaggggcgtaggagggagggaatttattcgcgcgtttgggggtagggggtcgaggcggggtggaagtttttttttcgtaaagtttattatgtggtagttgaaagagttatcgaagtttaagtgtgtttgcgtttatatttaatttattatcgttgaatatatggttaatattttgatttacgttagttcggtaaggaaaataaatagagcgcgcgcggcgcgggggagttgtttttttcgttggggttgcgcggtggtcgcggggtcggagttaggagggtggggtcgt

SEQ ID NO: 2057 - DNA, 2443 bp, Artificial Sequence
  chemically treated genomic DNA (Homo sapiens)
gaaataaaaataaaaaattaaaaaaaaaaaaaaagaaaagaaaagaaatgaaagatggaatttttaagagttttgggttattaaaatgaaataaatatatgtttatgttattattatgtaaaggtatttaagtttttgaaatatattttatttatttattttttaagagtttgagttgaatttatttagaaaattttatgttttgttaatagattaggtttatgatgatgatttttaaatttagtaatttatatattttttattgttattgttttatgtatgggtggttattgtattatttttattttgtagatgagggagtggaggtgttaggttgttaatgagttggttagggattgttggaagtaagtgttaggagtgagattggaatattgtatatttttatttggttgtttttttttcgtagaacgtgtagattgaaataaaatgagtttgataggggttttatttagtttcggattattgtttttttttgtagagttagttttgatgagggttatttttataggaaagaaattagtagaggaattagttttggatttttaagaagttaaggtgtattataataattttgtttttaaaatttttgggataggttaagtagtttatttattaaatgtatatagaatgatcgttatttgtttagtagatgagacgtttgggaggttaagagaggaaattgaagtttatgtggaggtttgtggtttatagtagttttagttattaggttttttttttttttttgaaagttgtagagatgtgtatgtttgtagtttgttgagaaatttggtttcgggttagttaatttgaattttatttatatatatttttttaaggtgtgagttgagaaggggtttttagatgtagatgtttaggaataaattttaggtagttggtgggatttgttttttggttattgtttatgtttttttcgttttttttatttttgtatttattttgttttagatatttggttttgtgtagttttttttatgttagataggaggtaatatttattggaagttgttggtgtcgtagcgtgttggtttgggttgagatggtgtgaaaattttgttcgtttcgttgttttttaatttttttaggtagtgatagttttttggtttgttttattggtaacgtttgtcgtggggttttattaatttattatatttttaatgtgtagttgttgtaggtagtgcgattttttggcgtttcgttgggttgttatatttggaattgatttgggatttaaaaaggttgtggatcgaggaaattttaaagcgttgtttttttttatttttggttatttatttttgagttgaggtagtgggatttggttaagttgagttaaagtgaaattgttgaaattaagaaagatagtagttaacgtgacggtagtgggtggtgagaattttttttttttttttagtttcgtggattgttagttcggacgtttgagtggggtttcgttaattttgtttgttgtttttgttgttaggtttggtattcgttttttatttttatatgattgtttgttttgagtttagtgagtgttgtttgtatttttggttgtcgtagatagtagtttgattttttaagttggatattgttttgatttttttttggtttatagattatattataattttttttttttttataagcgtaagtatttttttgtagtatttaaaggtttttgacgtagtggaggtttttaagatttttttttttttaagttggtgtatcgttttttttttatttcgtttttacgttttaaatttaattgtatggatattattaattgtatgttaaatggtgatgttagaaacgatttttcgtaatgatttagaaaaagttttattttttataaaggtttttttttttttttttatgatttagttttatatatgattattgtttgtaataaagattaagttttgtaatttattatgttttttttcgatttttttgtttttatggtattgtttttcgttttatgttcgagtattttttttttttttttagtttttattttttggtgggttgtgttaatagtgtagtaagaggaatttttggaaggaggttaaatttggtttcggattatttttttttaatatatattggtttttgaaaattagattttgtttgttatttggtttgtttttttagcgttgtgttatttcgatggtaatgttgatggattttaagtttgtttcgtagagtaacgtataaggtttttataagtatattaattttaaaagaaaaattgttagatgtaaataatatttatatgattgatgttgtaaagatataaattaatttttaatatttatttttaaggaatattattttataggggtttgatgttgtttttaatttttttttaatataggtatttgtgttgtaggattttgtggtacgt

SEQ ID NO: 2058 - DNA, 2443 bp, Artificial Sequence
  chemically treated genomic DNA (Homo sapiens)
acgtgttataaaattttgtaatataagtatttatgttggaagagagttaaaggtaatattaggtttttgtaagataatattttttgggaatggatgttaagagttagtttgtgtttttataatattagttatatgggtattgtttgtatttgatagttttttttttaagattaatgtgtttatgaaaattttgtgcgttattttacgaggtaagtttgaaatttattagtattattatcggaatgatataacgttgggagagtaaattaaatgataaatagaatttggtttttagaggttagtgtgtgttgaagagaaatgattcgaagttaaatttggtttttttttagaaattttttttgttatattgttggtatagtttattaaagggtgggggttgagggaggagggagggtattcggatatggagcgggagatagtattatggggataggggagtcggaagggagtatgatggattgtaaaatttgatttttattgtaaataatagttatatgtaaaattaagttatggagaaagaaaaaaaaatttttgtgaaaaatgggattttttttggattattacggaaagtcgtttttaatattattatttgatatgtagttggtgatgtttatgtaattggatttgaggcgtaagagcggaatggggaggggacggtgtattagtttaaggggaggaaaattttgaggatttttattgcgttaggaatttttagatattgtaaagggatgtttgcgtttatgagaagagggagaattgtggtgtggtttgtaggttaaggggaaattaaagtaatgtttagtttgagaaattaggttgttgtttgcggtagttagagatgtagatagtatttattgggtttagggtaaataattatatagagatggaaaacggatgttaggtttggtagtaagagtagtaggtagggttagcgaggttttatttaggcgttcggattgatagtttacgaaattgagagggaggaggggatttttattatttattgtcgttacgttggttattattttttttgattttagtagttttattttggtttaatttggttagattttattattttagtttagaaataggtggttagaaatagaagggaataacgttttagagttttttcgatttatagtttttttgagttttaaattaattttaaatgtggtagtttagcgaagcgttaagagatcgtattgtttgtagtaattgtatattggagatatgatgaattggtggaattttacggtaggcgttgttagtggagtaggttaagaggttgttattgtttgggagagttaggaaatagcgggacgggtagggtttttatattattttagtttaggttagtacgttgcggtattaatagtttttaatgggtgttgttttttgtttggtatgggagaagttgtataaaattaagtgtttgaaatagagtagatgtaagagtggggaagacggaagaggtatgagtagtaattagagagtaaattttattagttgtttgggatttgtttttagatatttatatttgggggtttttttttagtttatattttagaaaagtgtgtgtgagtggagtttagattggttggttcgagattagattttttaataggttgtaggtatgtatatttttgtagtttttaaggaagggagggaggtttggtggttgaggttattgtgagttataagtttttatatgggttttagtttttttttttgattttttaggcgttttatttgttggatagatgacggttattttgtgtgtatttggtgggtgggttatttagtttgttttaggggttttgaaagtagaattattataatatattttggttttttgagaatttagagttgatttttttgttgattttttttttatggaggtggtttttattaaagttagttttgtagggagaagtaatggttcggaattgggtgaaatttttgttaggtttattttattttaatttatacgttttgcgggagagaggtagttaggtgggggtatatagtgttttagttttatttttgatatttatttttagtagtttttgattagtttattaataatttggtatttttatttttttatttgtaaaatgggagtaatatagtgattatttatgtataaggtagtggtagtgaggaatgtataggttattgggtttaaaaattattattataaatttagtttattgatagaatatggggttttttaagtgaatttagtttaaatttttgaaaagtaaataaatggagtatattttaaaggtttgagtgtttttgtatgatggtgatatggatatatatttattttattttggtgatttaaagtttttaagaattttattttttatttttttttttttttttttttttttttttggttttttgtttttgtttt

SEQ ID NO: 2059 - DNA, 2469 bp, Artificial Sequence
  chemically treated genomic DNA (Homo sapiens)
taaattttgtttgttatttgttttgtaaataaagttttattggaatatatgtatgtttatttgtttatgtattgtttttatgttgtagtggtagagttgagtagttttaatatagattgtatggtttttaaagtttaaaatatttattattttgttttttataaaaaagtttgttgatttttgttttaagaagtttttaaatagatttatatttaaaatgtagtaatggttaaatttatagtaatgattttttttgttaggaagatggaaggtttttttattgtaaaatatttgtagattttaatatttttttttgttatgttttgtttaatagatagataggtatggagaaggtattatgtggtagtaagggaggtgggtgttaagggtgtattataatattgggaagtatattttttaatattaggagtttatgtgatttagttgaagagagaatatttgtattagttaaaagggaatatttagtagtatttaaataaaagttattttatatgttattaagtatattataagaatttttagaaagaagtattattttttgtttaatagtttagaggatttttattagtaaatgaaaaatgatagttttattttattttttaaatatgttaaaattattttgagttgttgggtattagaattgataggtgttatgtatttaagtttatttgaaaaatatattttaataatggagtgagattttgttttaaaaaaattttaaatgtttttttttaattgaaaaaatttattatttttagatagataagtaaataatttttgtaaattcgagttatatttttttttttttttttaaaatttagtttaatataattgaaaattgaagtttgattttttaagtttataagggataaaagagagataggatagatagaaataattggtaacgaggagttattgggttttggttttatgggagataatagtggttttatagaaggtaatggtggatttttagttaattgaagtttgggtggaatttagttgtataattaagaagttgaatttgttttattttatttttttataatataaagagtgtgaaaaggttattttaatgtttagagagtggttttttttggaaaatattttcgaatatattatggagtagtgttaattgtagtataaaatgttttagaaattttgtaatttatgagtttaatggtatatttgaggattacgaggtttttttcgtttatttataatagttcggtgattgatttagtagagaggaagtaaaatgaataattttgattattttttaatattttttttgttttgttgattttagagttttaggggtatagtatttgtaggaattgtatgtttttttggtaatattttaaaattaaatttaaaagatgaagaagaaaaatggttattagatagttataaatatgttattatttgtaaatggtattgttttgtggatatgaagttttttattgtttatttgtttttaagtttaacgatttatatataaaggtgtaaggatttattgatattgtgttttttttttgttgatattattagttcgagaattaaggataatggatagttgtatataagtttaagttttgtatttattttttagtttttttttttattttttagttgtgtttgttttttttttgaaatttgtaaagtaggaataataataaagttattattttttgtagggttttgaaggatttttttgagataatgtaaagtattaggtatataattagtttaaatgtaatttaatcgtgtttttttattttaatatatatgttattatttatttttagtgtagagaattaatagaatataaataattttgaagatttatataatatttatacgttgtaaaattttgtttgtggagtttttattgtagtttgtatgatttaaacgatgttacgtagttttttaaatatttttagatattaaggaattttatattgttgtgttattttttaaatgtttgtatttttttgttttttttttttttaatttttttgaatttgtttatttagtgaataaaattaggaagaagtggatgttgtaagaatatttatgtgtttaaaggttgtggttgttttattatagttatttattagtagttttagtacgtagttagagattgtagaaaaaagaattatttttttttttgatttgaggatgtatttttagagtgtttttggggtaatggatttaaaattaaaattttaaatgttagtttttaagtgtgaatttttttttagtatttttgttttttttttataattttttattttattgagttttagagagtagatagtttaggttttttgatttggtagattaatgaggaaggataattaaagaaagtttaaaggtattttttatattaaaatattttattttttttttattgtaggtgtagttaaaagtattaatgttatattt

SEQ ID NO: 2060 - DNA, 2469 bp, Artificial Sequence
  chemically treated genomic DNA (Homo sapiens)
gggtatggtattagtgtttttaattatatttgtaatgaaagagaagtgaggtattttggtataaaagatatttttaaattttttttagttatttttttttattgatttgttaaattaagaaatttaagttgtttgttttttggaatttaatgaaataaaaggttataaggagagaataaaagtgttgaagaaaaatttatatttaaaaattagtatttaaaattttgattttagatttattattttagaaatattttggagatgtatttttaaattagagaaaagaatgatttttttttttatagtttttgattgcgtgttgaagttgttggtaagtaattataatggggtaattataatttttaaatatataaatatttttatagtatttatttttttttaattttatttattggataaataaatttagagagattgagagagagagagatagaaaaatgtagatatttaaaaagtgatataatagtgtaaaattttttaatatttggaaatgtttaaaggattacgtggtatcgtttgaattatataggttataatgagggttttataaataagattttgtaacgtgtgaatattatatgaatttttaaaattatttgtattttgttgattttttgtattagagatgggtagtgatatgtatattaaaataaaaaaatacggttgagttatatttaggttaattatatgtttggtattttatattattttaagaaaattttttaaaattttataaagaatagtaattttattattatttttattttatagattttaaaaaaaaaataaatataattgaaggatggaaagggaaattaagaagtagatgtagaatttgaatttatatatagttatttattgtttttagttttcgggttaatggtgttaatagagaggaagtataatgttaataagtttttatatttttatatgtggatcgttgaatttaaaaatagatgagtaatgaagagttttatatttataaagtaatattatttgtaaataatgatatatttataattatttaataattattttttttttttattttttgagtttgattttaaagtattgttaaaaagatatataatttttgtaaatgttgtatttttaaagttttgaagttagtaagataggaaaaatgttaaaaggtgattaagattgtttattttgttttttttttgttaaattagttatcgggttattatgagtggacggaaaaaatttcgtaatttttaggtgtgttattaaatttataaattgtaagatttttaggatattttatattatagttgatattgttttatggtatgttcggggatattttttaagagaagttattttttgaatattaaaatgatttttttatattttttatgttatagaaaaataaaataaaatagatttagttttttaattatgtagttaagttttatttaagttttagttgattaagagtttattattgttttttatgaaattattattgttttttatggagttaaagtttagtaatttttcgttgttagttatttttatttattttgttttttttttattttttataggtttggagagttagattttagtttttaattatattaagttgaattttaaaagaaaggggaaaagtgtggttcgagtttgtaaaggttatttatttatttatttagaaataataggtttttttaattgagaaaagatatttgaaatttttttgagatagagttttattttattattgaaatgtattttttaaatgggtttaaatatatgatatttattagttttggtatttaataatttaagataattttgatatatttggaggataaaatgaggttgttattttttatttattaatagaaattttttgaattattagataaaggatgatatttttttttggaaatttttatagtatatttagtgatatgtgaaatagtttttgtttaaatgttgttaaatatttttttttaattaatataggtgttttttttttagttaaattatataaatttttaatgttaaggaatatgttttttagtgttgtgatatatttttagtatttattttttttattgttatatggtgttttttttatgtttatttgtttgttaaataaggtatggtagagagaagtattaaaatttgtaaatgttttatagtaagaaaattttttatttttttggtaaaagaaattattattataaatttggttattgttgtattttagatataaatttatttgaaagttttttagagtaggagttagtaaatttttttgtaaagagtaaaatagtaaatattttaggttttggaagttatatagtttatgttagaattatttaattttgttattgtaatatgaaaatagtatataaataaatgagtatgtatatattttaataaaattttatttataaaataagtggtaggtaagatttg

SEQ ID NO: 2061 - DNA, 2442 bp, Artificial Sequence
  chemically treated genomic DNA (Homo sapiens)
agtttaataattatattttggttataggttaaaatagtgtttataaatagttttataaaataagaagaatttttttgtattttttaaagtattaaatttgtgattttttttttttttttttttttttgagatagggtgttattttattatttagtatggagtttagtggcgtaattatggtttattgtagttttgattttttaggtttaggagatttttttattttagttttcgggtagttgggattataggcgagtattaacgtgtttagtaattttttttttgtatttttgtagagataagttttcgttatgttgtttaggtttgttttaaatttgtgggttaaggtgatttttttgtttcggatttttaaagtattgagattatagaggatagttattgagtttggttttatatttgttttaattttattttagaaattttattgtttaaagtagatgttaaaattttttagtagaagtaatggttgtgataaagttttagagtagagagttattaagtttgaaaaataatagtaggttatatgaatttttgaagaaattagtcgtttattttttttaaggagagaagtagttaagaagttgaaaaaatatgaaagttatattgtttattttattgtaatttttaaatttttttttgggtataagtttttttagaggataattggaaaggttatatatttagtgtatgtaaagaattttggtttgttttttattgtattaggaatgaaagaaagatattatcggttagtgtgtagggttttttggggagaagttgagttgaagtgatttagtatgttttatgttgtttgattaatgttaagcgagggggttattgagtgaaagtttatagtaatgttattttttgtaattgaaaatgttatgtaaaaaataaaatatgttaatagtttttgttgtttgttttatattttggagagttgtgtatattttaagttatttttgtaatttaaaagaattgtaattatagagattgtgaggggagtagttggtttgtaaagttgtttggggtaaatttgttagagtttatgagtaaatataatttgaaaatagaggttgttcgtggggaaattagttgtttttttaataaaataaaaggaagagttttgtttagggtaatgtgacgatgacgtgtaattgttttgtattaattataatttttttttttgtttttttattgtttagtttttttttattttatagtaagaaattgaggttgtatattgtatattgggaatatttaaattggaaataattaaaatatatattttatttatagtgggttttatgtgaggagaagtaaagattgttatagttttttgagtatatgagttaatgatgtgttttgtatttttttgattttttatattttaattgtttttgttttttatttgggggtagggaattttgagaggtatggaatatagatttgtatgagtagaaacgtatagtttttgagtatgtgaggggatggcgtggagaaggttgggtttattatgtggttttttggtattatttttttttagtttttttttttagtgttaaagtaagtatgttattaagaatgttttaaattagaaattggtttaagattattgtagtattttattaggttgtgtttttagaatatgatgaataaatggatttttaaaatgaagttttaaaaatgatagttaaaaaaggaatatagatttattgaaggaaaaaatttataaaagattttgtgtgtgtgtgtgtgtgtgtgtgtgtatgtgtgtgtgtgtatgtatgtgtgggtgtgtgtgtgtgttgtaagtatatttaatatatatttatattgaatgaagttattggtaaagtaaagtaaaattttcgttttttagatttaattaggatattattttgatggaggttaagttagtaaaaatatagttagaaattgggtataaagggtaaattgattgtaaattttggagattgtttgtatgattgggttgtatgattgaagtttaaaaagtaaaaagtgttttatatagaattgcgagtgtgtttttggttatggttagttataaagggaagaaatatgaaagttatttttaaaatgtttggagatagaaattttgtgggggtaaatttaaggggttagaatgtatttttatttattgtgtgagtttttaaattgtgaagaaatattatttttagaatgagtttaaagttgatttaaagtgataattaaaggtaatgaattgagaaataaaagtgtgaaagatatgaaatattttattcgtttaatttttataaaaatttaatgaaaaaatgaaaaagtgttttttttaatagtaatttatagtttttggtttagagttgggatatgtggaaggaatatagatatgtttttttaaattgtttggtatttttggattag

SEQ ID NO: 2062 - DNA, 2442 bp, Artificial Sequence
  chemically treated genomic DNA (Homo sapiens)
ttagtttaaggatgttaagtaatttgggagagtatgtttgtattttttttatatgttttagttttgagttagaggttgtgaattgttattgaggaagatatttttttatttttttattgagtttttatggggattaaacggataaaatgttttatgttttttatatttttattttttaatttattgtttttagttattattttgagttaattttgaatttattttagaaataatatttttttataatttgaaaatttatataataaataagaatgtattttgattttttggatttatttttatagagtttttatttttaaatattttgagaatgatttttatattttttttttttatagttagttatgattaaaagtatattcgtaattttatgtaagatattttttattttttaagttttagttatgtaatttagttatataaataatttttaagatttataattaatttgttttttgtatttagtttttagttgtgtttttgttaatttagtttttattaaaatgatgttttaattaagtttgaagaacgggaattttgttttattttattaatgattttatttagtatggatatatattgaatgtatttataatatatatatatatttatatatgtatatatatatatatatatatatatatatatatatatatatatagagttttttgtaggtttttttttttaatgagtttgtattttttttttaattgttatttttggaattttattttgaagatttatttgtttattatattttaaaaatataatttaataggatattgtaatggttttaaattaatttttggtttgaaatatttttgataatatgtttgttttgatattgaagggagaaattggagaaaaatagtgttaagaaattatatgatgaatttaattttttttacgttatttttttatatgtttaaaagttgtacgtttttgtttatgtaagtttgtattttatgttttttaaagttttttatttttaaatgaggaatagaggtagttaaaatgtggaaaattaagaaaatgtagaatatattattaatttatatatttaggaagttgtggtaatttttatttttttttatataagatttattataaatgaaatatatattttaattatttttagtttagatatttttagtgtgtaatatataattttaattttttgttgtagaataaaggggaattgggtaatgagaaagtaaaaaaaaaagttgtagttaatgtagaatagttgtacgttatcgttatattgttttgagtaaaatttttttttttattttgttgaaaaagtaattgatttttttacgagtagtttttgtttttagattgtgtttatttatgagttttgataggtttattttaagtaattttgtaaattagttgttttttttataatttttgtggttataatttttttaagttgtagggataatttaaaatgtatatagttttttaggatatgaggtaggtagtaggaattgttgatatattttattttttgtatagtatttttaattatagaaaatggtattgttatgaatttttatttagtggttttttcgtttgatattaattaggtaatataaagtatgttaagttattttagtttagtttttttttagaaaattttgtatattggtcgataatgttttttttttatttttgatgtaatgaaaaataagttagagttttttatatgtattgagtatatggtttttttagttattttttgagagggtttatatttagaagggaatttggaaattgtaatggagtgggtaatatagtttttatatttttttagttttttggttatttttttttttgaaaaaaataaacggttaatttttttaaaagtttatataatttgttattgttttttaagtttagtgattttttattttaaaattttattataattattgtttttgttgaagagttttgatatttgttttaggtagtagagtttttgaaatgagattaagataggtgtagggttaggtttagtggttgttttttgtaattttaatgttttgggagttcgaagtaggaggattattttagtttataagtttgagataagtttgggtaatatgacgagaatttgtttttataaaaatataaaaaaaaaattgttggatacgttgatgttcgtttataattttaattattcgggggttgaggtgggaggattttttgagtttgggaggttaaggttatagtgagttatgattgcgttattggattttatattggatgatagagtgatattttgttttaaaaaaagaaaaaagaaaaaaaagttataggtttagtattttgaagaatataggaaggttttttttattttataaaattgtttataagtattgttttggtttgtagttaaaatatgattgttaaatt

SEQ ID NO: 2063 - DNA, 2396 bp, Artificial Sequence
  chemically treated genomic DNA (Homo sapiens)
agtggtttacgtttgtaattttagtattttgggaggtcgaggcgggtagattacgaggttaggaaatcgagattattttggttaatacggtgaaatttcgtttttattaaaaatataaaaaattagtcgggtatggtggcgggcgtttgtagttttagatattcgggaggtcgaggtaggagagtggcgtgaatttgggaggcggagtttgtagtgaatcgagatcgcgttattgtattttagtttgggcgatagagggagattttattttaaaataaataaataaataaatttttaaaggagatttttttttttttaataaaaattatgtattggattagttatttttttaaatttttagtttaaaataatgtgggtagttttataaggaaatatatatattggattatatgaaatgaatcgttaatatttgttataaatttatgaaaatattaagtttaaatggtttcgtttaatatttatgtaatataattagtaaattttaggtattgtgcgatttaggtagagtatatgtgtgtatatgtgtgtgtgtgtgtgtgtatgtatgtatatgtacgtgtgtatatattttgtagagtttagggttttttgttaaatttttgggtttaagcgatttttttgttttagttttttaaagtgttaagattatagttgtgagttattgtattcgatatatgtagaaaatattttattgtagtataaaatatatatttgagaggaaaagaataagagagagaggtttttaatttaaatatagttaattaaggaaaaaataaaattaatatttgaatgaatattgaaatttttttaaaaaaagataaatgagggggaaattatataagtaagtaaggttttatatatatggtgttttagaaattaattagtggatagatttagaatttatatttttttttttaaaatgttttttggtagaagttattttgtaggataaattggaattaaaagagttatgaaaattgtataatgggatgaaggggttttttttgttggggaatagatagttgatatgttggatggggttagggtttaaataaaggtttttgttgagtgggagtaggtataagatagatggtttgttaaatattgttagtatgtttgcgtagtgtcgtgcggcggttagagtttggataatggttattagggtattgtgtagtagcgtattggttaattttagtttagttaaagttattgtttatttttgttggttttgtaaagattaaggtagtttttttgttttgaatgtattatagttgtttagtaaagtatttttgaagttttgtttgaatttttattgttaagaggggttaagtaaaaggtggttcgtgtaaggatttgttttaagtttatatgtgaagttgtttttttttaattaatttggattatttttgatttttatttttgggtaaaattttttagagttataggggtttttttttttagtgagtttttttttgtgtggttcgaaatgtatttgttggggatttatattttttagatttatattttttattgggattgatttatttgttatttttgtggaaaaaggtaaatattattgtaaattttattcggtgaattatggggaggcggtggttttaattaaacgtgtttgttttcggaagggggtttttggttttttatttttatgtatagaagaaaatagagtttaatcgggtttttgtagttaatggaaacgtatttggtttagttagttgttaggttgagtttttgttgttttgggttttaattcgtttttttcggttgtttgtagataaagggagagtagttgcgggttatgtagaggggatagtttttttggttttgtttatagttttaaagtaaagtagggggtgtagttattatttgggtatgttaggaaagggtgatggttgatcggtttagtatttttaatagtttaaatgtttttatttttttttaaaggtagtgtatatttatttttatttaattgaattagtgttgtatttattttaggtagttttttttgtttaaattagattatttttagttataaaattaagaaagtgtgtttagtagattaagttttaaaagtggatttgttaattatatttatagaagtaaagagagtaagagaatttttatatatttttttttttttttttttttttttttttttttttttttttttttttttttttttttttttttttttttgtttttttttttttttttttttttttttgttttttttttttttttttttttttttttttttttttttttttttttttttttttgttttttttttttttttttttttttttttttgttttttttttttttttttttttatgtatgtattatatatttttatt

SEQ ID NO: 2064 - DNA, 2396 bp, Artificial Sequence
  chemically treated genomic DNA (Homo sapiens)
ggtaggggtgtgtggtgtatgtatgagagagagagagagagagaaataagagggagagagggagagagagagagaaataagagggagagaaggagagagagagggaaagagagagggagagagggagagaggtagagagagagggagagagggagagaggtagagagagagggagagagggagagagggagagagagagagaaaagagagagagagggagagagggagagtatataaaaatttttttgttttttttgtttttgtagatgtagttaataagtttatttttagggtttaatttgttgggtatatttttttgattttatagttagaaatgatttaatttaggtagagggggttgtttgaagtaaatatagtattggtttaattaggtggggatagatatgtattatttttaaaagaagataaagatatttgaattgttggaaatattaaatcgattagttattatttttttttaatatatttagatagtagttgtattttttgttttgttttgggattataggtagagttaaggggattgttttttttgtatgattcgtagttattttttttttgtttgtaaataatcgagaggagcgagttggagtttagagtagtagagatttagtttagtagttgattgggttaggtgcgtttttattggttgtagaggttcggttgagttttatttttttttgtatataaagataagaagttaagggttttttttcgaaagtaaatacgtttaattggaattatcgtttttttatgatttatcggatggaatttataatggtgtttatttttttttataaaagtagtaaatgaattaattttaataggaaatataaatttaggaaatataaatttttagtagatgtatttcgaattatataggaaaggatttattgagaaagaaggtttttgtaattttagagggttttgtttagaagtaagagttaagagtggtttagattagttgaggagaagtaattttatatatgagtttaaaataagtttttgtacgagttattttttgtttggttttttttagtagtgggaatttagataaaattttaggaatgttttgttgggtagttgtggtgtatttaaagtagagaaattgttttaatttttgtaaaattaataaagataagtaatagttttagttgggttgaaattagttaatgcgttgttatataatgttttggtgattattatttaggttttgatcgtcgtacggtattgcgtaagtatgttggtaatgtttaataaattatttgttttgtatttgtttttatttaataggggtttttgtttgaattttggttttatttagtatgttagttatttattttttaataggggaagtttttttattttattgtataatttttataatttttttgattttagtttgttttatagaatgatttttgttagagaatattttggaaagggagatatggattttgaatttgtttattgattagtttttagagtattatgtgtgtgaaattttatttgtttatgtgattttttttttatttgtttttttttaagagaattttaatatttatttaaatgttgattttattttttttttggttagttgtgtttaagttagaaattttttttttttgtttttttttttttagatatatgttttatattgtagtaagatattttttgtatatgtcgggtgtagtggtttataattgtaattttagtattttgggaggttgaggtagaaggatcgtttgagtttagaagtttgataggagattttggattttataaaatatatatatacgtgtatgtatatatatatatatatatatatatatatatatatatatatattttgtttaaatcgtatagtatttggaatttattgattatattatataggtgttagacgaaattatttgaatttaatgtttttatagatttataataaatattgacggtttattttatatggtttaatatatgtatttttttgtaaaattgtttatattattttagattagagatttgagaagataattgatttaatatatggtttttattaaaaaaaagaaagttttttttgagaatttatttatttatttattttgagatggagtttttttttgtcgtttaggttggagtgtagtggcgcgatttcggtttattgtaagtttcgttttttaggtttacgttatttttttgtttcggtttttcgagtatttgggattataggcgttcgttattatgttcggttaattttttgtatttttagtagagacggggttttatcgtgttagttaggatggtttcgattttttgatttcgtgatttgttcgtttcggttttttaaagtgttgggattataggcgtgagttatt

SEQ ID NO: 2065 - DNA, 2417 bp, Artificial Sequence
  chemically treated genomic DNA (Homo sapiens)
tgtttttgggaagtggagttagtatggtagatagaataaagttgtagttgttttagtatttaatagagatgagatttggatacgaataatcgtaatataagatgggatgtgatttagtaatgtgagatagagtgttgtgggagtttagggattgtttttgaaagtgaggttgtagtttgtaaaggtttttttttttttttttaaagtaaaatttgtaaaagtagtattgttttttggaaataagtaaaatgttattaattgtatgaaataaaatacgaaagttttttttttttttttatttttacgttttagtgtaatttatggttcgtaataggatttttttagaatgttttttttgagtatatatatagagtattttttttaaaagaaataagatagtagtagtattatgtatttttaaaaattttaatttgttttttaaaaggttatatatttatatagttttgaattgaaaagatataaacgtagagttttttttttgttttttttttttaattgtttagtttttttttttagagatagtgttgttagttttttaagtttttttgtagagattgtttttttttatatatatttttatttatttttttttttttatttttttatataaatagtattatattttatattttgtattttggtttttttatatatgttgtgtattttaaagatgtagtttaggtgttattttaggtatgttttggttttttttttgataagtatgaagttttttatgataatttagtgatatggaggtagatttgtatgatgttttgggtttgtgatttgaggttttaaggattagagggtaaggtagtagtatttggtttttatttttttttggtttaattgagttttgggggtttgcgtattgttttgagtgtttggttgaatttgtatattttgttggattaattttgatattgttttttttttatttttttcgatgaaggtcgttttattgaattttgtttgttggggaagttttttattgttgagagtagtagttaaaaaagttgttagttacgtggttgggtttttatttttgtagaggtaggttgagttatagtttggtggtgtggatttaggtaggaattggttaatattttgaattttgagttgttatttgtttcgtagtttgttgggatgtttagtttagataatatataaagttttttggatacgggataaatttaggtttatggaaagagtaggaaggttaaagtgtgtggtattttgggtaatgacgaaggcgtaattagggagttgatatgtttgttttaaagttaagaattttaggataatttgttatttagttgaagttagtgtagttgttataaaaaagtttggggataaaagtatgttttttatttgtttttttgtttttttgtatatttattttattttttaaagttgtagtaaaggttgttgatattggaaatgtttgatgatttttgttatttttttcgtaaatgaataagagtttgggtttaggttaaattatggttttatgtgttgaaagtattagttttttgaaatagttttataaatgttgatattttatttagattaggagggttaggggaaaggtttaagtaagtattaggttttattatgaaagaatgattttaatagattaaatttggtttgatggtattaaatgttttttttttatttttttttttttttttttttaaagtattattggttagagaggaaatagaaatttgggttgttagatttgaagagatttatatagtatgggattggtgttttagaatattgtaggtgtgtgaatgtatgaagagttgtatttaagtgttattgtttagtttgtttgggtattgatggttttaggtttttttttaggagtaagggtgggagatatttttagtgggttaagatattagttagtggttataatttgtaatgtgaaaagtagtttggggtagttttatttaagtttgtttagtggtgaagagagaggagaaggttgtagttttgtattgacgtatttttattattatatttagggatattttgtgatatagatgagtggggttttttttttttttttgtaaaattttggttttatatatagtagagtttttttttttttttttttttatatatatatatatgtgtgtgtgtgtgtgtgtgtgtatgtatatatatatatgtatatgtatatatatagtattttttttttttttttttttttttgagacggagtttttttttgttgtttaggttggagtgtagtggtatgattttagtttattgtaattttcgtttttcgggtttaaataatttttttgttttagttttttgagtagttgagattataggtacgtattattacgtttggttaatttttgtgtttttagtgtagatga

SEQ ID NO: 2066 - DNA, 2417 bp, Artificial Sequence
  chemically treated genomic DNA (Homo sapiens)
ttatttgtattaaaaatataaaaattagttaggcgtggtggtgcgtgtttgtaattttagttatttaggaggttgaggtaggagaattgtttgaattcggaaggcggaggttgtagtgagttgagattatgttattgtattttagtttgggtaatagagggaaatttcgttttaaaaaagaaagaaaaagaaaagaatattatatatatatatatatatatatatatatatatatatatatatatatatatatatatatatatatatatagagagagagagagagaaaagttttattatgtataaaattaaagttttataaaagaaaaaaaaaaattttatttatttgtgttatagagtgtttttgagtatggtgatagaggtgcgttagtgtaaggttatagtttttttttttttttttattattaagtaagtttaaataaggttgttttagattgttttttatattataagttatgattattgattagtattttgatttattggaaatgttttttatttttgtttttgaaagaagatttgagattattagtgtttaaataagttgggtaatagtatttggatgtaattttttatgtatttatatatttgtaatgttttgggatattagttttatgttatgtgggtttttttagatttgatagtttaagtttttattttttttttgattaataatgttttaaaaaaaaaaaaaaaaaaaggtgggggaagggtatttgatgttattagattaggtttagtttgttgaaattatttttttatgataaaatttagtatttgtttaggttttttttttgatttttttggtttgagtgaaatgttagtatttgtgaagttgttttaggaagttgatatttttagtatatagagttatggtttggtttgagtttagatttttatttatttacgaggagaatagtaaaaattattaaatatttttaatgttagtaatttttattatagttttagaaaatagagtaggtgtgtaagaagatagggaaataagtaaaaagtatgtttttgtttttaggtttttttgtagtaattatattggttttagttggataataaattgttttggaatttttggttttggagtaaatatgttagttttttggttacgttttcgttattgtttaaagtattatatattttaatttttttgttttttttataggtttgggtttgtttcgtatttaggaaattttatatgttgtttaaattgagtattttagtaggttacgaggtagatggtagtttaggatttagaatgttgattaatttttatttggatttatattattaagttgtaatttagtttgtttttgtagaaataggagtttagttacgtggttaatagtttttttaattgttgtttttagtaatgaggaatttttttagtagataagatttagtaagacggtttttatcgagagaaatgaaaaggaagtaatattaagattgatttaataggatatataggtttaattaaatatttaagataatacgtaagtttttaaagtttaattaagttaggaggagatgaggattaggtgttgttattttgttttttagtttttgggattttaggttataaatttaggatattatgtaggtttgtttttatgttattagattgttataagaggttttatatttgttaggaaggaagttaggatatgtttgaggtggtatttgaattatatttttaaaatgtataatatgtatgaaaaaattaaggtatagagtgtaaagtatgatgttatttgtgtaaaaaaataagagaaggagggtaggtaggagtatgtataggaagaaatagtttttgtaagggaatttaagaaattggtagtattatttttggggaggggagttgagtagttgggaagaaaaggtaggaggaagattttacgtttgtatttttttaatttagaattatgtgaatgtataattttttaaagaataaattaaaatttttaaaaatgtataatgttattattattttattttttttaaaaaaaatgttttatgtgtgtgtttagagaaaatattttggaagaattttattgcgaattatgggttatattgggacgtgggagtaggggaaggaaggagattttcgtgttttattttatatagttagtagtattttatttgtttttaaaaggtagtattatttttgtaaattttattttaaaaaaaaaaaaaaaaatttttataaattgtaattttatttttaaaaataatttttaaatttttatagtattttgttttatattattgaattatattttattttgtgttacgattattcgtgtttaggttttatttttgttaaatgttggagtaattgtaattttgttttgtttattatgttggttttattttttagggata

SEQ ID NO: 2067 - DNA, 2449 bp, Artificial Sequence
  chemically treated genomic DNA (Homo sapiens)
aaaaataatttttatttttacgtttgtaaatatgtttatttatatttttttagttattttttttgtaaatattttgaataaaaaggatttcgttttatggttgatttttatttaatttatttattgagataggggtttattttgttatttaggttatagtgtagtgatataattatggtttattgtagttttaattttttggtgttaagtaatttttttattttagttttttgagtagtttgggattataggtgtgtattgttacgtttggcgaatttttaaatttttttgtagagatggggttttattatgttgcgtaggttggtcgtgaatttttgggtttaagtgattttttagtttcggttttttaatatgttaggattataggtatggttgatttttatagtttttttttatttaaaatgtaatatgtagtgattttatagtttttttttaattttatttttgtgttttgaaagtgattagtttagtttttgttatagtagagtttttagtaattaattttagtaataaaattttataattgtgggatggaatagtgtgttaattgcgttttcggagaaatttatgtttaatttgtatatagaacgtttatagatttttgtttattagtttggttggaaggatagggtttgttgtaaggatagtaattttatttagggtttttttagaggtttgagaggttttgttaaggttttgggtttaggggtttaaggtgggagagggcgagagaaaataacgtgttaatgtagttttgagtggtttttaaataggagtagagggaaggttgtgaggggagttggttgttttttttggagttagaaaggttgttgtttaattttttggattttttattatagttgggtagggagagggttagattgggtatgattttttcgaataggtttttttaaagttttttggttgaattgattttttttttagagttaaggaagtagtgtttgggtgaagttaatttttttatttttaatatatttttttagagttaggtgagtttggaagtttaggtttttggaaggtagagttatatagggtaagaggtttaaggagtcgtgaattttggttggagaaattttttttttggttttgttaaatttaataggtataattgtattttgttgattttaatttttttggcgggtttaattggttttggtattgttttattttttgttttgtttttgtagaggtaaagagggtgtttgtatagttggtgtagggcggggaagtttttttttgagggtgggtaggggttttggtagtttttaggtgggtggaggaagttttttcgtgttttatttttgtgtttttaagggagtgttgagaagtttggggatttttagggagtagttggttggagtaggtagtttcgtagattcggaattaggttagatttttattttagtgggaggtattgtaggggagttggcgggaatagatgaattttttatttggggtgtttacgatattattaggtttttatagtgttgtaggtattgtgttattgggtattttttatatgtgtgttggttaaatgttcgtagttatgttgtgagagggaggtaatggggtagagtagttatgagtagagttttgggttagatgggtttaattttaattttatgattttgttttgtgatttagtttttttgttatatttgtgaaatggggattaaagagttgatatttatatagtattcgttatgtttatatttattgttgtaatgttttatttattttttgggaggtagatgttttttttacggatgaggaaataggtgaagatattgttttaagtttatagttattggtcgtagcgttttattgatagattttttaattattgtatggtagggagttgtaagattcgaaggaaggatatttatgaagttgtttattttagggtttggtttattttagaaagagtttaataagagtaattatttgggaataataattataataaaagtagtattaatgtttttgaagttgttttaggttggattttggttttattgggaggtggttttggatttgaatgtgggtagtttgaagttatttattagttgagtgattgtggggataagttatttttttttgtgagtattagtttttatatttttaaaatggtgtaatattggtttttatagttttttttgaggatttagggagttggatttttggtatagtttggtttggtcgttggtgggtatttaataaatgattggtattgataattataataataataaggagatgttagtaaggtttagtatagggaggtaataaattttagtttggagttttttggttaattagttatttatttattagatattgatgggtaagtttattttgtgttggggatgtgtttagtttttggtttttagggggtttttagatagtg

SEQ ID NO: 2068 - DNA, 2449 bp, Artificial Sequence
  chemically treated genomic DNA (Homo sapiens)
tattgtttgggagttttttgaaggttaggggttaaatatatttttagtatagagtggatttgtttattagtgtttgatgagtaaataattgattaattagaaggttttagattggagtttgttatttttttatgttggattttgttggtatttttttgttattattgtggttattaatattagttatttattgagtgtttattaacggttaggttagattatgttaaagatttagttttttggatttttagaagggattgtaggggttaatgttatattattttaaaggtgtggaaattgatgtttatagagggaagtggtttgtttttatagttatttagttagtgaatggttttaaattatttatatttaaatttagagttattttttaatgagattaaaatttagtttgggataattttaggggtattagtgttatttttgttataattattatttttaaataattatttttattgaattttttttaaaatggattaggttttggggtaagtagttttatgagtatttttttttcgagttttataattttttattatgtagtgattaggagatttgttaatgaagcgttgcgattagtaattgtgagtttggaataatgtttttatttgtttttttattcgtaaggagagtatttgttttttaggaggtagataaagtattataatagtgagtgtgagtatagcgagtgttgtataaatgttagttttttaatttttattttatagatgtgataggaaaattgagttatagggtaaagttatagagttgggattggatttatttaatttaaggttttgtttataattgttttgttttattgttttttttttatagtatggttgcgagtatttagttagtatatatgtaaagagtgtttaatggtatagtatttatagtattgtgggggtttgataatgtcgtggatattttaggtagagggtttatttgttttcgttagtttttttgtagtgttttttattgggatgagagtttggtttggtttcgaatttacgggattgtttgttttagttagttgttttttgggagtttttaagttttttagtatttttttggaggtataggggtggggtacggggaaattttttttatttatttaggggttgttagagtttttgtttatttttaagaaggggttttttcgttttgtattagttgtgtagatattttttttgtttttataggggtaggataggaagtggggtaatgttaagattaattaaattcgttaggggaattaaggttagtaggatgtaattatgtttgttggatttaataaggttagagggaaggtttttttagttagagtttacggttttttaggttttttgttttgtgtagttttgttttttaggagtttaggtttttaggtttatttagttttggaagaatgtgttgggggtgaaggggttaattttatttaggtattgtttttttggttttggagaggaaattagtttagttaagaggttttaaaaggatttgttcggagaagttatgtttagtttgattttttttttgtttagttgtgatggaaaatttaaagagttgagtaataatttttttgattttaaagagagtagttaattttttttatagttttttttttgtttttgtttgagagttatttaaggttgtattagtacgttgttttttttcgtttttttttattttggatttttgagtttagggttttggtaggattttttaggtttttggaaaagttttaggtaaggttgttgtttttatagtagattttgtttttttagttaagttagtaagtagaggtttgtgggcgttttgtgtgtaaattggatataggttttttcgaaaacgtaattgatatattgttttattttatagttatagaattttattgttaagattaattattgggggttttattgtgataaggattaaattggttatttttaggatatagagatgaaattgggggagagttatagaattattgtatattatattttaggtgaaaaaagattataaaaattaattatgtttgtaattttagtatgttaagaggtcgaggttggaggattatttgagtttaggagtttacgattagtttgcgtaatatggtgagattttatttttgtaaaaaaatttaaaaattcgttaggcgtggtagtgtatatttgtggttttaagttatttaggaggttgaggtagaaggattgtttgatattaggaggttgaggttgtagtgagttatgattgtgttattgtattatggtttgggtgatagggtgggtttttgttttaataaataaattaaataaaaattagttatagagcgggattttttttgtttaaaatatttataaagaagatggttggagggatataaatggatatatttataggcgtagaaatagagattattttt

SEQ ID NO: 2069 - DNA, 2340 bp, Artificial Sequence
  chemically treated genomic DNA (Homo sapiens)
ttttttttttttttagtttagtttacgtaggttttgttttagtatcgtgagtagttgttttttttagttatatttgagaaatcgaagaagtttttaggtttaaagttattgttataattcgcgtttttttttttttttttttggagacggaattttgttttgtagtttaggagggagtgtaatggtattatttcggtttattgtaattttcggtttttgggtttaagcgatttttttgttatagtttttcgagtagttgggattatagatatatattattatgtttggttaatttttgtagttttaatagagatagggtttttttatgttggttaggttggtttcgaatttttggttttaagtgattttattgtttcggtttttaaaagtgttgggatgataggtatgagttattatatttagtttataatttttatttttgttaggttttttaaaagtttttattgttagtgtaggtagttgtttggaagttattttaggttattttttttattttttaggtaggtgaattaagattatttaggtgcgaggttggtttgagttagagatggtttgggagagtttttggggggtagggagggtttagtttttttaggtttggttgtgttttttgttttttatttataattaggtttagggttggggggtgtatattaaggaggggtaggaagtgtttaagaagtagaatcggttttgtgtttttagtggcggcgggtgtttggggtaggaggaggttatttgattttttttttattgtttcggttatgattttttttttttttttttcgttttttttttttttttttttttttttttttttttttttttttttttatggttggggtagttagtattttgggttgtagttgagaatttagcgttttttaatttcgttagtattttagtgagaggaggggtggggggagattgtatttagagttttagggataggggtatttttggggttgttttattttgggagggttaaggttaggttgtttttaattttatcgttttttgttttcgttttttttattttttagtagtagagttgtttaaatttggttttaggagggaatgggggaggtagcggtaggcgggtgtcgttagaggttagggcgtcgttttcgtttagtcggttggtatttttgttgtttggaggagggtaggggggttcggtagttttttttcggaaagggagatgttcgtattttttgatatatattgagtaatgtgtaaacgatatgtaaatcgagttttaaattagtattttagttagggaatagtttgagagttgtttttgggatgagagtagaaggattagagtttagtgtttaggggttttagtgggggtggggtggggtggggggcggtatagagtgtttagggttgggcgttgggagatttagttttttgttagttgtagggttttgttttagtggttggattttttgggttttagtttaagggtagggttatggttttttttgtttgttttagtaaagtattgggtatattttgttacgtggttaagtacgtgagttttgtagttattttgtttaggtttgaattttggttttttatgggttagttgagtgaattttttaatcgagtatttaggtaagtagttagtggaattgggtgtttgttttagaatagttattttttttttttggaagttgggtacgggggtatgacgtgagagaatttgggttttggaattagaattggattttaggttttatttagttagtgaggttttttgagttttattttttttatttgggaaatgggtttaggattttaaggttagttgtgacgtttacgtgatgattttgtatatggtgggtatatataggtttttttatggtgtagttttattgttgtttgtatttatgtgatttttagttttattttgttttatcgttttttttttttttgtttttttgttttggttttttcgtttttagatgtaaattttttgcggttttttttttttttgtttttttttttaattggtgattttggaaaagttattgttttttagagttttagtttgtatattttttaaatgggagtaaatgagaggtggataatgagttttgtttggggtttgaggtttatttttataagatcgtttatttattattttaaagggttattaggggtaggttgtgtttttaattttatcgggtatggtgtgttgggggttttattttttagtaattttgtttaattttagataattgtttttttgtttttcggtcggggttgatatgagttgaatttagttttttgttatttaaaagttattttttg

SEQ ID NO: 2070 - DNA, 2340 bp, Artificial Sequence
  chemically treated genomic DNA (Homo sapiens)
taggaagtggtttttgggtggtaggaagttggatttagtttatattagtttcggtcgaggggtaggagagtagttatttggggttaaatagagttattgagaagtggagtttttaatatattatgttcgatagagttgagggtatagtttatttttggtggttttttggaatgatgggtgggcggttttgtaaagatgagttttaggttttagatagagtttattgtttattttttatttatttttatttagaagatatgtagattgagattttgagaggtaatgatttttttaagattattagttaagaagagagatagaagggaaaaagatcgtaagaaatttatatttagagacgaaaaagttaggatagaagaataaagagaagaggagcgatgggataggatggagttaggagttatatgaatgtagatagtagtgaggttgtattatgggaaggtttgtgtgtgtttattatgtgtaaggttattacgtggacgttatagttgattttgagattttgaatttattttttaaatgaggggagtgagatttagagagttttattggttgagtgaggtttggaatttagttttgattttaaagtttaggtttttttacgttatgttttcgtgtttaatttttagggaagggaagtggttgttttaaaatagatatttagttttattagttgtttgtttgggtgttcgattgaggaatttatttagttggtttatggagagttagggtttaaatttaggtaggatggttgtagaatttacgtgtttaattacgtgatagggtgtgtttagtgttttgttggagtaggtagagaaagttatggttttgtttttgggttgggatttagagggtttagttattggaataaagttttgtagttggtaagaaattgagttttttaacgtttagttttagatattttgtgtcgttttttattttattttatttttattggagtttttgggtattgggttttggtttttttgtttttattttaaaagtagtttttaagttgttttttggttgagatgttgatttgaagttcggtttgtatgtcgtttgtatattatttagtgtatgttagaaggtacgaatattttttttttcgggagagggttgtcgggtttttttgtttttttttagatagtaaaaatgttagtcggttagacgggagcgacgttttggtttttgacggtattcgtttgtcgttgttttttttatttttttttggagttaaatttaggtagttttgttattgagagatggggagagcggaggtaggaaacggtgaggttggaggtagtttggttttggtttttttagagtggagtagttttaggggtgtttttgtttttaaagttttgggtgtagtttttttttatttttttttttattggaatgttggcggggttggggaacgttgggtttttagttgtagtttagggtgttggttattttagttatgaaggaggagggagggagggagggagggagggagggagggagggagcgagggagggagggaggaggttatggtcggggtagtggggaagggattagatagtttttttttgttttagatattcgtcgttattggggatatagagtcggttttgttttttggatattttttgtttttttttggtgtgtattttttaattttgggtttgattgtgggtggggggtaggggatatagttaggtttgaggggattgaattttttttgttttttaaaggtttttttaggttatttttgatttaggttagtttcgtatttgaatggttttggtttatttatttgggaaatggaaggggtggtttagaatgatttttaagtagttgtttgtattgatagtaggagtttttgggaggtttgatagaaatgagggttgtgggttgggtgtggtggtttatgtttgttattttagtatttttggaggtcgaggtagtgggattatttgaggttaggagttcgagattagtttggttaatatagggaaattttgtttttattaaaattgtaaaaattagttaggtatggtggtgtgtgtttgtaattttagttattcgggaggttgtagtaggagaatcgtttgaatttaggagtcggaggttgtagtgagtcgagatggtgttattgtatttttttttgggttatagagtaagatttcgtttttaaaaaaaaaaaaaaagaaacgcgggttgtggtagtggttttaggtttagaaattttttcgattttttaggtatggttaggagaggtagttatttacgatgttgggatagaatttgcgtgggttgaattgaggaaaggaagaa

SEQ ID NO: 2071 - DNA, 2438 bp, Artificial Sequence
  chemically treated genomic DNA (Homo sapiens)
tgtttagaattttatagtattttatatagttttatatatgtatacgggaattttttttttcggtttttatatttgtttagtatcgattttttagatgtatttattgatttaataaattttttttgagggttttttttgtggaggttttgggttaatttataattagaatgattggaataggaataaataattagttgttttgtgttgttgttttcgtttttttatttgtgagatggggattttagttttgttatatgggattgttaatgttaggagtgaatgtgtggaaagttttcggttcgtgtttggtttatagtgttatttaagtaaggttattttggttagttaaaagtattttatgtttagttttacgtagaatatttggtatatattatttttttgagtttttgtttaagtttttagtagttggggttatcgtttttattttttagatgaggaaatcgaggtttagagaagaggtttatagtttgtaggttgttttatcgattttatgttatgttatagtgttgttttagtttgtttcgttattttttatatatatatatatatatatatatatatatatatatatattattttttttggttagaaggttttttttatttgtatatagtatgtttagtttttttgagttgtttatttatatttttgtgaaatggggatattagttcgtgttagtttttgtttattttttttagggtattggattttaagggttaagagtgaagattattttgttttgttttttggtatatagtaggtattcgataattattttaaaattaaaggaataagtaagtggttttatggttattgaggatagagtttggaattgaatgtagggtattttgaagttggagtttatttttatattattgttttttttatgttattagtaggtattgaatgtgttagtgagtgaatgaatgaaattaagattttaggattttagttaagtgttttttgagttttattttttggtagtgtggatatgagttaagttttagttattttggatggtggtgggggtggcggggttgatgggtcgtttgaagtcggttgttaggagttcgtttggttatagtcgttagtaggagagattagttggcggtgtagggtttatcggttcgggtttggaatttgagttgtttttagaggtttagtttttttttgggtttttataaattggtttttgtttttgggtcggttaagatttagtagtttgggttttttgtttgttcgcggtattcgcgttgagttggcggggtaaatgggttagttttttttttgtttatgtttaggacgtcgttttaggattaaatggagatgtaattttttatataaatttatgataatttagatggagtgattgtaattggttttttaatgggggttttgtttagagttggtggttagaattgggtggtttgtttgaggtaggttttatttaaatgataataaagtaataatattgaggatttgtatagtgtttagtattttttttagtttaagtagagttttatgtttatggatttggtttttttttgaggttgtttggataggcgggtggtggggggcgttaagtttaggagataggtggttatatttttgggttttaggatatagagttttagaatggttggggtaaggtttcgtatttattggtttatttgtgtttttatttttgaaattgttattaattagtgttttttcgggttagttgttagtttaggtttcgggggtattaagataatgagagttgtttaggtaggttagagggagaaggttataatggttagtatagtatgatatttgagagtatgattaagagatgattaatagttagatagtttgagtttaaattttattttatttttttttaaaaaaattttttttgagatagggtttcgttgtgttatttagattggagtatagtggtaggattacggtttattgtagtttcgatttttaaggtttaagtaatttttttattttagttttttaagtaattggattataggtatgtgttattatatttggttaatttttttatttttttgtagagatagagttttattgtgttgtttacgttggtttcgaattattgggtttaagagattttttcgttttagtttttgaaagtgttgggattataggtgtgagttattgtgtttagtttttattttatttttgattcgttttttgaattttattaagttatttaatttttttatgttttagtttttttagttataatatgaagttgtagtgaaagtttttgtgaagatgaaatattttaatagtgtttggtatgtggaaggtgttatatataagttattgtcgtgatttattttaagttttagttttggtgttagggtgattttgggtacgtgatttaatttttttaaatttttatt

SEQ ID NO: 2072 - DNA, 2438 bp, Artificial Sequence
  chemically treated genomic DNA (Homo sapiens)
agtggaggtttaaagaggttaagttacgtgtttaaggttattttgatattagagttagagtttggaatgaattacggtaatgatttatatatagtattttttatatgttaggtattattaaggtgttttatttttataaaaatttttattgtagttttatgttatggttggggaaattgaggtatggagaggttaagtaatttggtaaggtttaagagacgagttagaagtagagtaggggttgagtatagtggtttatatttgtaattttagtatttttagaggttgaggcgggaggattttttgagtttagtagttcgagattagcgtgggtaatataatgagattttgtttttgtaaaaaaataaaaagattagttaggtgtagtgatatatgtttatggtttagttatttgggaggttgaggtgggaggattgtttaagttttggaggtcgaggttgtagtgagtcgtgattttgttattatattttagtttgggtgatatagcgagattttgttttaaaaaaaatttttttaaaaagaagtggagtaggatttgagtttaggttgtttggttgttggttattttttggttatgtttttaaatgttatgttgtattggttattgtagttttttttttttgatttgtttgagtagtttttattgttttggtgttttcgaaatttggattagtagttagttcgaggaggtattagttagtgatagttttaggaataaggatataggtaagttagtggatgcgggattttgttttagttattttgaagttttgtgttttgaagtttaaagatatggttatttgttttttgggtttagcgttttttattattcgtttgtttagatagttttagggaaggattagatttataaatatgaggttttatttgggttgggaggagtgttgggtattgtataagtttttaatattattgttttattgttatttaaatggagtttgttttaaataggttatttagttttagttattagttttggataaaatttttattgaaaagttaattataattattttatttaaattgttatggatttgtatagaaaattatatttttatttagttttaaagcgacgttttgggtatggatagaggggaggttggtttatttatttcgttagtttagcgcgggtgtcgcgggtagatagaaagtttaagttgttgggttttggtcggtttaggaataaaggttagtttgtgggggtttagagagaagttgggtttttgagggtagtttagattttaggttcgggtcgatggattttgtatcgttagttggttttttttgttggcggttgtggttagacgagtttttgatagtcggttttaggcggtttattagtttcgttatttttattattatttaaggtggttggagtttggtttatgtttatattattaggaaatgaaatttagggagtatttgattgggattttgagattttggttttatttatttatttattgatatatttagtgtttgttagtagtatgagaaaggtaataatgtagaagtgagttttagttttagagtgttttgtatttagttttagattttgtttttagtagttatgaggttatttgtttatttttttagttttgaaatagttgtcgagtgtttattgtgtgttagagaataggataaaatggtttttatttttggtttttaaagtttagtgttttggggaaaataaataggggttgatacgggttagtatttttattttatagaagtgtaagtaggtagtttagaggagttgggtatgttatatgtaagtgagaagggttttttagttagagggaatagtgtgtgtgtgtgtgtgtgtgtgtgtgtgtgtgtgtgtgtagggggtggcgaggtaggttggagtagtattgtggtatgatatgagatcggtggggtaatttatagattgtgggttttttttttgagtttcggtttttttatttgaggaatgggggcgatgattttagttgttggggatttggataagggtttagggagataatgtgtgttaggtgttttgcgtggagttgggtatgggatgtttttggttaattaggatagttttatttagatgatattgtgggttaaatacggatcgagggttttttatatatttatttttaatattgatagttttatgtggtagggttaggatttttattttatagatggggaaacggaggtaatagtatagggtagttaattatttgtttttgttttagttattttgattatgggttagtttagggtttttatagagaagatttttaaaaaggatttgttgaattagtgaatgtatttggaaggtcggtgttgggtaggtgtgggggtcggggaggaagattttcgtgtatatgtgtgaagttgtgtggagtgttgtgggattttgagta

SEQ ID NO: 2073 - DNA, 2364 bp, Artificial Sequence
  chemically treated genomic DNA (Homo sapiens)
ttaatagatatagaaaaaaagttcgataaaatttaatatttttttataataaaaacgtaaaattaggaatggaagagaatttttttaatttgataaagggtatttatgaaaaatattgttaatattaaatttaataaataatgaaagttttttttttagaattagaaataaagtaagtgaaaattataattttggttagttgtggtggtttatatttgtaattttagtattttgggatgttgaggtaggagaattatttgaatttaggaggtagaataaaattataattttagaaaaagtatgtgttttgtatttgttattgtgagtttgatagtttgttaatattcgaagatttttgtgattggatatggtagtttatatttgtaattttaatattttggaaggttaaggtaggaggattgtttgagtttaggagtttgagattagtttggttaatatagtaagattttatttttatttttttttttttttttttttttgagatagagtttttgttatttaggttggagtgtagtggtgtaatttgagatttgtttcgagattaaaaagtttgagaattattgttatagaaaagtattaggatatgtattaaaatggtttcggaagtattgtttttaattataatttattgggaatattttatatatttattagtagtataatatgttatatatatatatatatatatatatatatatatgtatgtatatatttagtgttttagataagggaggttatgtttaaggtagtttatttttaaatttttatttaaagaaattttgaatgttttttgggtttttgttggattttagaatttttgtttttatttttagttattgtaaatgaattttggttttatgtttatagtaattagttttagttttggtattattttaaaggaaaaatgttaaattatatttgttcgaggtttttggaatggtttaaaagtttagggaaaagggtgtatagggtaggaaagtggggtgagtgaggtattatttttttagttagaaagcgtagttttgttaggagttttttggttagtgttatttttttttgtatattgcgtcgttttaggtcgcgtagaagtcgtagtttttgtttagttaaaaggttttgggagggtaaaaagatagtatgagcggaaggttttagttaggcgtttttgagttttttttcgaggtcgtattaggttgtgtattaggagtttttttcggtatcgatttagggtattgggtcgggttatcgttttgcgttcggtatcgtggtaaaattgtttgtagtgagtagggatgtgtatagtagataggaattaaaggaaaggagaaggatagtgattttggggttatttgttttgagttgattttttatttttagttttttttatagtttttttagttttgggttttgaagaggtatttttttttttgtaaagttggtttatttttatttggattatttttaaaaattattaaggttagttttgtttttgagttttagagttcgttaatatttaattatttattattttggttattttaggtgtggtttatggattaatagtattggtattatttgtaggttatttaaaattgtaggattttagttttattttaggttttgttgaattagaagttgcgtttatgttttcggggatttttaagtatattgaagttttagacgtttttattagtttggttaacgtatagtttgaatattatatgtttaagttaaatgtatattttttaatgatttttttcgtaaaataaaataaaataaaataaaaattttattttattttagaattttcgagttattttttattgtttttttttttttattttatattaatttattagtaaattttttatgttttatttttaaaaaatatttagaatttggttaggtgtggtggtttaggtttgtaattttcgtattttgggaggtcgaggcggtgaattatttgaggttaggagttcgagattagtttggttaaaatggtgaaataattgtgtttattgacgttgaaaggttgagtatggtgagaatagaaaagtgattatttatagttttttattttattgttttttttgattagggtttttggttgagtttttgttttttttttgtttttaaatgttggaacgttttaggtttttagattttttttttttgtgttttgttaatgttgttatttagttttatttatataatgatagtttttaaattgatatttttagtttagaattttttttagaatttaatttatatagttaattgtttattatatatgtttatttataatttaataagaattttatagttaatatgtttaaaattgag

SEQ ID NO: 2074 - DNA, 2364 bp, Artificial Sequence
  chemically treated genomic DNA (Homo sapiens)
tttagttttggatatgttaattgtgaaatttttattgaattgtaagtggatatgtgtggtaggtagttagttatatgagttgagttttggggagaattttaggttggaaatgttaatttgggaattattattatgtagatggagttggataatagtattaatagagtatagaaaagagaaatttgagaatttggagcgttttagtatttagaggtagggaggaagtagggatttagttaaggattttgattaggagaggtagtgaggtaggaggttgtaggtggttatttttttgtttttattatgtttaattttttagcgttagtagatatagttgttttattattttggttaggttggtttcgaatttttgattttaagtgatttatcgtttcggttttttaaagtgcggggattataggtttgagttattatatttggttagattttggatattttttgaaggtagagtataaagaatttgttgatgaattgatgtggaataagagagaaagagtagtgagagatgattcgaaagttttgaggtgaaatagggtttttgttttgttttgttttgttttgcgggggggattattggaaagtatgtatttggtttgggtatgtaatgtttaagttatacgttagttaagttggtggagacgtttgaggttttaatgtgtttaggaattttcgagggtataaacgtagtttttgatttagtagggtttggggtggggttgaggttttatagttttaaatagtttgtaggtgatattagtgttgttggtttatgggttatatttggggtagttagggtagtaggtggttaagtattagcgagttttggagtttaagagtaaggttggttttaatgatttttgggagtggtttaaatagagataggttagttttgtaggagaaagggtgtttttttagagtttaagattgagagggttatgagggaggttgggggtgggaggttagtttagagtaagtggttttaaggttattgtttttttttttttttttgatttttgtttgttgtgtatatttttgtttattgtagatagttttgttacggtgtcgagcgtaggacgatgattcggtttaatgttttggatcgatgtcgagggaaatttttggtgtatagtttggtacggtttcgggaagggatttaggggcgtttagttggggtttttcgtttatgttgtttttttgtttttttagaattttttggttaagtaaggattgcgatttttacgcggtttgagacggcgtaatgtgtaaaagaaggtggtattggttaagaagtttttggtaaaattgcgttttttggttgaggaggtaatgttttatttattttatttttttattttgtatatttttttttttaagtttttgaattattttagaggtttcgggtaggtgtgatttaatattttttttttggaatgatgttagggttgggattaattgttgtgggtataggattaagatttatttgtagtagttaagggtgaggataagagttttagaatttagtagagatttagggaatatttaggatttttttggatgaagatttgagagtaggttgttttgagtatgattttttttgtttgaagtattaaatatatatatatatatatatatatatatatatatatatatatataatatattgtgttgttgatgggtatgtgagatgtttttaatgggttgtgattagaaataatgttttcgagattattttggtatatgttttggtgtttttttatggtagtggtttttaaattttttggtttcgggataggttttagattatattattgtattttagtttgggtgatagagattttattttaaaaaaaaaaaaaaaaaaaaaaatggagatggggttttgttgtgttgattaggttggttttaaatttttgagtttaagtagtttttttgttttggttttttaaagtgttgggattataggtgtgagttgttatgtttagttataaaaattttcgagtgttggtaagttgttaagtttataatggtagatataagatatatattttttttgaaattgtaattttattttgttttttgggtttaagtgatttttttgttttagtattttaaagtgttgggattataggtgtgagttattataattagttaaagttgtaatttttatttgttttgtttttgattttagggggaaagtttttattatttattaagtttgatgttagtagtgttttttataaatgttttttattaggttgaggaagtttttttttatttttagttttgcgtttttattgtgaaagggtgttagattttatcgaattttttttttgtgtttattaa

SEQ ID NO: 2075 - DNA, 2386 bp, Artificial Sequence
  chemically treated genomic DNA (Homo sapiens)
ggtaggagaattgtttgaatttgggaggtggaggttgtagtgagttgatattgaattattgtattttagtttgggtgatagggtaagattttattttaaaaaaaaaaaaaaaaaaattaggttttgatgtttaataggttggttttattatttataatttataatgtgtaggatttggagtaaattattttatttataggatttttagtttttttttttgtaaagtggagataatatttattttttagggatagtgtaggaggatgaaagagcgttgagttagtggttaatataggttgagtatttagtggatggtagtaattgttattattattattattatattattatattattataatataaaatattgagtaaatttgggatattttggtatttaatatttgttttttttttttttttttttattttttttttttttttttttttttttttttttttttttgtttttttatttttttttattttttttttttttattttttttttatttttttttggtatatttggttgtagttgtaaggagtggtaggagtttatataggaaaaggaggtgtggttagattttggggggatttgaatgttagagggagtttgatttttagtttaggggtaatagtgagttattaaagtttgcggtggagtagaaataagttgtggtgaaagtggggaagtgagtttggtagtagagattgggaaggggttgtgagggtagaagttggagttagagaggtgagttatttagggagtttaaaggttaagtgagagagatggggaagtagaggttgtatttttgtttagagttcgtttgggagaagtagttttattttttacgtttattttgtttataaaatttagtcggagtatttatttttgtgtgattttagataagtgtttaatttttttgagtagtagtaaggttattttagtttttggtgatattttttggttttttagtaaagatatttttggattttataggtttttattattttttaggttgttttttgtttagagattaatttgtttatttttttgtttggagatgaatcgagggaattaatcgtttattagcgtaggtttttttaatttcgtatcgtttcgttttaaatgtttattttttggtaaaatatgtttttgtcgttgataaggttgtttggaaaatgttaattttattttcgaattaaaatttgtttttttattttcgttttaataaaaatgaagtattcggaaatattgttacggtgtagaagagaaagatttgatataatttttaaaatgtttttaattacgttgatttttgaacggtttgttttttaattttgattttttttttattttttaattttttgaggtagtatttatattttttaataattttttattaatatttatgagaaggggcgggtaataacggttgagtatatcgtattaatttaatttttattcgttttagcgtgtttatttaattattaagggattcgggttatttagtataattatttattcggaattagatttggaggtatttggattggaaatagggaattaagagtaaaatgaaaatcgaatttttttcgttttttttttttagtcgtttttttttgatcgtgtgttaacgttttaggtagttagtagggtttagaggataaggtttcgtgttcgtcgggtagtttttgaaggaattggttcgtgaggggttgaatgtgttttagatgttttggtttcggtaggaattttttattaatagtagttttggagttatcgtaaggtttagtagtgggttagttgtatcgttttagttaagagtatggttagttagagttagggtgtttaggagatgttggggtattggtttaatttggatatgtagtgtggatagatttttgattataggttttgtggaggtgagagtttgtgatatggggtttaaataatatttgtttattttcgaattttcgtttaattgttattttttttaagaagttttttttggtttttagataaggttagttttttttattatatatattttttgttataattaggatgggtttggttatagtattttgtttattgtgggtgtttatataatggtttttaattagttgtttagggtttgttttttttaatagttagtttcgtgggagtaggttttatggttgttttggttacgtgtttttagtatttagtaatgtttagtatagagatgtttaatagtatttgttaattttttgattgattgattttattattgatttttgatttttaagtttttgtttttttatttgtaaaatgaagttaagaatatttattttgtaggattgtcgtggggatttagtgttttttatgtaaagaggatgta

SEQ ID NO: 2076 - DNA, 2386 bp, Artificial Sequence
  chemically treated genomic DNA (Homo sapiens)
tgtattttttttatatggaaaatattgagtttttacggtaattttataagatgaatgtttttagttttattttgtagataaggaaatagaggtttgagaattaggagttaatagtagaattaattagttaagaagttaataaatattgttgagtatttttgtgttgggtattgttagatgttaggaatacgtgattaggatagttatgggatttatttttacggaattgattattgggagaaatagattttgaataattaattagaaattattgtgtgaatatttatagtgggtaaggtgttatgattaagtttattttggttgtaatagaaggtgtgtgtaataggagaagttaattttgtttggggattaggaaaggttttttggaggaggtgatagttaagcgggggttcgaggatgagtaggtgttatttagattttatgttataaatttttatttttatagggtttgtgattaaaagtttgtttatattgtatgtttaggttgggttaatattttagtattttttgaatattttaattttggttggttatgtttttggttgggacggtgtaattggtttattgttgggttttgcgataattttaaggttattgttgatgagagatttttgtcggggttagagtatttggaatatatttagttttttacgagttagtttttttaggagttgttcggcgggtacggagttttgttttttaagttttgttggttgtttggagcgttggtatacggttaggaagaggcggttgggaggggaggacgaagagaattcgatttttattttgtttttggttttttgtttttagtttagatgtttttagatttaatttcgaataaataattgtattgagtaattcgggttttttggtgattaagtaaatacgttgaggcgggtggaaattgaattagtgcggtgtgtttagtcgttattattcgtttttttttatgaatattaatgaggggttattaagaaatgtaaatgttgttttagggggttgggagatggggagggggttagggttagaggatagatcgtttagaagttagcgtgattgaaggtattttaaaaattatgttagattttttttttttgtatcgtggtaatgttttcggatgttttatttttattaaaacgagggtaagggaataaattttaattcgaggataaaattagtattttttaagtagttttgttagcggtaaggatatattttgttagaaaatggatatttggggcggggcggtgcgaggttgggggagtttgcgttgatggacgattagttttttcggtttatttttaggtaagggagtaaataaattaatttttgagtagagagtagtttggaagatgatggaagtttgtaggatttagaagtgtttttgttaggaagttagggggtgttattaagagttaagatggttttattgttgtttagagaggttaagtatttgtttgaggttatatagaggtgggtgtttcggttgggttttgtgggtaaggtgaacgtagagaatgaggttattttttttaggcgagttttagatagagatgtagtttttgtttttttattttttttatttgatttttaggttttttggatagtttatttttttggttttagtttttgtttttatagtttttttttaatttttgttgttaggtttatttttttatttttattatagtttgtttttgttttatcgtaggttttagtgatttattattgtttttaggttgaagattagattttttttgatatttaagtttttttaggatttgattatattttttttttttgtgtaagtttttgttattttttgtagttgtaattagatgtattaaggaaggatgagaagaaagtgagaagaaggggaataaaagaaggtgagaagatagggaaaaaggaggaaggaagaaaaggagggagaaaggtagggagaaaggaagaggaaataaatgttaagtattaaaatattttagatttgtttaatattttatattgtaatgatgtggtgatgtgataatgatgataatgataattgttgttatttattgagtgtttagtttgtgttagttattggtttagcgtttttttatttttttgtattgtttttagaaagtagatgttatttttattttatagaggaggaaattgagagttttgtaggtaaaatgatttgttttaggttttatatattataaattataaatgatagaattagtttgttggatattaaaatttgatttttttttttttttttttgagatggagttttgttttgttatttaggttggagtgtagtggtttaatgttagtttattgtaatttttattttttaggtttaagtaatttttttgtt

SEQ ID NO: 2077 - DNA, 2734 bp, Artificial Sequence
  chemically treated genomic DNA (Homo sapiens)
ttttttgttgtttttggtttttagtttttggtttaagtatggtttttagtttagataaggtttttttaggaggtttaggagttttgcgggaggtagagtgtagataaaggttcggagttcgtttatgtggaaaatttgggtttgcggcgatcgtgaattatatgggtagaggggttagatttggggtttttatgatgggaatatgatgtgattgtggaggttagttaaggtttttgttagcggtgagtggaatagataaagaaattagttattagaggagagaagtattttagatcggagtgggaggttatatatcggttttttgtgttgttttttagaggggaattggggtagaggggtttttttattttacgaggttggttgggtttaatttaaggaatttttgtttttttatttttgttggaatttttattgtagtttattggatttttgtacgagatatatttggggtgtttagtgagtaggtagatttttagatatttatttcgaaaagttagtttgaaagagaatatttaggggtggggtttggttatagttagtttttttagagagttttaagtttagtaatatttaataattttgtgtttaggttaatggtgtttaattttagttgtggattgtgattatttggggaattttttttaaattttgatatttagattttatttaagattaattatgttagaatttttggggtgtgttttgggtatttatatatttttaaagttttttagtcgttttagtgtgggtttaaggattgttttagttttagattaattttaagagttttaagatgaatatttggggaaaaggagaagttatgagttttagataagagaaataatttgtttaaggttatataaggtggtgatggtaaagttcgttttgaaatttaggttttttttttgatcgtgggttaatttttttttgatgttgtatttttttttaaaaattagagtttaggtaggtaatgtttatagtattttattttaataatattggaaatcggtatagttagggttattatagtggtggggcgggagtttcgatggcgattaggggagttgtaagtttttcgttttatttaaattttgggtagtaatttagaaaatttaattaaagggggagaaatggggatatttcgcgttttttgttttttgttataatgagtgaaatatattaggttgtaaaaggaaatgttgtttgagacgtagtttcgatgttttattgttaagttttatttattgatgtaaacgtaatcgttggaaatcggagtttttattaatatatatatttttatatattcggggttttttttgtttttttttttttttttgggtttgtttatttattttttagggttagttttgttgttttttgggtatgtttatgttaagtttggagtttcgtatcggttttatatttttttatggtagataagattttaatagaattttattgttttttagagtttagtaatgtattttggaaattaggcggttatatattaaagttattgtttttttttataaatgggtttttttaaagttagtgattatgggggttttgataagtttttatgaagttttattttatatgttattggtgtgttaaaaggtgtaattttaggtttatattgtttattgttaggggttgatatatttaagtagtttttttatgaattaggtagtttaggtattttttttatttttggtattgatagatgagtaaaaggaagttatttagatggtgttatatagggttttagtttacgtggtgaatgatttttaatgtttggtttaatttatttttaaatgaaatttgttattgattttggattaaaaggataaattttatagttgttattattgatagagttatagtgtttaagtgatattttttaaggaggggagggagggtggtttgtttgagttaaggggagggtatggagattttttagggagtttggtttagtagtaaggggtagtgtaagattttatgtttagagggaagtttaaaaatattattttttttaattgaaatatttgacgtgatgtttatttttgagttttatttatataatggaaatagtagtgatatttgttttatggtatttatacgattattagaggtatgttagttgtttttagggatgggaggttttttattttttgtagtatttttagaatgaaatgagtgataggcgttatttattttagtgaatttttagagattgttttttgggttagtttttgtttattttttgtttttattaggttttcggtttttacggtgtttagagattatatttgtattgggaagtagataagaggtataattatataggggaggaggatgggttgggatgtgttcgtttatatttagtttttgttttattttattgtgtaattttgtgtaggttatattatttttttgagttttgtttttttatttgtaaaagaaggaagggtataatagtagttttaggggttgttgtatgaattataggagattatgggtgtgaatgtgatttgtaaattgtaaagtgtagtttaggtgttgtaggaaatataagtgggatagtatagtatagtgggaggtttttgagttgggagataaaggatttggatttagttttgttatgagtggttgtgtggttttgagaaagtgaattattttttttgggttttagttttttaaggtgttaagaggg

SEQ ID NO: 2078 - DNA, 2734 bp, Artificial Sequence
  chemically treated genomic DNA (Homo sapiens)
tttttttggtattttaagaaattaagatttagagaaagtaatttatttttttagagttatatagttatttatgatagaattggatttaggttttttgttttttaatttagagattttttattatattgtattgttttatttgtattttttgtagtatttaaattatattttatagtttataaattatatttatatttatgattttttataatttatataataatttttgaggttgttattatattttttttttttttatagatggagaaataaagtttagaaagatgatgtaatttgtataaagttgtatagtgaggtagggtagaggttgaatgtgaacggatatattttagtttattttttttttttgtgtaattgtgttttttgtttgttttttaatgtaagtgtaatttttgggtatcgtggaagtcgagagtttagtggaggtagaaggtaagtaaagattagtttaggaaatagtttttaggaatttattagagtgggtgacgtttgttatttattttattttgggaatgttgtaggagatggaaagttttttatttttggaggtaattaatatgtttttagtggtcgtgtggatgttatgaggtaaatattattgttatttttattatataaatgaggtttagaggtgagtattacgttaagtattttaattgggaaagatgatatttttaaatttttttttaagtatgggattttgtattgttttttattgttgagttaagttttttggagagtttttatattttttttttgatttagataggttatttttttttttttttttgagaggtgttatttgagtattgtggttttgttagtggtaatagttgtaagatttgtttttttaatttagaattaataataaattttatttaaaaataaattaaattaggtattggaaattatttattacgtgggttggagttttatatagtattatttaaatggtttttttttgtttatttattaatgttaagagtgggggaaatatttaggttgtttgatttatggagaaattatttaaatgtattagtttttaataatgagtaatgtaagtttggagttgtattttttagtatattaataatatgtggagtgaggttttatgagagtttattagagtttttatggttattggttttgagagagtttatttataagggggaataatggttttagtatgtagtcgtttaatttttagaatgtattattgagttttgaggagtaatggaattttattaaagttttatttgttatgggagggtatgaaatcggtgcggaattttaggtttggtatagatatgtttagaaagtagtagggttgattttaggaggtgggtgaataagtttagagggagaggggggagtaggaggggtttcggatgtgtgaaaatatgtgtgttaataagagtttcggtttttagcgattacgtttatattagtgaataaaatttggtaataaaatatcggagttgcgttttagatagtatttttttttatagtttggtgtattttatttattataataggaggtagggagcgcgaggtgtttttatttttttttttttaattaaattttttaaattattgtttaagatttggataaagcgaaagatttatagtttttttaatcgttatcgaggttttcgttttattattgtggtggttttgattgtatcggtttttaatattattaaagtgaaatattgtgggtattgtttgtttgggttttggtttttaaaaagagatgtagtattaggaagaaattggtttacggttaggaaagaggtttgggttttaggacgggttttgttattattattttgtgtgattttgggtaagttattttttttatttgagatttatgatttttttttttttttagatgtttattttgaggtttttagaattgatttggagttggggtagtttttggatttatattgggacgattggggagttttaagaatatatgggtgtttagggtatattttagagattttgatataattggttttaggtgagatttgggtattagggtttaaaaaaaattttttaggtgattatagtttatagttaggattgaatattattggtttaaatatagagttattagatattattggatttgagattttttggagaggttggttgtggttaggttttatttttgggtgtttttttttagattggtttttcggggtgggtatttgggaatttgtttgtttattaagtattttaggtgtgtttcgtgtagggatttagtgggttgtagtgaggattttaatagaggtgggaggataagggttttttgaattgagtttagttagtttcgtggaatgaggaggtttttttgttttagtttttttttggagggtagtatagggagtcgatatgtgattttttatttcggtttggggtattttttttttttgatgattgatttttttatttgttttatttatcgttggtaggagttttgattggtttttatagttatattatgtttttattataggaattttaggtttggtttttttgtttatgtggtttacgatcgtcgtagatttaggttttttatatggacggatttcgagtttttatttgtattttgtttttcgtagggtttttaggttttttaggaaggttttgtttaggttgagagttatgtttgggttaagggttaggagttagggatagtaggggg

SEQ ID NO: 2079 - DNA, 2441 bp, Artificial Sequence
  chemically treated genomic DNA (Homo sapiens)
ggatattttttaggatttttggtaaaggtaggagttagaatgaatgaattttttgtgtttaggtttttttgttgtttttggtttttagtttttggtttaagtatggtttttagtttagataaggtttttttaggaggtttaggagttttgcgggaggtagagtgtagataaaggttcggagttcgtttatgtggaaaatttgggtttgcggcgatcgtgaattatatgggtagaggggttagatttggggtttttatgatgggaatatgatgtgattgtggaggttagttaaggtttttgttagcggtgagtggaatagataaagaaattagttattagaggagagaagtattttagatcggagtgggaggttatatatcggttttttgtgttgttttttagaggggaattggggtagaggggtttttttattttacgaggttggttgggtttaatttaaggaatttttgtttttttatttttgttggaatttttattgtagtttattggatttttgtacgagatatatttggggtgtttagtgagtaggtagatttttagatatttatttcgaaaagttagtttgaaagagaatatttaggggtggggtttggttatagttagtttttttagagagttttaagtttagtaatatttaataattttgtgtttaggttaatggtgtttaattttagttgtggattgtgattatttggggaattttttttaaattttgatatttagattttatttaagattaattatgttagaatttttggggtgtgttttgggtatttatatatttttaaagttttttagtcgttttagtgtgggtttaaggattgttttagttttagattaattttaagagttttaagatgaatatttggggaaaaggagaagttatgagttttagataagagaaataatttgtttaaggttatataaggtggtgatggtaaagttcgttttgaaatttaggttttttttttgatcgtgggttaatttttttttgatgttgtatttttttttaaaaattagagtttaggtaggtaatgtttatagtattttattttaataatattggaaatcggtatagttagggttattatagtggtggggcgggagtttcgatggcgattaggggagttgtaagtttttcgttttatttaaattttgggtagtaatttagaaaatttaattaaagggggagaaatggggatatttcgcgttttttgttttttgttataatgagtgaaatatattaggttgtaaaaggaaatgttgtttgagacgtagtttcgatgttttattgttaagttttatttattgatgtaaacgtaatcgttggaaatcggagtttttattaatatatatatttttatatattcggggttttttttgtttttttttttttttttgggtttgtttatttattttttagggttagttttgttgttttttgggtatgtttatgttaagtttggagtttcgtatcggttttatatttttttatggtagataagattttaatagaattttattgttttttagagtttagtaatgtattttggaaattaggcggttatatattaaagttattgtttttttttataaatgggtttttttaaagttagtgattatgggggttttgataagtttttatgaagttttattttatatgttattggtgtgttaaaaggtgtaattttaggtttatattgtttattgttaggggttgatatatttaagtagtttttttatgaattaggtagtttaggtattttttttatttttggtattgatagatgagtaaaaggaagttatttagatggtgttatatagggttttagtttacgtggtgaatgatttttaatgtttggtttaatttatttttaaatgaaatttgttattgattttggattaaaaggataaattttatagttgttattattgatagagttatagtgtttaagtgatattttttaaggaggggagggagggtggtttgtttgagttaaggggagggtatggagattttttagggagtttggtttagtagtaaggggtagtgtaagattttatgtttagagggaagtttaaaaatattattttttttaattgaaatatttgacgtgatgtttatttttgagttttatttatataatggaaatagtagtgatatttgttttatggtatttatacgattattagaggtatgttagttgtttttagggatgggaggttttttattttttgtagtatttttagaatgaaatgagtgataggcgttatttattttagtgaatttttagagattgttttttgggttagtttttgtttattttttgtttttattaggttttcggtttttacggtgtttagagattatatttgtattgggaagtagataagaggtataattatataggggaggagga

SEQ ID NO: 2080 - DNA, 2441 bp, Artificial Sequence
  chemically treated genomic DNA (Homo sapiens)
ttttttttttttgtgtaattgtgttttttgtttgttttttaatgtaagtgtaatttttgggtatcgtggaagtcgagagtttagtggaggtagaaggtaagtaaagattagtttaggaaatagtttttaggaatttattagagtgggtgacgtttgttatttattttattttgggaatgttgtaggagatggaaagttttttatttttggaggtaattaatatgtttttagtggtcgtgtggatgttatgaggtaaatattattgttatttttattatataaatgaggtttagaggtgagtattacgttaagtattttaattgggaaagatgatatttttaaatttttttttaagtatgggattttgtattgttttttattgttgagttaagttttttggagagtttttatattttttttttgatttagataggttatttttttttttttttttgagaggtgttatttgagtattgtggttttgttagtggtaatagttgtaagatttgtttttttaatttagaattaataataaattttatttaaaaataaattaaattaggtattggaaattatttattacgtgggttggagttttatatagtattatttaaatggtttttttttgtttatttattaatgttaagagtgggggaaatatttaggttgtttgatttatggagaaattatttaaatgtattagtttttaataatgagtaatgtaagtttggagttgtattttttagtatattaataatatgtggagtgaggttttatgagagtttattagagtttttatggttattggttttgagagagtttatttataagggggaataatggttttagtatgtagtcgtttaatttttagaatgtattattgagttttgaggagtaatggaattttattaaagttttatttgttatgggagggtatgaaatcggtgcggaattttaggtttggtatagatatgtttagaaagtagtagggttgattttaggaggtgggtgaataagtttagagggagaggggggagtaggaggggtttcggatgtgtgaaaatatgtgtgttaataagagtttcggtttttagcgattacgtttatattagtgaataaaatttggtaataaaatatcggagttgcgttttagatagtatttttttttatagtttggtgtattttatttattataataggaggtagggagcgcgaggtgtttttatttttttttttttaattaaattttttaaattattgtttaagatttggataaagcgaaagatttatagtttttttaatcgttatcgaggttttcgttttattattgtggtggttttgattgtatcggtttttaatattattaaagtgaaatattgtgggtattgtttgtttgggttttggtttttaaaaagagatgtagtattaggaagaaattggtttacggttaggaaagaggtttgggttttaggacgggttttgttattattattttgtgtgattttgggtaagttattttttttatttgagatttatgatttttttttttttttagatgtttattttgaggtttttagaattgatttggagttggggtagtttttggatttatattgggacgattggggagttttaagaatatatgggtgtttagggtatattttagagattttgatataattggttttaggtgagatttgggtattagggtttaaaaaaaattttttaggtgattatagtttatagttaggattgaatattattggtttaaatatagagttattagatattattggatttgagattttttggagaggttggttgtggttaggttttatttttgggtgtttttttttagattggtttttcggggtgggtatttgggaatttgtttgtttattaagtattttaggtgtgtttcgtgtagggatttagtgggttgtagtgaggattttaatagaggtgggaggataagggttttttgaattgagtttagttagtttcgtggaatgaggaggtttttttgttttagtttttttttggagggtagtatagggagtcgatatgtgattttttatttcggtttggggtattttttttttttgatgattgatttttttatttgttttatttatcgttggtaggagttttgattggtttttatagttatattatgtttttattataggaattttaggtttggtttttttgtttatgtggtttacgatcgtcgtagatttaggttttttatatggacggatttcgagtttttatttgtattttgtttttcgtagggtttttaggttttttaggaaggttttgtttaggttgagagttatgtttgggttaagggttaggagttagggatagtaggggggtttgggtataggaaatttatttattttggtttttgtttttgttagaagttttagggagtgttt

SEQ ID NO: 2081 - DNA, 2473 bp, Artificial Sequence
  chemically treated genomic DNA (Homo sapiens)
agtaattatgttataagggtggtgggtgggttaaatgagttgagttttggtatataagtaatttagtatggagtataataaatgtttattttgtgtttgtcgttattgtttttaagttttttttttggtttttattggtgtggagtattttattgttttttttttttatagatttttattttgttatttaggttggagtgtagtggtttaattatagtttattgtagttttgaatttttgggtttaagagattttttttttttagtttgttaagtatttaagattataggtatgtattattatgtttagttaagtttaaataaattttaatttatttttatgttattttatttattgtgtagatagggttttgttttgttattttgggttggagtgtagtggtaggattttggtttattatagttttaattttttaggtttaaatgatttttttgttttagttttttagtagttgagattataggtatgtattattatgtttcgttaatttttgtattttttgtagggatggggttttgttatgttgtttaggttggttttatttgttttaatttaagtattttttttgttttagttttttaaaatgttgggattatcgttgtgagttattatgtttggttatatatttttttttatttaaggttagaagaatttttaattttaattaattttttttggttaaatagttttttttttaattattggttaagttgaaagtagagattaaaaaatattatattattatttggttagtaaagaaatttttttttttttattattattattttttttttttttttttttgttttttttttttttttttttttttttttttttttttttattttttttttttttttttttttttttgtttgttttggtttaatgaaaggttttataggacgttgttcgtggtgttgatttgtttttttgttttgtttaaattttgtatgtaaatgaaaagataatatagttattgaatgttgaagttggggatattttttaagttaatttttgtgtttgtggtgtggttacggttttggttattatttttggttatagtgtttcggagatgttgatgttgatttggattagaggtgttagtttgggtattgttagtttttatagttattgattagagttttagggtataggtagttagtaatttatttgggtgttttagggattgttattggtaaagtgatggttttatagggattaaatgtgaagttaaagtaggatacgtaggtcggagataaggttaagaatagattttttttagcgtttaagtgttgtttgttagaaattgatagttttacggttttggtcggtgataggtatagggtgataataatattatatgattagtattattggaggataggttgttattggtttttagagataaggaaataatgggcgatttttttgtttagggaaaggtttgtatggagtttttagggtaaagtagtaagatttaaagtgtgtttttgatttttggtattttattagtattttttttttttagtaggtttttagagtttttttttgttatttagggattcgtggtttttattgtgtatttattattttgatttttgttttttggagttaattatgttatttttagagtataggtgttagtggatgataatagataagtagttttttttttagttttttgtattatagacgttgttaagggaatggagtgggagaatagagttttttcgaggtggtttatgtaggttatggatttagtattaatagtttttttttagtattggatttttgagaaataaaaaggttgggtgtggaggggtttttatattttttagtgtttttttattttattttattggagtaaagttgttgattttatatttggggatatattttgggatgggttttattgttttggtttggttatatttttttttttattgttgcgtaatttttttttattatagttttaatagttatgaaatggggatttagtatatttaggttttagttttttttttgattttagtttgatgaatgatttagggattatagttaagttattttattttttggttttagtttttttaattgtaagttggggttatttatttgtaattattagatttgttaggtggtatgaagttttagtgagataaatatatgtgagggttgggcggtgggagatttgagatttattttttattaattaggtttattgagtatagtgtggagtattgttgggttttagtttggaggtttgttttgtttgattttttaggtggtaagattattttttcgtttttttttttttttatgtttaggttgtgattttttatgggtttattttttatatttttttgtttttttttttttatgtttgttttttaattggtttttgtttttgtttttttttttgattttttacgtatatttgtaaattttattt

SEQ ID NO: 2082 - DNA, 2473 bp, Artificial Sequence
  chemically treated genomic DNA (Homo sapiens)
gagtgaggtttgtagatatacgtaaaagattagaaaaaaaggtaagaataagaattagttgagagatagatatgagagaaagaaaataggagggtatgagaggtgagtttatgagaaattatagtttaagtatagaagaggaggggaacggggggatgattttgttatttggggagttaggtagagtagatttttaagttgagatttagtagtgttttatattgtatttagtgggtttggttagtggggggtaaattttagattttttatcgtttagtttttatatatatttattttattggaattttatattatttggtagatttgatagttatagatgagtagttttaatttatagttgaagaaattgaggttagggagtgaagtgatttgattatgatttttaaattatttattaagttggggttagggaaagaattaggatttaggtgtgttgagtttttattttatggttattggggttatggtagggaaaggttgcgtagtagtgggggaagggatatagttaagttagggtagtggaatttattttaaaatatgtttttaagtgtagggttaatagttttgttttagtggggtggaatgggaagatattagaaaatgtgggagtttttttatatttaatttttttattttttaagaatttagtgttggagagaggttgttagtgttgaatttatggtttgtataaattatttcgagaaagttttgtttttttattttatttttttagtagcgtttgtggtgtagggagttggggagggaattgtttgtttgttattatttattaatatttgtgttttagagataatatgattaattttagagaataggggttagaatagtgggtgtataatggaggttacgggtttttgggtgataggaaggagttttgggggtttgttgggaggagggggtgttggtgaggtgttaggggttagagatatattttagattttgttgttttgttttgggggttttatgtaggtttttttttaggtagaggggtcgtttattgtttttttatttttgggagttagtgatagtttgttttttaatgatgttgattatatggtattgttattattttgtgtttgttatcggttagggtcgtggggttgttaatttttgataaatagtatttgagcgttaaagggaatttgtttttggttttattttcgatttgcgtattttgttttagttttatatttggtttttgtggggttattattttgttaatagtagtttttggggtatttagataagttgttagttgtttgtgttttggggttttagttaatggttgtggggattggtagtgtttaggttggtatttttggtttaggttagtattagtattttcggggtattgtggttagagataatggttagagtcgtggttatattataggtatagagattagtttggggaatgtttttagttttaatatttaatagttgtgttgtttttttatttgtatatagagtttgaataagatagaaaaataagttagtattacggatagcgttttgtgaggttttttattaagttaaagtaagtagggaagaaaggaggaaaggagaaggtaagggagggaggagaaagggagggaaagggggaagaggtaaaaggaaaaggagaggaaatggtgatggtaggggagggagagtttttttgttggttaaataatggtgtggtattttttagtttttatttttagtttggttagtggttgaagaaaagattatttgattaaggaaggttaattgaaattaaaggtttttttgattttagataaagaaggatatgtggttaggtatgatggtttataacggtaattttagtattttgagaggttgaggtagaaggagtgtttgagttaaggtagatgagattagtttgggtaatatgataaaattttatttttataaaaagtataaaaattagcggggtatggtagtgtatgtttgtagttttagttattggggagttgaggtaggaggattatttgagtttgggagattgaggttgtagtgagttaagattttgttattgtattttagtttagggtgatagggtaagattttgtttatataataaataaaatagtataaaaataaattaaaatttgtttaaatttagttgggtatagtggtgtatatttgtggttttagatatttggtagattgaggaaggaggattttttgagtttagaaatttaaggttgtagtgagttatgattgagttattgtattttagtttaagtgatagaatgaaaatttgtgaaaaaaaaaagtaatgagatattttatattaatagagattaaagaaggaatttggaagtaatgacgataaatataaagtaagtatttgttgtgttttatgttaagttatttatatgttagaatttaatttatttagtttatttattatttttatgatatagttgtt

SEQ ID NO: 2083 - DNA, 2500 bp, Artificial Sequence
  chemically treated genomic DNA (Homo sapiens)
atgatagattggattaagaaaatgtggtatatatatattatggaatattatgtagttataaaaaatgatgagtttatgttttttgtagggatatggatgaaattggaaattattatttttagtaaattatcgtaagaataaaaaattaaatattgtatatttttatttataggtgggaattgaataatgagaatatatggatataggaaggggaatattatattttggggattgttgtggggtgtggggaggggggagggatagtattaggagatatatttaatgttaaatgataagttaatgggtatagtatattagtatggtatatgtatatatatgtaattaatttgtatattatgtatatgtattttaaaatttaaagtataataataaaaaaaaaaatagatatgatataattataaaaaaagaaagaatagtatattagagggaaggagtagtttttattttttattttttattttttttgagatagtttcgttttgttatttaggttggagtgtagtggtataattttggtttattgtaatttttgttttttaggtttaagtaattttttttttttagtttttcgagtagttgggattataggtatgtattattatattcggttaatttttgtatttttagtagagatggggttttgttatattggttaggttgattttaaatttttgattttaggtgatttgttcgttttagttttttaaagtgttaggattataggcgtgagttattatattcggttagtagttttatatatttaggaaaaaagtattagatgtgatttttaagttaataataatttagaatagaaaatttaaatattgttttagtgtttggtttagttttagtttaatgttgtattttgtatttgtttattgtaagatgtgaatgttttatttaatttttttggtagatgtatttttttttatatttttttaaaaattgaaagatgatttttttattttttatttagttttgaaagggaggtatagttaatgatttcgtacgtattttagaaattgatttttttagattttaatagaagttatttaagtgtatagatgtttgttggttttatatggaggttttgttggttatgaaaaaatatttttttttaattttttgtttaatttgttttaagttggtaatgaaatttgtgaatttgtgttttttttttataggaaaaatagaattttgattttttttaaaaattagaacgtaataggataatggagaaattagttttaatagtatattttttgttcgttttagagcggtgatgtaaatacgatgatgttatgtttttggggtttttgaggtttttgttaaaagtatagtagtttaggtggattcgtgtttatcgtatgtttttttggtggatttttgtcgataaattgtatgtttgtttttttgaaatagtattatgaagttgttaatgtttttgtataaagattattttattttgtttgttttggggataaagattttgtattaattattttgtttttttttggagcgaagagttgaagaggtaataggaaatgtttatttattgagtttttattgggtattaattgtggatatttatagaaggggtttgagtaagtatttttttattgtttaggggttagagtagagaatagaaaggaaatagtttggtttttggttttataaaataaataagaataaaatagaatattgaatatttgtgttttttttattattttaatgtatgtattttgtagattttgtatttaaatatgtagaataggttaatgaaagaaaatgttaaggtcgggtatagtggtttatatttgtaattttagtattttgagagttcgaggtgggtggattataaggttaggagttcgagattagtttggttaatgtagtgaaatttcgtttttattaaaaatataaaaattagtcgggtatggtggcgggcgtttgtaattttagttattcgggaggttgaggtaggagaattatttgaattcgggaggtagaggttgtagtgagtcgagattgtattattgtattttagtttgggtggtagagagattttattttaaaaaaaaaaaaaaagaaagaaagaaagaaagaaaatgtttttaaattttattatttagagataaaattatttatttttggagagtatttttttaaatttcgtttttttttaatggtttttagttgaggataattttggtcgtttgcgtatatttggtaatgtatggaaatatatttggttgttatatattaggaaggggtgtttttggtatttagtgggtagaggttgaggatgttattaagtattttatattgtaaaggatagtttttttttttattataaagaattatttagtttaaatgttagtggtgttgaggttaagaaattttgttatagatatatggatgtgtagttttgtgataattatataattaagtttatattatgttagttgtttattatttt

SEQ ID NO: 2084 - DNA, 2500 bp, Artificial Sequence
  chemically treated genomic DNA (Homo sapiens)
aggatgatgagtagttggtatagtatgaatttgattatgtaattattatagagttatatatttatatgtttatagtagggttttttggttttagtattattggtatttgagttggataattttttgtggtggagagaggggttgttttttgtagtgtgggatgtttagtggtatttttagtttttatttattaaatgttaggaatatttttttttagtgtgtgataattaaatatgtttttatatattgttaaatgtacgtaggcggttaaaattgtttttagttgagaattattggaagagagcgagatttggaagaatgttttttaaaagtgaatgattttgtttttgggtggtgagatttgagggtattttttttttttttttttttttttttttttttttttgagatggagtttttttgttatttaggttggagtgtaatggtgtaatttcggtttattgtaatttttgtttttcggatttaagtgatttttttgttttagtttttcgagtaattgggattataggcgttcgttattatattcggttgatttttgtatttttagtagagacggggttttattatattggttaggttggtttcgaatttttgattttgtgatttatttatttcggatttttaaagtgttgggattataggtgtgagttattgtgttcggttttggtatttttttttattagtttgttttatatgtttgaatgtagaatttataaagtgtatatattaagatggtgaaagaaatataaatgtttaatgttttattttatttttatttattttgtggaattagaggttaagttgttttttttttgttttttattttggtttttggataatgaggagatatttatttaaattttttttgtgggtgtttatagttggtatttagtaagaatttagtaaataagtattttttgttgtttttttagtttttcgttttaggagagagtaaggtgattagtgtaaagtttttgtttttagggtaaatagaatggggtggtttttatgtaaagatattaataattttatgatgttattttagaagagtagatatataatttgtcgatagaaatttattaaagaagtatgcggtaggtacgaatttatttaagttgttatgtttttggtagaaattttaaagattttaaaagtatagtattatcgtgtttatattatcgttttgaaacgaataagaaatgtgttattgagattgatttttttattattttgttgcgttttgatttttaaaagagattaaaattttattttttttgtagaaagggaatatagatttatagattttattattaatttaaaataaattgagtaaaaaattagaggggaatgtttttttatagttagtaaggtttttatgtaaaattagtaaatatttgtgtatttgagtagtttttgttaaggtttaaggaagttagtttttggaatacgtgcgagattattgattgtgttttttttttaaaattgaataagaaatgaagaaattattttttagtttttaaaaaagtgtaaaaaaggatatatttgttaagaaagttggatggggtatttatattttataataaatagatgtagaatgtagtattgagttggaattgggttagatattggggtagtgtttggattttttgttttaagttgttattaatttaaaaattatatttagtattttttttttaagtatataaaattattggtcgggtgtggtggtttacgtttataattttagtattttgggaggttgaggcgggtagattatttgaggttaggagtttgagattagtttggttaatatggtaaaattttatttttattaaaaatataaaaattagtcgggtgtggtggtgtatgtttgtaattttagttattcgggaggttgaggaaggaggattgtttgaatttgggagatagaggttgtagtgagttaagattgtgttattgtattttagtttgggtgatagagcgagattgttttaaaaaaaataaaaaataaaaaataaaaattattttttttttttggtgtgttgttttttttttttttgtgattatgttatatttgtttttttttttattattatattttaagttttagggtatatgtgtataatgtgtaggttagttatatatgtatatatgtgttatgttggtgtgttgtatttattaatttgttatttagtattaggtatattttttaatgttattttttttttttttttatattttataatagtttttagagtgtgatgtttttttttttgtgtttatgtgtttttattgtttaatttttatttatgagtgagaatatgtagtgtttggttttttgtttttgcgatagtttattgagaataatgatttttaattttatttatgtttttataaaggatataaatttattattttttatggttgtatagtattttatgatgtatatgtgttatatttttttaatttagtttattat

SEQ ID NO: 2085 - DNA, 2333 bp, Artificial Sequence
  chemically treated genomic DNA (Homo sapiens)
tttgtaattttagtatagtgggaggttgaggcgggaggattatttgaggttaggagtttgagattattttggttaaaacggtgaaattttatttttattaaaaatataaaaattagttgggtatggtggtgggtatttgtagttttagttatttaggaggttgaggtatgagaattatttgaatttaggaggtagaggttgtagtgatttaagatggtgttattgtattttagtttgggtaatagagtgagattgcgttttaaaaataaaaattaaaattagaacgtaggatatttaatatttattgttttagttttgttggggaggggtataataagaaaaattttatttggtattttgaaataaattagtattggggtgagtttagtggggtagttgatggttgagttaggttggtgcgatggaaggagttgtgagggtttcgtagtttggagtatttttggtttttttagtagttattataagacggagtaggtagggttgtagttggatagtttagttaggaaatgttagttatgaatgagtgttttatggttgttttgggaatgtgtgttaggattggaattttgtagttgaggatttgaaatgttttgattaggtggttaaagagtatgattttaggtcgggcgtggtggtttatatttgtaattttagtattttgggaggttgaagcgggtggattatttgaggttaagagtttgagattagtttggttaatatggtgaaatttcgtttttattaaaaatataaaaattagttaggtacggtggtgtacgtttgtagttttagttatatgggaggttgatgtaggagaatggtttgaatttaggagacggaggttgtagtgagttaagattgtgttattgtattttagtttggatgataagagtaaaatttttttttaaaaaaaaaaaataaaataaaattgtgattttataataaggttatgttgttagggattacgtattgacgtttttagggagaaatgagaaggaatatagtaatcgaataagacgatgttcgtttatgatatttatgatgttttttaaggtttgagatatattgttttttgtttaattagttattgtgattatatttttatggagattattatgtttgtatttataatagatacgtgtgtatttattaaaggaatatagttgttaaacgtacgttttgggtttagggtggagtggttttttatagtatagttatcggagttgttgtaaaaagtgttagaaaataagtaaggagttgtttttatttatgaagagaggttttttttggtattaggttttgggtttaggggagtgtgaaatttaggaaggcggggtgtatacgtttatgataaaagttttaaaggcgtagatttattttttttttttttttttttaaatgtgtgttaaagatttttaagtttattaattaatgaagggattagtaagatgttaaaaattggtttaggagagaatgtagagaatagatattaatataggtaattaggaatgttttggttaagagatataaaattggttttttttaagagtagtaaggagaatggggagaagatttagttttttattaaaaaaatttgagagttaataagtgtttagtagagtgagtggtgtttggacggaggggtggataggtcggatgggatttaagcgagattgtgttatttagatttgggtagtgttttagggatgtttagtagaggggtaggaggttgtgggggatgtcgttgtttgggttttgttttttttgtgttaagtatttttagttttttgtataggttttaaatgtggtaaatgtatggtagattttggggtatgaggggatgagaggggattttttagaagagtagagtgggaatagattatgaaagtttgggattgtagattttagttttgttatgggataagaaattagttttttttagatattattcggtattcgtttttgttttagaattgagagtagtaaagggtttttgtgtttgttttgtttttggttttttttttttttttttagagatagggttacgttttgttttttaggttggattgtagtggtataattgtagttgattgtaattttaaatttatttttgggtttaagtaatttttttatttcggttatttgttaatttttatttttgttttttggtagagatagggttttgttatgttgtttaggttggttttaaatttttgtttttagtgatttttttgagttggttttttaagatgttggattataggcgtgagttattgtatttggttttttttttgttgttttgtttaatgggattt

SEQ ID NO: 2086 - DNA, 2333 bp, Artificial Sequence
  chemically treated genomic DNA (Homo sapiens)
aaattttattggataaggtagtaaggagaaggttaggtgtagtggtttacgtttgtaatttaatattttggggggttaatttaggaggattattagagataggagtttaagattagtttgggtaatatagtaagattttgtttttattaaaaaataaaaataaaaattagtaggtgatcggagtgggaagattatttgagtttagaagtgagtttgagattatagttagttataattgtgttattgtaatttagtttgggagatagagcgtgattttgtttttagaaaaagaaaaaagaagttaggagtaggataaatatagaagttttttgttgtttttagttttgaggtagaaacgagtgtcgaatggtatttgagagggattggttttttgttttatggtagagttagggtttgtaattttaagtttttatggtttgtttttattttatttttttggaaggtttttttttatttttttatgttttaaggtttgttatgtatttattatatttggggtttgtgtagggagttggggatgtttagtataaaaaggataaggtttagatagcggtattttttatagttttttgtttttttgttaagtatttttggagtattgtttaggtttgggtagtatagtttcgtttgagttttattcggtttgtttattttttcgtttaagtattatttattttattgagtatttgttggtttttaaatttttttaatgaaagattaaattttttttttattttttttattgtttttggaagaaattaattttgtgttttttgattaaaatatttttaattatttatattaatgtttgttttttgtatttttttttgagttagtttttaatattttattggtttttttattaattaatgagtttaaaaatttttggtatatatttgaaaaaaaaaaaaaagagagtgaatttacgtttttggaatttttgttatgagcgtgtgtatttcgtttttttgggttttatatttttttagatttagggtttgatattagagagagtttttttttatgaataaggatagttttttgtttgttttttgatattttttgtagtagtttcgatgattgtgttgtaaaaagttattttattttgggtttagagcgtacgtttggtaattgtgtttttttaatggatgtatacgtgtttattgtgagtataaatataatggtttttatggagatatggttataatgattaattagataaaagatagtgtattttaagttttgaaagatattatggatgttataaacgaatatcgttttattcggttgttgtatttttttttatttttttttagaaacgttaatacgtggtttttagtaatatgattttattatgaagttatagttttgttttgttttttttttttgagaaggagttttgtttttgttatttaggttggagtgtaatggtataattttggtttattgtaattttcgttttttgggtttaagttatttttttgtattagttttttatgtagttgggattataggcgtgtattatcgtgtttggttaatttttgtatttttagtagagacggggttttattatgttggttaggttggttttaaatttttgattttaggtgatttattcgttttagttttttaaagtgttggaattatagatgtgagttattacgttcggtttgaagttatattttttagttatttggttagaatattttagatttttaattgtaggattttaattttggtatatatttttaaggtagttatggggtatttatttatggttggtattttttgattgggttgtttaattatagttttgtttgtttcgttttatgatggttgttaaggggattagggatgttttaagttacggggtttttatagttttttttatcgtattagtttgatttagttattagttgttttattgggtttattttaatattgatttgttttaggatgttagatgggattttttttattgtgtttttttttaataaggttggggtaatgagtattaaatattttgcgttttggttttggtttttgtttttgagacgtagttttattttgttgtttaggttagagtgtagtggtattattttgaattattgtaatttttgttttttgggtttaagtgatttttatgttttagttttttgagtagttgggattataggtgtttattattatgtttagttaatttttgtatttttaatagagatggggttttatcgttttggttaggatggttttaaatttttgattttaagtgattttttcgttttagttttttattgtgttgggattatagg

SEQ ID NO: 2087 - DNA, 2492 bp, Artificial Sequence
  chemically treated genomic DNA (Homo sapiens)
agaggtattttggttgtgggagaaaagtaggttaattttggtacgatcgtttttttttgggatagtgagataagttttttaggattagttggggagttttagagaagttcggtattggtaatgttttgagagtttatttttggagttaagggatttaggttttttatcgtgtatgtttattttttgggtaaggtattggatggtaggattttaagtagaggtaggaaagggtaatttttagttttttgtagaaggtttgattgcgggggtagttagttgggattgtttagttttgaagtagagattgagaatttcgtttgtttgtgtgattattatttatgtttattttttttttgagttttagtttttttatcggtaaaatgggaagagaatggattagagagtattttttttttatttttaaattatagagtttttttttttttttttaagataggttttgttgtattatttaggttggagtgtagtggtgtgattatagtttattgtagttttgattttttggatttaggtgatttttttgttttagtttttttagtaattgggattataggtataggttattatgtttggttaattttgtatttttattttttggtagtaatagagtttttttgtgttgtgtaggttggttttaaatttttggttttaagcgatttttttgtttgtttttaagcgatttttttgttttgggattataggtgtgagttgttatgtttagtttatagataatatgtattgagtgtttattatatgttaagtattgggttaagtttgttgtatgtagtattttgtttatattttataataattaagggggtaggtatttgtttgttttatagatgaggaaattaaggtttttagtagtaaagtaaattttttaagtttatttagtatgggaatgatagatataggtttgtaatttaggttttgttgatatcgaaatttgggatgttagtaattttattttgttgtttgttagttttgttaggttttttaggacggtttttattttgagttatatttttaggaatattttgttattttttattttttttttgggtttatattatgaaagttttatgtagagtttgttattttagagggatatatattatttaaatttgataagataatttaattttatttcgtgtttgttatcggcgataaaattaggagatttttatgatttagtatttttagtaagattgttaggaatttattatataaggtttaattggatttttttttgtagatggttgggagttatgggttggaacgtaattcggtaatatatttggggaaataaatgtaaaatgtttgttttagagatttagataaggtagtaggtttttaagttttttaagaatcggatttgttttttttgggttttgaagggcgatttggggaggatttacgttgtcggaggaggagggaatggcgggttttttttttttttattttttgattttttttgttttagggaaggaatgtgagcgtatttgagatttggagtttagtaattgtaattttttgagaggtagtaatttagagtagatttgggggtgggaggataggatggtgggtagtggtgagattaaggttatgaggattgtgtgtattgaaagaggggtgtaggatgattaaaacgatggggaattgggtttttattagttgttcgggatttgttatagagttattttttattgttttgagaggttcgcgttttttttaaatatatttttaggattggtgtggtttttataaattgggtttttaaatagattttattttttggatgtgagtttatatttagatttagatgattttcgtatataagtttatagatattttaagattttgaggtttattgtgagggcgttttaaatttatggtttattttaaattttgatttttcgtaggcgtgggtttatagacgggtttgcggtttattttagtttttatagtatttatgcgatttttgttattggaaggaatggtaataattatatttatttttgtatttatttaatagatttgtcgaattttgaggttggagttttataagagttagttttaaatttagggtttattttttagtgtagatattttttaaatttttgtttatatatagatttggtataattttagatttagttagttgtttaagttagattttagttttttagttattagtagtatttgagagttatttttttaataagtttatattaagttttgaggatttggtatttttagttttaggtttcggtttttgtgtagggaagttgttgtaatattattgatttgggaagtttgaggtttgtttttgcgtatttgttttgtgattttaagttttttttacggggttaggaaggcggcggagatatttttatttgtttttgggtttttcgatgttttaatggattttagtattagaagttttttttttttttgagtcggagtttcgt

SEQ ID NO: 2088 - DNA, 2492 bp, Artificial Sequence
  chemically treated genomic DNA (Homo sapiens)
gcgagatttcgatttaaaaaaaaaaagggtttttggtattggagtttattgaagtatcggggagtttagggatagataaaaatgttttcgtcgtttttttggtttcgtagaaagagtttagagttatagggtaggtgcgtaagggtagattttaaattttttagattagtggtgttgtagtagtttttttgtataaggatcggagtttgggattggaggtgttagatttttaaggtttggtatgagtttgttgagggggtaatttttagatgttgttggtagttagagggttggagtttagtttgggtagttaattgaatttggggttatgttagatttgtgtgtgagtagaggtttgggggatgtttgtattagagaatgaattttgaatttggggttggtttttgtaaagttttaattttaagattcggtagatttattaggtgggtgtaaaagtgaatgtggttgttgttattttttttaatggtaaaaatcgtatggatgttgtgaaagttgagatggatcgtaagttcgtttatgagtttacgtttgcgagagattagaatttgaggtaagttatgaatttggagcgtttttatagtgaattttaaaattttggagtatttgtgagtttatgtacgggggttatttgaatttggatgtgaatttatatttaaggaatggggtttgtttgggaatttagtttatgggggttatattagttttagaggtgtgtttgggaaggacgcgggttttttagggtagtaaggagtgattttatggtagatttcgagtagttagtgaagatttagttttttatcgttttgattattttgtattttttttttaatgtatatagtttttataattttggttttattattgtttattattttgtttttttatttttaggtttattttgaattgttattttttagggaattatagttgttgaattttaagttttaggtgcgtttatattttttttttggggtaagaagagttaagggatgaggggagaaagagttcgttatttttttttttttcgatagcgtaaattttttttaaatcgttttttagggtttaggaaaagtagattcgatttttggggagtttggaggtttgttgttttatttaagtttttggaataagtattttgtatttatttttttaaatgtgttgtcgaattgcgttttagtttatggtttttagttatttgtagagagaaatttagttagattttgtataataagtttttgataattttgttgaggatgttgggttataaaagttttttggttttatcgtcggtaatagatacggagtgaaattgagttgttttattaaatttagataatatatatttttttagagtagtaggttttgtatggggtttttatggtatgagtttaggagggggatagggagtggtagagtgtttttggggatgtggtttagggtgggggtcgttttggaaagtttggtaggattgataggtagtagggtagggttattagtattttaggtttcgatgttaataagatttggattataaatttgtgtttattatttttatgttgagtgaatttggaaaatttattttattgttgagggttttggtttttttatttgtaaagtaggtagatgtttgtttttttgattattgtgaaatgtaaataagatgttatatgtaataggtttagtttagtgtttggtatgtagtgagtatttaatatatgttgtttgtggattggatatggtagtttatatttgtaattttaaggtaggaggatcgtttgagggtaggtaggaggatcgtttgaggttaggagtttgagattagtttgtataatatagggagattttgttattattaaaaaataaaaatataaaattagttaggtatggtggtttgtgtttatagttttagttattagggaggttaaggtaggaggattatttgagtttaggaggttaaggttgtagtgagttatgattatattattgtattttagtttgggtgatatagtaagatttgttttaaaaaaaaaaaaaaaaattttgtaatttgggaatgggagaaaaatattttttggtttattttttttttattttatcggtggagaaattgaagtttagagagggagtggatatggatggtggttatataggtaggcggggtttttagtttttgttttagggttgagtaattttaattgattgttttcgtaattaggttttttgtaagaggttggaagttgtttttttttgtttttgtttaaagttttgttatttagtgttttgtttaggaaatggatatatacggtaggaagtttgggttttttggttttaggaatggatttttaggatattgttagtgtcgggtttttttagggttttttagttggttttgggaagtttgttttattgttttaggaggggacgatcgtattagaattgatttattttttttttatagttaagatgttttt

SEQ ID NO: 2089 - DNA, 2301 bp, Artificial Sequence
  chemically treated genomic DNA (Homo sapiens)
gatagtttttagtagattttgatgttggtttgagagtttttggagtaggtggtttataagttgtggaatagagattaagtatggtatattaattgtgtgtttagtttcgagttaattgttatatgtttttatagtgatttaataaggtatgtgtgaagggtttatttttatatataattagtgtgagtttttattgtttttattttaggtaattgttatattatttttttgagatgggttttagtttttttagttattaatgaataaagaaaagtgttaagaagagaggtggtttgttgagaattatatggttaggggttaattttaaagtagtgagttttcgttttagtatattttgtttttattttttgatttagttttgtagttgaatggcgttttttaatttttttaattttagtttttttatttgtgaaatggaggagttggattattgggttgggagtttttgatattatgtgtgattttgtatgatttttttttttttttgtattttagtttttttatttgtaaaagaagttgttagtattttattttaatgttatttataaacgttgttttaaaataaaatttttggtgagggaaggttttaagtttagttttttggaaataggttttgagttagagttttgtttgcgggaggtttattgggggagagtttttaggaatatcgtggtaggggtgagggaagtaggattacgtggagggagaagttgaattgtgaagtttttttagtaggggttttagttgtttttatagggaattttggagttgggatgttttaaatcgagtaaggggttaggtttttgaatttatgtatttattagatattggatatgggtttttgtttttttattcgtttaaaggtatgacgtggggtgaggtagttgattttggttgagggttgttagtagttatagggttaaaatcgttttgggtggtatgatttattatataaaatttgttaaaaattcgggtcgattttagttttggaaataatagtaggtaagacgtggtttgagtttgggtttatttagttgggtttggtttcgtttcgagggtttgtcgtttgttgtgattatagtaggattagtgttttagattttgtttaaagtttggcggttatcgtttgtttcgtagtttatttttcgtagtttttcgaggttttagcgattatgttattgaaaatttcgtttttattttgttaatttcgtagtaaattataggtttggggaggcgtgggttttttttttaaataagatttaattttatttagttgtttttatttttattttatatacgggtttttttttttttattatttcgggttcgggatttatggtttttttttgtaggtagttggtaattatggtaagttttttagggaggttttaggttggagtttttttagttttagattttagtacggtcggtcgtttttttttaggatgggagaggggagaggttagagatggtaggaatgggttttaggggttaaggtcgagaggttatagtaattttagtaattatgagaattttaatattattatatttgatttttataataattattattttttttattatatagatgggtaaattggggttagggagtatgaggttattgttaaggttataattaaggaagtagttgattttggggttgaggtgtttaagtattttggtatattttttttttttttagttgttgtttttggatgtttaaattttttttagattttagtttttgtttatatttttttagtgatggggaaattatttttttttggtaggtttgttatttttttaacgattagatatagttgttaaataattgattaggttttgtgattttttagaagggttattttgatattgattgttttttgtgatttggttgttaatttttttttgtaaattgattttttatggtttgttattatagtaggttgtttggggtttttttgttgtttagtgtttcgttttgttttaggttttttttatttatttttattttgttttaattattagttttgtttttatttttattatagaatattaaagttggaaatttatgattttttatttttttgatggagagaggtttagagaggggatgtatttttttagtgtatagggtgaattgatagtgtgggttttaaatttttcgttaataaaataataaatagtattgagtatagttaatttttgttaagtgtttgataattattattttaagtatttacgaatgtaatttatttattttttatataattttatgag

SEQ ID NO: 2090 - DNA, 2301 bp, Artificial Sequence
  chemically treated genomic DNA (Homo sapiens)
tttatagggttatgtgagaagtaaatggattatattcgtgaatgtttagaatggtggttattaagtatttgataaaagttagttatgtttagtattatttattattttattggcggaagatttgggatttatattgttaatttattttgtgtattagagaagtgtattttttttttgggtttttttttattaggaaaatgaggagttatggatttttagttttgatattttgtgataggaatggagatagggttggtaattggagtaggatgggaatgaataagaaagatttggggtagagcgggatattgagtagtaaggagattttaggtagtttgttgtggtggtaaattatgaaagattagtttgtagaagagagttagtagttagattatagagggtagttagtgttaaaataatttttttgaggggttatagggtttgattaattatttggtaattatgtttaatcgttagagagataataggtttgttagagaggagtgatttttttattattaggggaatgtaagtaggggttgagatttaagagagatttgaatatttaaaagtagtagttggggaaagaaggagtatgttagagtgtttaaatattttagttttagagttaattgtttttttggttgtgattttggtagtgattttatgttttttggttttagtttgtttatttatataatgggggaaatgatggttattgtgagggttagatgtggtagtgttgaagtttttatgattgttggggttattatgatttttcggttttggtttttgaagtttatttttgttatttttggtttttttttttttttattttaggagaaagcggtcggtcgtgttggagtttggggttaaggaggttttagtttgaagtttttttaaggagtttgttatggttattagttgtttgtaaagagaggttataaatttcgagttcggggtggtgggagggagggaattcgtgtgtggggtgggaatgggggtagttaagtggaattgaattttgtttaaggaggaggtttacgtttttttaggtttgtaatttattgcgaggttgataagatgaaagcggaatttttagtggtataatcgttgggatttcggggagttgcgggagatgagttgcgaggtaggcggtggtcgttaggttttaagtaagatttggggtattgattttgttgtgattatagtaagcgatagattttcggagcggggttaggtttagttggataagtttaggtttaggttacgttttgtttgttattgtttttagggttgaggtcggttcgagtttttagtaggttttatgtgatggattatattatttaggacggttttgattttgtagttgttgatagtttttagttaaagttagttgttttattttacgttatgtttttaggcgggtgaggggatagaaatttatgtttaatatttggtagatatatggatttaaaggtttggttttttgttcgatttggagtattttagttttagagttttttgtgggagtagttgaggtttttgttgagagagttttatagtttaatttttttttttacgtggttttgttttttttatttttgttacggtgtttttgagaatttttttttagtgaatttttcgtaggtaaagttttggtttaaggtttgtttttagggagttggatttagggtttttttttattaggagttttgttttaaagtagcgtttataagtagtattggagtaggatattggtaattttttttatagatggaaagattgaggtgtaggaagggaagaaaattatgtaaggttatatatggtgttaggggtttttagtttaatagtttaatttttttattttatagatggaaagattgaggttgggagagttgggagacgttatttagttgtagagttgagttagggaatggaagtagagtatgttggggcggaagtttattgttttggagttggtttttagttatgtggtttttagtaagttatttttttttttgatatttttttttgtttattggtaattggagagattaaagtttattttaggaggatggtgtgataattgtttaaaataagagtaataagagtttatattggttgtgtgtgggaatgagttttttatatatattttgttgaattattgtgaaaatatgtagtagttggttcggggttgggtatatagttagtgtattatgtttgatttttgttttataatttgtggattatttgttttagaggtttttaggttaatattagaatttgttagaagttatt

SEQ ID NO: 2091 - DNA, 2351 bp, Artificial Sequence
  chemically treated genomic DNA (Homo sapiens)
tataaaatgttttagggagttattgaatttttttaaggggtagtagataaagtataattttggagtagggagatttgttgtgttagtttaggagacgttggttgttgtaatagggaaattttgatattttagggattcggtttaataaagcgtattttttgtttatagaaagtttatttggtggtagggttgagggtgggtgggggttttttgttttataaagttatttaggtatttaggttgatagagattttatgtttttaatatgtggtttttaaggtttttttggattttataagttagatgcgataggatagagtatgaagggttggtgcggggtatttttgggagtggtgtatattattttttttgatttattggttggaatttagttttatagttatgtaattttaaggagagtgggaaattttgtgtttaggaagaagaggaaatggatttggagagttatattagtttttgttatatttggttttgaatttagattttgttatatattatttgtgggattttagtttttttaatatgtttgagttttagtttttttattaaagggtaaatggtgataattttttaggaggtatgatgttgggagggttttttgagttttttttttaatatttttatgtagtcgtggtttttatttgtagagttttagtttttatgtataattgtttatatatttgttaatttttttggtaataattttttttttggagggtaaattttattagaataggggttatattgtttttaattagagttgtagttttaataattggtttggcgtttagtatttagtaggtatttaataaatatatgtcggggaaatgaatggacggataagttaatatgaatatatatgtgttaagatttatttttttaaaaatttttttttaataaatattcgtatttttatgttttattatggtgtggtgagggggagggaggggggaagaagacgaggaggaggaggggtattttttttttatttttattggagtttaaattataaatagttttagttggaatttgattgtagatttttttagtaaagttagtatttttaggattttttattttggatggggatcgggagtgtttttttattaattatagttttttaattaatagttttgagtttggaataaaaggtgtttatcgggagaacgttagcgggttttgaattttggtcgtttgtttttatttggaggatttggcgttttggggagtaggtatggtatggtttagtgttgagtttggtaggggatggggtttggagggcgagtagttggtaggtcggttgtttgtttttattttggatatttttatatagagttgattcgatttcgagtaggttgttggtagttttgttttttttaggttgatgttgatgttattggtttggggtggggttggatagtgaagttgttacgttttttaggtggttttaatgtgtatagtttgaaaaatattgttttagggatggtaggtttggtagaaggtattgagatgggtttaaaggtttaattgagtgatttagagatggatatttatttaaggtatgtttaatgtttaggtagattaaaggtttatttttttttttttttttcgttggcggatgtagtaggaatggaatttgttttttttttttttattatgttttttggagatgattagaggagagttagattatagaagtaggattttagttaggggttgggtgggaggtttggaaggtaggaggaagtatatatagtttggtattggaagtagtggttttagggtttttgttgagttttaggtgtaatattaagttgatgtaaaagtcgttgtggttttttttattgtttttaatgataaaaatcgtaatttgataaaaggttaatatttagaatttataatgaatttaaataaatttataagaaaaaaataaataattttattaaaaagtgggtaaaggatatgaatagatattttttaaaagaagatatttatgtagttaaaaaatatatgaaaaaatgtttattattattggttattagagaaatgtaaattaaaattataatgagatattattttataatagttagaatggtaattattaaaaagttaggaaataataggtgttggagaggatgtggagaaataggaatatttttatattgttggtgggatcgtaaattagtttaattattgtggaagttagtgtggcgattttttagggatttagaattggaaatattatttgatttagttattttattattgggtatatatttaaaggattatgaattatgttgttataaagatatatgtatacgtatgtttat

SEQ ID NO: 2092 - DNA, 2351 bp, Artificial Sequence
  chemically treated genomic DNA (Homo sapiens)
ataaatatacgtgtgtatgtgtttttatagtagtatgatttatagttttttgggtatatatttagtaatgggatggttgggttaaatggtatttttagttttagatttttgaggaatcgttatattgatttttataatggttgaattagtttacggttttattaatagtgtaaaagtgtttttatttttttatattttttttagtatttgttgttttttgattttttaatgattgttattttaattgttgtgagatggtattttattgtggttttgatttgtatttttttgatggttagtgatggtgagtatttttttatgtgttttttggttgtataaatgtttttttttgagaagtgtttgtttatgttttttgtttattttttgatggggttgtttgttttttttttgtaaatttgtttgagtttattgtagattttggatattagttttttgttagattgcggtttttattattgaaagtaataggaaaaattataacgatttttgtattaatttgatattatatttggggtttagtaggagttttagggttattgtttttagtgttaagttgtgtgtgtttttttttgttttttaagttttttatttagtttttggttgaagttttgtttttgtggtttggtttttttttgattatttttaggaggtatgatgggagaaggaaaggtaggttttatttttgttgtattcgttaacggggagaagaggagggagtgggtttttgatttgtttgggtattaggtatgttttgggtaagtgtttatttttgggttatttagttaggtttttggatttattttagtgttttttgttaagtttgttatttttggagtagtgttttttaaattgtgtatattagagttatttggggaacgtgataattttattgtttagttttattttagattaatgatattagtattagtttgaggaggatagagttgttagtaatttgttcgaagtcgagttagttttgtgtggagatgtttaaggtggagataggtagtcggtttgttagttgttcgttttttaaattttattttttgttaggtttagtattgagttatgttatgtttgttttttaaggcgttaggttttttaaataaaaataggcggttagagtttagggttcgttggcgttttttcggtaagtattttttgttttaggtttagagttgttaattaaagagttgtgattaatgaggaagtattttcggtttttatttaggatgagaggttttggggatgttgattttgttggaggaatttgtagttagattttaattggagttatttatagtttgagttttagtaggggtgggagaaaggtgttttttttttttttcgtttttttttttttttttttttttttattatattatgatggaatatagaggtgcgaatatttattgaggaagaatttttaaaggagtaaattttagtatatatgtgtttatattaatttattcgtttatttattttttcgatatgtatttattgaatgtttattaagtgttgggcgttaggttagttgttagggttgtagttttgattgagagtagtgtggtttttattttggtggagtttgttttttaggagaggagttattattaaggaagttgataagtatgtggataattgtatatagaggttggagttttgtaggtaagaattacgattgtatgggagtgttggagaaaaaatttaagaaatttttttaatattatattttttaggagattattattatttgttttttaatgaggaaattgaggtttagatatgttaaggaagttaaggttttataaatagtgtgtggtaaggtttagatttaaaattaagtgtggtagagattgatgtggttttttaaatttatttttttttttttttaggtataaaattttttattttttttgagattatatagttatgaggttgagttttagttagtgaattaagaggaataatgtgtattatttttaagggtgtttcgtattagttttttatgttttgttttgtcgtatttagtttatgaaatttagagggattttggaagttatatgttgaaggtatagagtttttgttagtttggatgtttgaatggttttgtggaatagaaaatttttatttatttttaattttgttattaagtagattttttgtaagtaagaaatacgttttgttgaatcgagtttttgggatgttagagtttttttgttatagtagttagcgttttttaaattaatatagtagatttttttgttttaaggttatgttttatttattgttttttaggaagatttaatgattttttaaaatattttata

SEQ ID NO: 2093 - DNA, 2440 bp, Artificial Sequence
  chemically treated genomic DNA (Homo sapiens)
attgtataaatgttattgtgtttattgtatgttagatattttttgagtattggaaatacgttagtgaaggaggcggataggagtatgcgtttagttaggatgatagataatagaggaattattaattttaatggtgataaatgtattttatatattggatttttatgtaatatttaattagaagataaagtttttttattgaaaaataattagtaggtttttaggttagtatattttgtgggttatgaagttagtagttaagagtggtatttggaattttgtttttgtggtttatttagggtgggagagtgtttgtgaggtttagttattttgttagaatggaagttttattattcgttgatgagtgttagatagtgcgttagtttattttaaagttgttaaaatatgtatttatttgggtttgttttgataaatagataagaatttgtgttttttgcgagtttattagaatttagttattataattatttgttatatgttttttaattttatgggtaattttagggaggtggttgatttagatgaaagaaggttttttagtaattgtttagggtatttggaagaatatttaagttttttattatgatttatgggtttgtgttgatttcggttttttttttttgtttatttttattttgttttatggttttttatgttgtagatgttaattttaggttttatttgaattatttttagttgtaaattaggaaggtattaattggtgtatgttttgtaagtgttgttagaattagagttattgggttggttgataggagtttagagggtagtttttttttttttttgagtttgtttttttagttattttttttaaaagttgttgggttgatgtttgtattttggttggttttgatgttagttttgacggggttattttggaatttgtttgtataggttgtcgagggcgtgagaatttaagtagataatttttagttttattttttttgttgtgttaggttgttagtgttagttgaggaggtttttttttgtttttgtttgttttttttgattgttatgtaatgttcggtagtaggaggtaaatttttttttaatttttaggttcgttatagcgtatgaattttatcgtggggagttatagtgattgagtttagtagttaggttttatgttgagtgttataaattaggtttattattagttttttttggtagatgttatagttaagaatttgtttattgtttgcgagatttagtcgtttttgtatattgttaaattagggttgatagatttatcggggatttaggggatttttatgatattttggttgggtgttgttaggaattttattttgagagagtaggaggtgatatagtttttggtaaggtattttagatttgagattttatagtttgatgtacggggagtagaattagggtatgattatttgtaggttatttggattttttggtatggtggttttttgtgtgtttggttgtatacgtaagaatttttaggggatttgttaaaaaatatatattttttaggtttatttttagagattttgatttggtaagtgttttttgggatatggaaattagtattttttattagattttaggtgattttgatgtaggtggtttttggattattttttgagaaatgttgttttgggattagttgtatttttgaagtgatgtttgtaaaatgaatgtttataaattgtgggttttttttttttatttttttttattatttggttgaagatgtgtttgtttggggaagaagatgtgggttttaagaattaatggtaattaaattgaagaataagataaatttttgattatgatatatttaaagggtaataataatgttaatagtaaggggaaaagtttcgtagtaggatgttttgttgatatttaacgtgttatagggggagttttatttttgttttttattggttttgtttgtatgattaaggttgttatatgttttggttattttgggttagtttaagtttatgtaggttgttttagtgtaatttttaatagtttttttttcgattttcgaaagttttagtttggatgatagttgttattttgttaataatttataggattgttttttttaagatttttattttttttttaaagggatttgttttatagttgtttttgaaggattttgttagattgattttagtagtggattttatattaaagtttattttgattttgggttgggatgaatggtaaaaggaattttttgattaggtaatttttttattttttttaggaaatttcggtggggaaaaggaaggttttatgatttgaatagaagaaatagaatttggtggttagggaaagttttttttgggggtttattttttttgtgatttgaatagaagaaatagaatttggtggttagggaaaattttttttgggg

SEQ ID NO: 2094 - DNA, 2440 bp, Artificial Sequence
  chemically treated genomic DNA (Homo sapiens)
ttttagggaaggttttttttggttattaaattttgttttttttgtttaggttataggaagggtggatttttagggaaggttttttttggttattaaattttgttttttttgtttaggttataggattttttttttttttatcgggattttttggaaagagtagggggattatttggttaaagagttttttttattatttattttagtttagagttagggtgaattttagtgtgaaatttattattgggattagtttgataaaattttttagagataattatagggtagatttttttggaagaaaagtggaggttttaagggaagtaattttatgggttattgatagagtaataattgttatttagattgggattttcgagagtcgaagggggaattattagaagttgtattgggataatttgtataaatttggattgatttaggataattaggatatatgataattttggttatatagatagagttaatgagaaataaggatagagttttttttgtagtacgttaagtattagtaaaatattttattacgggatttttttttttgttattagtattattattgttttttaaatatgttatagttaaagatttgttttattttttagtttgattgttattgatttttgaagtttatatttttttttttaggtaaatatatttttagttaaatgatagaaggaaatggaaaaaaaagatttataatttataggtatttattttataggtattattttagggatatagttggttttaaagtagtattttttaaagggtggtttaggaattatttgtattagaattatttgggatttagtaaaaaatgttaatttttatgttttaaggaatatttattaaattagaatttttggggatggatttgggagatgtatattttttaataagttttttagaggtttttacgtgtatagttaggtatataagaggttattatattaggaaatttaggtagtttgtaggtgattatgttttgattttgtttttcgtatattaggttgtgagattttaggtttgagatgttttgttaagggttgtgttattttttgtttttttagaataagatttttggtaatatttagttagagtgttatgaagattttttaaattttcggtggatttgttagttttggtttaatagtatgtagaggcggttgggtttcgtaagtagtgggtaggtttttggttatggtatttgttaggagaagttggtaataggtttgatttatgatatttagtatgggatttggttgttgagtttaattattgtggttttttacggtggggtttatgcgttgtaacgggtttggaaattggagaggaatttattttttgttgtcgaatattatataataattaagggaaataagtagaggtaggagggggtttttttagttggtattggtagtttggtatagtaaaggaggtaggattgggagttgtttgtttgggtttttacgttttcgatagtttgtgtaagtaggttttagggtggtttcgttagagttggtattagagttagttaagatataagtattagtttagtaatttttagaagggatggttggggagataggtttagaggaggaaaagggttgttttttaaatttttgttagttagtttagtagttttaattttaatagtatttatagaatatgtattaattaatatttttttgatttgtaattgggaataatttaaataggatttgagattgatatttgtaatatgagaggttatggaataaaatgaagatgggtagggagaagagatcgagattagtataggtttataggttatggtggggagtttggatatttttttaagtgttttggatagttgttgaaggatttttttttatttagattagttatttttttagaattgtttatagggttaaggaatatgtgatagatgattatgataattgagttttgatggattcgtaaggaatataagtttttatttatttattaaagtagatttaggtaggtgtatattttggtaattttgagatgaattgacgtattgtttaatatttattagcgggtgatgaaatttttattttgataaggtggttgggttttatagatatttttttattttaaatgaattataaagataagattttaagtattatttttagttgttgattttatgatttataaaatgtgttggtttagaaatttattaattattttttagtaaaagaattttattttttgattaaatattatatagaggtttaatgtatgaaatgtatttattattattgaaattaatgatttttttgttgtttgttattttgattagacgtatatttttgttcgttttttttattagcgtatttttagtatttaaagagtatttggtatgtagtggatatagtagtatttgtgtaat

SEQ ID NO: 2095 - DNA, 2476 bp, Artificial Sequence
  chemically treated genomic DNA (Homo sapiens)
ttaatttaaatttttattaagatggaaaatattattgttattttaatgcgtttttttatgtttttttttagtgaaattttaattttattgattttagaggtaattattgttttgatgttttttaatatcgatttgtttttttttttttaaaattgtatataaatggaattatagaatatgtattttttttttgtaaaattttttttatttaatatagtatttttgagatttttttaagttttagtatatattaatagattattttttttattgttgagtagtgttttattgtatggatatattatagtttgtttatttgtttttttgttgatgtatttttaggttattttttatttttggttattatagataaagagattatgagtattttgtgatattttgttatatttatttattttgttttttggttattatgaataaagaggttatgagtattatattatatattagtatatttttttattttatgtaaatatttaggagtggaatgtgggttatagggtaggtataaatttatttttataaaaagttgttggatttttttttaatataggtgtagaaagagtttgttttttttagtaatattaattagatagtatgtgaatttggtataaagtaagtgtttaataaatatttgttaaattaatatatagagaaaataaatagaaatatagtgattgttttaatttttttttattgtttattagtgaagtgtgattgtttacgaattatttaagttttatgagtttttaatatttttttatgtgggaataataaaatgtgttttagatgtttgaaaaggttagtgttgaagggttaggggtatggggggagattttaggaggtgagggatattatttatttaatataagcgtgtttttttttttttttttgatttttttagtttgtaagatttcggtttgtagttgttagggaatatgttaaagtttaggtttaggaggggttagggtaggtgaaaggggaagaggtatttggattaattattggttgtttttaaatgtttaaagttggtatttatatatttgattttttttatagttttttttttttagatttaacgtttaggtttttttgattttaaaattgggttatttgaatgttaaattttcgataattttttaatagaggtgtttattaatttgtgttaaattagagtttagcgtttttggaaatatatgtgatatttatatgaatattaaatgtttttattaggtatagtatttatatgatgaatattaaatgtagagtttaacgtagggatatagatttcgtttcgaggatttgttaatatatttttgcgtttttttagcggtatcggttagttttgtttgttgtttatttttaggtgatgagatgtggtaattgtggtattggttgaaataaataaatggtattttaattattaagtttagagatggagtagtaaaggaggttatagttgattatttaggagttagtaaaaggatgtttatttagtatgtaagacgatttttaaatattttataaaaggcgataattttttttgattaaagaatatattatttataagtgattttaatgttttttttttttttttttttattgttatttttttgttttttatttttattgtatgttgtagtatttgtttagtgatgaagtttttcgtaataaataatttataaagtaatttataagtatattatttttagtaataagataagatttggaagaaagtgttttattgatatatatatatatatatatatacgttttttggtttataagtagtaagttattagaatattaataattaaggtttatgggtttggggtgaagggtgttataagttatagtgttggagtttttatatataagttatgtaaagtgtttgaagtgtatttgtataataaataagagaaaatttattaaaaatagtttttttttttaatttttgtatatagttgttatggttttgtttatatggcgtgatattaagtgaagataatttttttttaatggttaattttttttgagtatatttattgagttaggtttagtgttaagagtttttaataaattgttttattttattttttttatttttatgagatatgttttattagtatttttgttattggataaagtaatagaggttgttttttagtttttaatatttagtttttgaatttttaatttagttaaagttatttatttaagtatttatttaatgttaatattttataggtatttgataagtatttgttattttttattttgggagttaggatgtatagatagatgatgtatttatagtagtattgtttaatagaaatataatgtaaattataaaggtaagttgtatataaaattttaattttttttttttaaaaaaaattagttttttggttaaattaaatttaattaaaaatttggttttggtttgttgtatagg

SEQ ID NO: 2096 - DNA, 2476 bp, Artificial Sequence
  chemically treated genomic DNA (Homo sapiens)
tttgtgtaatagattaaaattaaatttttggttaaatttaatttaattaaaaaattaattttttttaaaaaaggaaagttgaaattttatatgtagtttgtttttgtgatttatattgtatttttattaggtagtattgttatagatgtattatttgtttatgtattttagtttttagaataaagaatgatagatgtttattaaatgtttgtaggatattagtattgaatgaatatttgagtgagtgattttaattggattgggaatttaaagattgaatgttgaagattgggaggtagtttttgttattttgtttagtaataggaatattaataaaatatattttatagagatagggaagataaaataagataatttattgagaatttttaatattgggtttggtttaatggatgtatttaagagaagttagttattaagggaaaattgtttttatttagtattacgttatgtggataaagttatggtagttgtgtataaggattaagagaaaaggttgtttttagtgagtttttttttatttattatgtaaatatattttagatattttatatggtttatgtataagggttttagtattatggtttataatattttttattttaagtttatggattttagttattggtgttttgatagtttgttatttataagttaaggggcgtgtgtgtgtgtgtgtgtgtgtattagtaaaatatttttttttaggttttattttattgttaagaataatgtatttgtaaattgttttataaattatttattacgaggggttttattattgaataagtgttataatatatagtgaaaatggggggtaggaggatggtagtgaaggagggagagaagaaggtattggaattatttataaataatatattttttggttaaagaaagttatcgttttttatgaagtgtttggaagtcgttttgtatattaagtgggtatttttttgttgatttttgagtgattagttatagttttttttgttgttttatttttgaatttggtgattaggatgttatttatttattttagttaatgttataattgttatattttattatttggaaataaatagtaaatagggttgatcggtatcgttgaggaaacgtaaagatgtgttggtaagttttcgaagcgaaatttgtgtttttgcgttgggttttgtatttggtatttattatgtaagtgttgtgtttaatgaaggtatttggtatttatgtgggtgttatatgtatttttagggacgttgggttttaatttagtataggttaatggatatttttattaaagggttatcgaaagtttgatatttaaataatttagttttaaaattagagaaatttagacgttaaatttgaaggagagaaattgtgagagaagttaagtatataaatgttaattttagatatttgagagtaattaatggttgatttaagtgttttttttttttttatttattttgattttttttgggtttaggttttggtatattttttgatagttgtaggtcgaaattttgtagattggggaggttagggagagaaggaagggtacgtttgtattaaatgaatggtgttttttattttttaaaatttttttttatgtttttggttttttagtattaatttttttaggtatttaaggtatattttattatttttatataaaaggatattgaaggtttatggaatttaaatgattcgtaaatagttatattttattagtaaatagtaggaaaggattagaatagttattatatttttatttattttttttgtgtattaatttaataaatatttattaagtatttattttgtgttaaatttatatattatttggttgatgttattaaagaaaatagattttttttatatttatgttgaagaaaggtttagtagttttttataaaaataagtttatatttattttatgatttatattttatttttaggtatttatataagataaaagaatatattaatatgtaatataatgtttatggtttttttatttatggtagttaaaaaataagataaatgaatgtaatagaatgttatagaatgtttataatttttttatttataatagttaaaaatagaaaatagtttagggatgtattaatagaggaataaataaataaattgtggtatatttatataatggaatattatttagtaataaaaggaatgatttattgatatatgttgagatttggaagaattttaaaaatattatgttgagtgaaagaagttttataaaaaaggaatgtatgttttataattttatttatatataattttagaaaaggaaaaataaatcgatgttgaaaaatattaaaatagtagttgtttttggggttagtggagttggagttttattaagaaagggtataagaaaacgtattggagtgataataatgttttttattttgataggggtttgggttag

SEQ ID NO: 2097 - DNA, 2497 bp, Artificial Sequence
  chemically treated genomic DNA (Homo sapiens)
tttggtagaagtgtaggtattttgtaattttagtagtttttattttattcgttgtttaggtttgttagttaattggtatgttttagtagggcgaattggttttgtatgtttgaagtttttttgtaataattggtaaataatttttgttttgagttttcgttaaattttttgttaatatttttgtttttttagtttttttttaggatttttagattttttattatttaggaatttaaaagaaaatatttggtaaagttagattttgtaagagttgattttaaatgtataaatgattttagtttttatttgttagtgttcgggttttattagttgttggaattttgtgaaatattcgtattatttattatatttaaaggaagtaatttaattttttaattgggtttttttagttttttttattagatttgaggtaaggggattatattttttatttatttttttttggaatggtagtaggaaaaatattttaatatatttttttaaagaaattttttttttaatttagtattttaatttttttatattttttatgtggtttttgaattttatatattgagggttcgtattaaatgtttatttattgaaattattgttgataattaatttttatatattatatatatatatatatattatatatatatatatatttaaatgtgtttggttataagaattttttatgtagtagattattgaattatagattttttagtattggtatttggaaaaggtttaaatttgaaggtagagaaaattaatagtttaaggtttttaatttaaagatagattttattaattttaggttggttgttttgtatagttttgtaatgttttttttatatgtgagtttggttcgtttgttttttttgtttttatatttttagttttttggttggtttttttagggataatttttagtgtttgtttgatttgtgttataaagtagatatgaatagttaggttagagagttatgtattaattttttgggtggttaattttttttttttatattttagtgttattttaagggaaaagaaatgtaggatatggaataaatagagggaaatttgtttgatttgttgttaatgtgttagtgttttgttttgtgggtttaatttgtagaaggtaggtttttgttttgttattttttggtatttaatagggtttgtttttagtgatttagtcgggtttttttagatagaaaatagttatttagtgttttttatattattaagaaaatgagattattttttgaggagattagtagttttcggttgttgtcgaaagggcgttttgtttgtttgtttggttgaaaggtattacgtagtttaggtttgtttaaaattagtttttttataaattatttgtataatgaagtgtttgtttttgttttttgatatatttgtgtttttgtttatttttaatgatgatatggttttttttgtttttatttggttttttattttttatatttttaagtattaatttttgtggtaaaagtataaaatttaagaaattgtagggaagaaagagttttttttttattagtatataaatgtagtggggaaattgagttagttttgggggtatttttggaggaaattgttttttttttaattttgttagattataatattttgaaattgtattttttgaaagagtaagagggtgatggtaatattttgtaatttgataggggtttgtgttatatacgtgtatgtgtttgtaaaatttaataaatgtatatgtattttatatgtaagtttttatataaagaaaaaagtaaattaataatgaattttaataatatttatatagaattatttaagaagaagtatattagtttttttaatttattttgaaatgtatttaaaattgtgataaattaattgatggatagatggatagacgtgataaaataagtagaaaaaaaatgttaaaggtaaaatatagatggtaggtataagtttgttttttgtaaaattattttaattttgttgtaagtttgaatatttttataataaattattagaataaatgtttttttggtgatttatattgaatttttggaaatattagagagttatagtttttaaaattttgtattttatttaaattttatttttaaaaatttatatttatatagagttaaattgtaataatttatgataataaggaaaatagtatttttgatttagtaaaaagtataaaatatagaatattttaagagagagggaaattttattagttagatatataagaattttttttaatttaaatggtatgtaattagaagtttttaatgtagttttttaatttaatatataaaatataaatgaagaatagtaaagggtatataatgattaaaatttatataggatgaatttaaatgggtttggggtgagaaagtttaattttagtgaatttatagttattgttgaaataaataaataaataaacgaatatttagaaaag

SEQ ID NO: 2098 - DNA, 2497 bp, Artificial Sequence
  chemically treated genomic DNA (Homo sapiens)
tttttttgggtattcgtttgtttgtttgtttgttttaatagtaattgtgggtttattaaggttggatttttttattttaggtttatttgaatttattttatgtgggttttggttattgtatgttttttattgttttttatttgtgttttatatattggattagagagttgtattaagaatttttagttatatgttatttaaattgaagaaggtttttatgtgtttaattaataaaattttttttttttttagaatattttgtattttgtattttttattgggttaaggatattgttttttttgttgttataaattattgtaatttaattttatataaatatagatttttaaaaataaaatttgggtggaatataggattttagaagttgtggttttttgatgtttttaaggatttagtgtgggttattaagagagtatttattttaataatttattgtaaaaatatttaaatttgtagtaaagttgaagtaattttgtagggaatagatttgtatttattatttatattttgtttttaatattttttttttatttgttttattacgtttgtttatttatttattaattaatttattatagttttggatgtattttaaagtaaattgagaaaattagtatatttttttttaaatagttttgtataaatattattagagtttattattagtttatttttttttttatgtaaaaatttatatgtaaggtatatatatatttattgagttttgtaaatatatatacgtgtgtaatatagatttttattaagttatagaatattgttattatttttttatttttttaaaaagtataattttaggatattataatttgataaagttagaaaggaggtaattttttttagaaatatttttaaggttaatttagtttttttattatatttatgtgttggtagaaaaggaatttttttttttttgtagttttttagattttgtatttttgttatagaagttagtgtttgggagtgtggagagtaaagagttaaatggaaatagaaaaagttatgttattattaaaaataaatagagatataaatatgttagagggtagaggtagatattttattgtgtaagtgatttatgaggaagttaattttaaataagtttgggttgcgtggtgttttttagttaaataaataggtaaagcgttttttcgatagtagtcgagagttgttgatttttttaaggaataattttatttttttggtggtgtaaaaggtattaagtggttgttttttgtttaaggaaattcggttgagttattgaaggtaggttttgttaaatgttagagagtaataagataaagatttgttttttataagttaaatttataaaataaaatattgatatattaataataaattaagtaggtttttttttgtttattttatgttttatatttttttttttttaaaatggtattaggatatgagagagagggattggttatttaggaaattagtatatggttttttggtttggttatttatgtttgttttgtaatatagattaggtaggtattgagagttatttttgggggagttagttaaggaattgagaatgtagaaataggagaggtaagcgggttaggtttatatgtggaggagatattgtaaagttgtataaggtagttagtttaggattagtagaatttatttttagattggaggttttaggttattagttttttttgtttttaggtttgagttttttttaaatgttaatgttgaaaaatttgtagtttaatagtttgttgtatgggaaatttttatagttaagtatatttaggtgtgtgtgtgtgtgtggtgtgtgtgtgtgtgtgtggtgtgtagggattgattgttagtagtaattttagtgaatgaatatttaatacggatttttaatatataaggtttaaaagttatatgaaaggtataaaaagattgaggtgttagattaaagagagaatttttttgggaaaatgtgttggagtattttttttattgttattttaagaaggggtgggtaggggatgtggtttttttgttttaagtttagtgagagaggttggaaaaatttaattagggagttagattgttttttttggatgtaatgaatagtgcggatgttttatagggttttaataattagtgaggttcgagtattgataaatgagaattgaaattatttgtgtatttggagttagtttttgtagggtttggttttgttaagtatttttttttaggtttttgaatagtgggaggtttggaggttttgggaagaggttgaggaggtaagggtattggtagaggatttgacgggagtttagagtagaagttatttattaattgttataagaggattttaaatatgtaaagttagttcgttttattagggtatattagttaattagtagatttgaatagcggatggagtaggggttgttggggttatagagtatttgtatttttgttaag

SEQ ID NO: 2099 - DNA, 2396 bp, Artificial Sequence
  chemically treated genomic DNA (Homo sapiens)
tttttttttttggttttattttggttttttttttattatttaaattttttattttgaataaagtagtaaaatgtatttttttttttatgcggtttagtataaggataggtttggatttttataatgaaagtttatgtttttaataagtgtttatagttagtgttttttgtatttatttaattgttgttttttgaaagttattattttttattttttgtgattaatgtgtattgggagttaaatttatacgtgtgtgtaggattttatttttaaagatatgttttattatcgtttattgatagggtttttaattttaagttaggatttacgtatgttagaggttgtggcgagttacgagtattgcgtttatttatgtatgggtataaatttttatggttttttttttttgtatagtttgagatatagggtggatacgtagtaatttaggtttttatagcgggttttagatttatttttgttaggatatagatattgtagagagatttttttattgtttattttttttattagtttgagttttttatttttagattttttttgtagttttttaatattttgaataatattatgtggtagatatggtttattttattttatagatgtggaaattgaggttaaatgtttatttaaaattatatagagattaaatgttttaattataataggatttaagtttttttggtttttaagttttatgttttttttataattttttagttaatatatttagtttaaataaagaatagattaattgattaatttaaatttttaaatttatttttgtattagtgttttggaggattaaggttatatttatagagtatagagtaaaaaaggagaattagtaaatatttagagtatttggtaagtattttagatatttaagttagaagatttaggagtgaaagagaatttttattattataattgttattataattgttaaaataaataaaattaattaaggatatgtagttgtatttgtatttaagtaagattgtagtagtttttaattaattaatatgtttattagtatgaagtaattgtgttttgtttgtgatcggtattttatttttatttattaaatatttattgggtattagtgatgtgttaagttttgtgttggaattcgagatgatatagatgattgacgtggttttcgtttttgggaagtatgtagtttaggaaagttatagaatgtagtttttaagaagaagttattggagtaagtagatgaaggttgggaaattatgtaagtttagggtagattagttaaattgtaatgggaatgtagttagttatttattttgaggttttaaagcggaataaaagggattgtaatagtttagattttttttttttttttttagggataggagtagttattatttaaatttttttgtgatgattagttgttttagttagttaaggttgttataataaattattattgattggatgatttaaataaaaatatttatattttatagttttggaaattgggaagtttaagattaaggtattggtagatttggtgtttgataagggtagttttttggtttgtagatggttgttttttagttgtgtttttatatggttagagtatttttaagtttttttataggtattaattatattttttaaaggttttattttttaatagaatgatattgggggttagattttaatatatgatatttgggaggacgtaaatttttagtttatagtatgagtagtttttatgtataggaggttaattatgatattttatgtgtttgttatttgagttttatattttttttttatgttagagtgggttattttatgttattttatttatttttgatgtttttttttagttgaatagaattttttttttatttaaggaatacgtattgttttgttaaataagggaggtttttttatttagggtaaagtataatagtattttagttaggatttgggggatttaggtatggattatttggaggttagatgggttgatagttaattggtattagatattgttattttttattaatagtttaggtatttgggagtttgtttattttagggtaagtttattgatttattttttaatttatagaaatttgaatttaaaagattggtagtaatatgtgatgtttatatttaggaattttagttttggtgtattgggggtttttgtttgttttttggttttagaaggtattttaagggtttatgtaaattaagttttttatagttattttagagatgttagggtgttttagatgggtatattagtgatattatgttatttgatgtttggatttttttagataattgttttgttagcgaataatttattggatttagttattgagatattgggg

SEQ ID NO: 2100 - DNA, 2396 bp, Artificial Sequence
  chemically treated genomic DNA (Homo sapiens)
ttttagtgttttaatggttgaatttagtgaattattcgttagtaaagtagttgtttgggagggtttaagtattagatggtatggtgttattggtgtgtttatttggggtattttggtatttttggggtggttgtaaggaatttaatttgtatgagtttttgagatgttttttaggattaaaaggtaagtaggggtttttagtgtattaaaattaaaatttttgaatatgggtattatatgttattgttaattttttagatttaggtttttgtagattaaaaaataaattaatggatttgttttgaggtgggtaagtttttagatgtttgggttgttaatgggaagtgatagtgtttggtattagttggttgttagtttatttagtttttaaatgatttatgtttgagttttttaaattttagttaggatgttgttatattttgttttaagtgagaaagttttttttgtttgatagggtaatgcgtattttttgggtgggaaggggattttgtttaattaagggagagtattagggatgaataaggtagtataaagtgatttattttggtatggaggagagatgtgaggtttaaatggtaggtatatgaagtattatgattagttttttgtgtatgaagattgtttatgttatgggttgaaagtttgcgtttttttaaatattatatgttgaagtttagtttttagtgttattttattaagaggtggggtttttgggaggtgtgattagtgtttataagaagatttgagagtgttttagttatatgaagatataattagaggataattatttgtaaattaggagattgtttttattaaatattagatttattagtgttttgattttgaattttttagtttttagaattgtgagatataaatgtttttgtttaaattatttagttaatgatgatttgttatagtagttttagttgattaagatagttagttattatagaaagatttgaatggtggttatttttgtttttgaggagggaaaggggaaatttaagttgttgtagttttttttatttcgttttagggttttagagtgagtagttagttgtatttttattgtagtttggttggtttgttttaggtttgtatgattttttaatttttatttgtttgttttagtggtttttttttgggagttgtattttatgatttttttggattgtatgttttttaagggcggggattacgttagttatttgtgttatttcgagttttagtatagggtttggtatattattggtatttaataaatatttgatgaataaaaatgaggtgtcgattataggtaagatataattgttttatgttaatagatatgttgattggttaagaattgttatagttttgtttgggtgtagatatagttatatgtttttggttaattttatttgttttggtaattatgataataattatgataataagaatttttttttatttttaaattttttggtttgaatgtttaagatatttgttaaatgttttgggtatttgttagttttttttttttgttttgtattttgtggatatggttttgattttttagagtattggtgtagaagtgagtttgggagtttaaattagttagttaatttgttttttatttggattagatatattaattgggggattgtgagaagaatatgaaatttggggattaaagagatttgagttttattatgattaaggtatttagtttttgtgtaattttgagtaaatatttaattttagtttttatatttgtaaaatggaataaattatatttgttatatagtattgtttagaatattaaggaattataggaaagatttggagatagagagtttaggttgatgagggagatagataataaaaaaatttttttataatatttgtattttggtaggggtgagtttgaggttcgttgtaggagtttgaattattgcgtatttattttgtgttttagattgtgtaggggagagaggttatggaggtttatgtttatgtatgagtaaacgtaatgttcgtggttcgttatagtttttggtatgcgtgggttttggtttggggttgagagttttgttaatggacgatgatgaaatatgtttttggaagtagggttttgtatatacgtgtgaatttagtttttagtgtatattagttataggaaatagaaaatgatagtttttaggaggtaatagttaaatggatgtagagggtattggttgtggatatttgttagaaatatgaatttttattgtagggatttaaatttgtttttatattaaatcgtatgagaaggggggtatattttgttattttgtttagggtggaggatttaaatggtaagagaggggttaaggtgaggttaggaagggagg

SEQ ID NO: 2101 - DNA, 2391 bp, Artificial Sequence
  chemically treated genomic DNA (Homo sapiens)
taaaaaggtaatatataaaataattaagtatagtatgttagaggaaggtatttgttatagaaatagattatagtaagggagttagggagtattggggtggggagggtttattatttggataaggtagttaggaaaggtgtttgttaaagtgatattttaatagtgatttataggaagaaaggaagtaaattatgtagattatttgaaggaagagagttttaggaaaagggaatagtaagtttaaaggttttgaggtcggagtgtgtttggcgtgtttaaagaagagtaaggagattaatatggttagagtagtatgagaaggttagaaagagttaggtaatgtagagataggtaatgtagttagagagaggatattgtgagattatgtggggttttataaagttattgaaaagattttagtttttattttgagcgagatagggaagaattatagttttgagtagaatgttgttatttgattgatatttttataaagtattttgtgatttagttgagaatagattgtagagtagatggaggataaaggagaaagttaggaggttagagaggatagtgatgtgataatataggggagagacgtgggtggtatgagttttggtgatgaaggtggtgaaaagtgattggattttggatatagtttgaaagtgaagtttataggatttataggtatggttgtaaataatgtgaagtgttatagagaaaaagtatagggatattgtgtattattggtgagtagaggttgtttttttaagaaagcgattttggggttaaaatttgagatttaagtaggagttaatttgataaagattttatagattttttgtttagttatttgtagttttttgataatgagaggaggggagggaacggaatgggagaggaagaggttgtttttttttgggaaaggggaaaattttgttataaaaagttggaaatagtttaaagagttatgttttgttagatatgtatttgtaatttaaatagttttgtttttatgggtttgtttgttatagattagttagtgggtagattgtttcggttggaaatggagatttagataatgttagagtggataatggtgttcgaacgttgttaggcgttaattaggattcggtaatgattttgttgtgtagattgaagtgcgagtatttggagttattatttaaggtttgtttttgtaattagatgattgtataattttaatatgattaattttgtcggatgtgaattgtgtagttgtaattataaaataaggtggtatttttgtttttttgttgaatataaatattatatatgcgtaagttataattttataacggtcgtttttggtaagaaagagttttgttagttagaagatgtagttgaggggaaaaaatatatatatatgtaatataagtgtttaaagaggcggttataatgttaggtttcgttttgggaaatattgttttgcgggttttgtatttttttttttttttttttgtatatattaattttgaggttaggaagttgggaaatttggagtttatattgagttttttcgggataatatagttttgtattcgtatatgtattacgttgagagttatagggaattagtttgatatttattagtaattgtatattatatttcgtttattaagttttattgtttagtggggacgtgagttacgatttaggttttttagattcgagatttttgtagaaattttagttcgttttttaaggttcggtttgagggattatagggatatagtttttaaatgttttttttattttataggtttagggtgcgtcggaggggatgagacggatgaggggattaatgttgagaatgttaagattttttttttgattttggtttaatttgtagggggtatagaattttgagaaaggaaaaaaaatttagaggttaagagttgttttgttatgggtcgtagtttaattttgggaaaggagagagagagaaagagacggagatggggtgggaagaagggagtaaggagatatatttaagaatagcgtagtgtgatgggatgtttagagatgaaatttagtggttaaataagtgaatgtttaagattaggtgagagcgtgtgtgtgtgtgtgtgtgtgtgtgtgtgtgtgttagagaaaaagaaagagaggaagtgggagaaggagggggagagagagagagagagagtatttattaatagtatttgattaagattgtaattttatggttgtaattaatgataaagttaagtgtcgaaggtttagttttcgaggagatagattttgagatatagatttgaatataagtttatcggggagtgtttttgggtttatatttatagggaaaggtagtaggaatgggtagagggagagata

SEQ ID NO: 2102 - DNA, 2391 bp, Artificial Sequence
  chemically treated genomic DNA (Homo sapiens)
tgtttttttttttgtttatttttgttgtttttttttgtagatgtggatttaagagtatttttcgataaatttgtatttaaatttgtattttagggtttgttttttcgagaattaagttttcgatatttgattttgttattagttgtagttatgaaattatagttttggttagatgttattggtaaatatttttttttttttttttttttttttttttttttattttttttttttttttttttttgatatatatatatatatatatatatatatatatacgtttttatttaattttaggtatttatttatttggttattaggttttatttttggatattttattatattgcgttatttttaaatgtatttttttgtttttttttttttattttattttcgtttttttttttttttttttttttttaagattaagttacgatttataataaaataatttttaatttttaggttttttttttttttttagagttttgtgttttttgtaaattgggttagagttagaagagaaattttgatatttttagtattggtttttttattcgttttatttttttcgacgtattttgagtttgtgaggtggaaagggtatttgagggttgtgtttttgtagttttttaagtcgggttttggggggcgggttaagatttttgtaaggatttcgaatttgaagagtttaagtcgtagtttacgtttttattgaataatgaggtttgatgaacggggtgtgatgtgtaattgttgatgaatattaagttgattttttatgatttttaacgtggtgtatgtgcgagtgtaaagttgtgttgtttcgggagggtttaatatgagttttaagttttttaattttttggttttaaaattgatgtgtataaaggaaaaaaggagaagatgtaaaattcgtaaagtaatattttttaaggcgaagtttgatattatgatcgtttttttaagtatttgtattgtatatatatatattttttttttttaattgtattttttgattgataaagtttttttttgttaaaagcgatcgttataaaattatgatttgcgtatatataatgtttgtgtttaataagaaaatagaaatgttattttattttgtggttatagttgtataatttatattcggtaagattgattatattaaggttatgtaattatttaattgtagagataagttttgagtaataattttaaatgttcgtattttaatttgtatagtagagttattgtcgagttttgattagcgtttgatagcgttcgggtattattatttattttggtattgtttaaatttttatttttagtcgaagtaatttatttattaattgatttatgataaataggtttataagagtaaagttgtttgggttgtagatatatatttaataaaatatgattttttgggttgtttttagttttttgtagtaaagttttttttttttttaggagaaggtagttttttttttttttatttcgtttttttttttttttttattgttaggaggttgtagatgattagatagggaatttgtaaaatttttattaaattaatttttatttggattttagattttggttttaaggtcgtttttttagaaaagtagtttttatttattagtgatatatagtatttttgtgttttttttttgtaatattttatattgtttgtaattatgtttgtaagttttatgggttttatttttaaattatatttagaatttaattattttttattatttttattattagggtttatgttatttacgttttttttttgtattattatattattgttttttttggttttttagtttttttttttgttttttatttattttataatttatttttaattgagttataaagtattttgtaaaaatgttaattagataatagtattttatttaaaattgtaatttttttttgtttcgtttagagtaaaagttaaagtttttttaatggttttataaggttttatatgattttatagtattttttttttggttgtattgtttatttttgtattgtttagttttttttaatttttttatgttattttagttatgttagtttttttgtttttttttgaatacgttagatatatttcggttttagggtttttggatttgttgttttttttttttggagttttttttttttagataatttatatggtttgttttttttttttttatgggttattgttgaaatgttattttagtagatattttttttggttattttatttaaatggtaaattttttttattttagtattttttggtttttttattgtgatttgtttttatagtagatatttttttttaatatattgtatttagttattttgtgtattgtttttttg

SEQ ID NO: 2103 - DNA, 2470 bp, Artificial Sequence
  chemically treated genomic DNA (Homo sapiens)
aaattcggtgagttttttgattttattatttttatttttattatgttgttatttttatttttagaaattattataatttgtatattttatttagttagttgtgtattttataggttttgttgttgttgttttgtattgttttatattttttttttgtttttttttttttagaatgaatattttatgaggttaggaattgtttgttttttttatttttgtagttttagtattagtatagtatttgataataaaatttagtagataaaagtaaagagtttgggttaggttttttgggtttgaattttagagttggtgttatttaattgtagagagataatttggataatatagtgttttagtttttttttttgtaaatggggttaataatagtagcgattttatggttgggcgtagtggtttatatttgtaattttagtattttgggaggtcgagataggtggattatttgagttttagattagttggttaatatggtgaaattttatttttattaaaaatataaaaattagttaggtgtggtggtaagcgtatgtaattttagttattcgggaggttgaggtaggagaagtagtagaatttgtaaggcggaggttgtagtgagttaaaataacgttattgtatttcggtttgggtaataaaagtgaaattttgttttaaaaaaaaaaaagtagtaattttattaggaggattaaatggtattatgggtaaagtatttaagaatagtgttggaatataggaagtgttatataagggtttgttttatacgtagatataggtagatgtagttagagataaaatggtaggtgtttaagaaatatttgttaaattaatatgttaagtttaggaacgggataaagttttaattggggtagagttttagatagggataatgatatttttaagggtaagttttttgatttgaatagagaaaaatttggaaagtttggaagttagaggtagttgggaagggtagttgtaagtaaaggtttggtggggtggggtaggggttataagagattttttatggaatttttatttggaatagttagatcgagtattaatatatattgaatagttaaattatatattattgatttgttaaacgtatttgtatataaataagtatgattatttatggaggttcgagtagtggtatttttttttagtgttatgattatagatggatggttttagttagatacgaattagggacgttgttatttttgtcgtaaagttagcggttgatttaaaattatatttattggagtatgtaagtgtgatagtttagtggtgagtttgggataattagtttaaaagataagataaacgatttttaaaattggtattgtgacgaagattttattttattttttcgttatagttagtttagttttgatgttaaaaatatagtcgaagataattaattaggaaatgttaataggtaggattatgttttaattgtattttttagaggattttagaattttatatttaagttgattgtgtttttttttttttggtgattaggtaggagaggcggatttttagttagaagtagaggttgggtggggtgggtagataggtttagataaggtttttaaggttaggtaagtaggtggttttagttagtttttttcgagtttgaatcgagatggatttgttgggtgaagtacgttgattcgggtaaattatatttgttatgttaatttattttacgtgggagattagttatgagtttagaggttggtatcggttgtttttgatggattaagggatttagttgtttagatataatgttagagatttgttattgcgggggaaatacggtttgttaatgttttattttaattgttttaaattatatttgaagatgtatagtttaggaggttagttagtaaatattaaacgttattttgaggatttgtttggtttagagaggaatttgtagttttaggattggggttttatcgttttgttgatatagaagagagagttattgttttttggttttattatttgtttttttgtttttaaggaaggggtagagaatgttttgagatttttgacgtattttatttataggtttgagggttttttttttgagagttaagtttaatggatttagatagaaagaggggggtgggtttttggagtttgtttgaggtaattaaagaagaatttaaaaggaaggtagtatagtagaggaagttatggtagaagatgttttcgttttaatttttaaaatcgtatatgataaaggggattttgtagatatgattaaagatattgagatggggggagtgagtgagagtgattgtaatgttattgtaaggtttttagaagagggttagggagagagatgaaaatgttattagttagttggtattgaagatggtattgaaggtgtaggtgggttttagaagttggaaaaggtaagaaaataaagggt

SEQ ID NO: 2104 - DNA, 2470 bp, Artificial Sequence
  chemically treated genomic DNA (Homo sapiens)
attttttgtttttttgttttttttagtttttggagtttatttgtatttttagtgttatttttaatgttagttgattaatagtatttttatttttttttttggtttttttttaaggattttgtaatgatattgtaattatttttatttattttttttattttaatatttttaattatatttatagagttttttttgttatgtacggttttggggattaggacgaggatattttttgttatggttttttttgttgtgttgttttttttttagatttttttttgattgttttaaataaattttaaaggtttatttttttttttttgtttaggtttattagatttaatttttagagaaggaatttttaaatttatggataggatgcgttagaggttttagggtattttttattttttttttgggagtagggaggtaggtggtgaaattaaaaggtagtggtttttttttttgtattagtaaagcggtgaggttttagttttaggattgtagatttttttttaggttaagtagatttttaaggtaacgtttgatatttgttggttggttttttgggttgtgtatttttaagtgtaatttaggataattaaaataaagtattagtaagtcgtgtttttttcgtaatgataagtttttagtattgtgtttgagtagttgggttttttgatttattagaggtagtcgatgttagtttttgagtttatggttgattttttacgtggaatgaattaatatggtagatataatttattcgggttaacgtgttttatttagtagatttatttcggtttaggttcggggaaggttgattggagttatttgtttgtttggttttagagattttgtttgggtttgtttgtttattttatttagtttttgtttttagttaagaattcgttttttttgtttaattattagggggaggggaatataattaatttgggtgtaaaattttaaagttttttggaaaatgtaattggaatataattttgtttgttaatattttttagttaattattttcggttgtatttttggtattagggttgagttggttgtggcgggggggtagggtgggattttcgttataatattagttttaggagtcgtttattttgttttttagattaattattttaaatttattattaggttgttatatttatatgttttaataaatgtagttttaaattagtcgttgattttgcggtaggggtagtagcgtttttggttcgtgtttaattagggttatttatttgtaattatggtattgaggggaggtgttattgttcgggtttttatgaatgattatgtttatttatatgtaaatacgtttgataaattaataatgtatgatttagttgtttagtgtgtgttagtattcggtttggttattttaggtgggggttttatggagggttttttgtggtttttgttttattttattaggtttttgtttatagttgttttttttagttgtttttggtttttaagttttttaagtttttttttgtttagattaaggaatttatttttgggagtgttattgtttttatttgaggttttgttttagttaggattttgtttcgtttttagatttagtatattaatttggtaaatattttttgaatatttattattttatttttagttatatttatttatatttacgtataaaataaatttttatatagtattttttatgttttagtattgtttttgagtgttttatttatagtattatttaatttttttaatgagattgttatttttttttttttgagatagaattttatttttgttgtttaagtcggagtgtaatggcgttattttggtttattgtaattttcgttttgtaggttttattgttttttttgttttagtttttcgagtaattgggattatatgcgtttgttattatatttggttaatttttgtatttttagtagagatggggttttattatgttggttagttggtttggaatttaagtgatttatttgtttcggttttttaaagtgttgggattataggtgtgagttattgcgtttagttatgggatcgttattattattggttttatttatagaggggaaaattgagatattgtgttgtttaaattgtttttttatagttagatagtattagttttgggatttagatttaggaagtttggtttagattttttgtttttatttgttgggttttattgttaagtgttgtgttggtgttggagttatagaagtaaagaaggtaggtagtttttgattttatagagtgtttattttgggggaaaaagagtaagaagaaaatataaagtaatataaaataataataataaaatttataaagtatataattagttaaataaaatatataagttgtaataatttttaggaatgaaaatgatagtatgatgggaatgagaatggtggagttagaaaatttatcgggttt

SEQ ID NO: 2105 - DNA, 2493 bp, Artificial Sequence
  chemically treated genomic DNA (Homo sapiens)
agtttcgttttgttttttaggttggagtgcggtggtgtgattttggtttaatgtaattttcgtatttcgggtttaagtaatttttttgttttagttttttgagtagttgggattataggtacgtattattaggtttggtttttttttttttttttttttttttttttagtagagacggggtgttattatgttggtcgggttggtttcgaatttttgatttcgtgattcgttcgtttcggttttttaaagtgttgtgattataagtgtaagtttgatgtttttaagaaatagtaaagagatttgtttggtaaggttcgaagtgaggatggttgttcggaagagggttagtttggtaggttatagtaaggtttttagagtttattttaagataaaaagttattggagggttttaagtagaggattaatatgatttgaattttttaaaggattgtaaagagaaatataagtttttatttataaaataaagatgtattttttataatttagttataagttaaagaaaaaaagtatagaataaaagttgtgtagtatgatagtatttttgtaagaaaaaatacgtatatatgggaataaggttaaaaggtttaatattaaattgtgatttattatggtttgtgggattatggggttttttttgttttgttttgtttgtaatgtttttttttgttttttaagttttttgttttaaatatgaattattttggtaatttttaatgttatttttaaaaagaaaaaagtattttattatgagattttttttgtttgaaattttattttaatatgaaaaaaaaaaaaataaatttaaaattaaaaattaaaataatatggggaatatttttttttaaaaattattatattttttatgtaatgtttgtttgttatgaattattgtataaattaagtttcgtttaatgtattaaggttataaaattaatttggttaatatgttgattattatatagtggttttgttttttatagtaattttgatattatttttttaaggtagtaatagaagggttttttttatttattttttatgtgtttttgatattattttgcgtttttggatttttttattgtatgttttttagaaataaattaagttcgaataagttgttttagttaatgaagtgcgtttttggtttttttttcgtggtttagaattattcggtaaaatattaattgttttaggatgtatttttttttagttttgaaatattgtaatattaagttattataaataaagagtattgagataataatatataagaacgtgtataaatggaaattattgtaatttttttttaaattaaggacgtgtggacgttttatgaataaatatttaggatatttggataaatatatattatgtgtttatatagataaaaatagaaaggagtatttttttttattttatttttttattttaagttatataagtttttcgtagggtataagtttagggtaattattgtttagaaatgtaaattatgtaatttaaaatgatttaagtttttaaatattttttatttaagttttatattttatttattttttaattatttttaataggtttttttgaatgaaaattttaaattgggaaggtttaataagttttaaattttatttatacgttatttagggaattcgaggatttggggtttacgtgtagtgttttcgcgtgggtagataagggttttaagatttagggtgttattgtatttcgagtggttcgagttttggttttgtcgtttttattggtcgagttgacgttttttatatcgggggtatgggttgttatattttagtagagtgtaagggttttcgggcgtggacgtaggcggttttcgggtgtatacgcggaacgtatattcgggtatgtatttttatacggttaggcgggtttgcgcgaacgttttcgttttttttttattatttttttttgcgttttttacgatggtggtacgcggggttattttgatttttaggatttttggacgttcgtttttggagttcggggggtgatgatagatggcggagggcggggtttcggggggaaggggcggagttttttagtatgggggtgttggcggttgatagaaagattaggggtagtcggcgggagggggttgattgagattgcgggtcggtcgcgggttaggcgtggcgggaaggagttcgcgtagatatagggtttgataggtagagagagatatagatatcggggattgatagtcgcgggggtacgcggggtcggttggtcgtggcgggcgtttatttggtagcggcggcggtggcggcgttcgcgatcgggtcgtttttttcgcgttgcgggttttttttttcgcggtcgggcgggcggtcggcgtaggtttcgtagaggcggcggcggcggcgacgtcggagtcgcggattgttgagcggcggggacgtagttgtattaatcgatttcgggtcgttcggttgggtt

SEQ ID NO: 2106 - DNA, 2493 bp, Artificial Sequence
  chemically treated genomic DNA (Homo sapiens)
agtttagtcgagcggttcggagtcggttggtgtagttgcgttttcgtcgtttagtagttcgcggtttcggcgtcgtcgtcgtcgtcgtttttgcggggtttgcgtcggtcgttcgttcggtcgcggggagggaggttcgtagcgcgggaagagcggttcggtcgcgggcgtcgttatcgtcgtcgttgttaggtgagcgttcgttacggttagtcggtttcgcgtgttttcgcggttgttagttttcggtgtttgtatttttttttgtttgttagattttgtgtttgcgcgagttttttttcgttacgtttggttcgcggtcggttcgtagttttagttagttttttttcgtcggttgtttttggtttttttgttagtcgttagtatttttatgttgagaggtttcgtttttttttttcggagtttcgtttttcgttatttgttattatttttcgggttttaggagcgggcgtttaggggttttaggggttagggtagtttcgcgtgttattatcgtagaaggcgtaaaagggggtggtagaggggaagcgggggcgttcgcgtaggttcgtttgatcgtgtgagagtgtatgttcgagtgtgcgtttcgcgtgtgtattcgagagtcgtttgcgtttacgttcgagggtttttgtattttgttgggatgtggtagtttatgttttcggtgtaaagagcgttagttcgattagtgaaggcggtagagttaggattcgaattattcggggtatagtagtattttgaattttgggatttttgtttgtttacgcgaaaatattatacgtgggttttaggttttcggattttttgagtggcgtgtgagtggagtttggagtttgttaagtttttttagtttgggatttttatttagggaagtttgttggaagtgattgaggagtggatgggatgtaggatttaggtggggagtgtttgagggtttgagttattttgagttgtatggtttatatttttgagtagtgattgttttgggtttgtgttttgcgagaaatttatgtgatttggggtgggggagtgaggtaggaaggaatgtttttttttgtttttatttatgtgaatatatagtatatatttatttagatattttaaatgtttatttatgaggcgtttatacgtttttaatttaaaaaaggattatagtagtttttatttatatacgtttttgtgtgttgttattttaatgttttttatttgtggtaatttagtattgtaatattttaaaattaagagaaaatgtattttaaaataattggtattttgtcggataattttgaattacggagaaggagttaaaagcgtattttattagttggaataatttattcgagtttaatttgtttttaagagatatatagtggaaaaatttagaagcgtaaaatagtattaaagatatatagaaaatgaatgaaaagggtttttttgttgttgttttggaaagatggtattaaagttgttgtagaggatagagttattatgtaatgattaatatattaattaagttggttttgtgattttgatatattgagcggggtttgatttgtgtagtggtttatgataggtaaatattgtatgggaagtgtggtaatttttggaaaaaaatgttttttatgttgttttggtttttggttttgagtttgttttttttttttttatattgaagtaagattttagataagggaagttttatggtggagtgtttttttttttttaaagataatattaaaaattattaaagtaatttatgtttaaggtagaaaatttgaaaaataaagaaaagtattgtaaataaaataaaataaaaaaaattttataattttataaattatagtaaattataatttggtattaagttttttagttttgtttttatgtatacgtgtttttttttataaaaatgttattatattatataatttttattttatgttttttttttttgatttataattagattatgagagatatatttttgttttatgagtaggaatttgtgtttttttttgtaattttttaaaaaatttagattatgttagttttttgtttagagttttttaatagttttttgttttaaagtaaattttgaaggttttgttgtggtttgttaggttaattttttttcgaataattatttttatttcgagttttgttagatagatttttttgttgttttttaaaaatattaagtttatatttgtaattatagtattttgggaggtcgaggcgggcggattacgaggttaggagttcgagattagttcggttagtatggtgatatttcgtttttattaaaaaaaaaaaaaaaaaaaaaaaaaaaagttaggtttggtggtgcgtgtttgtaattttagttatttaggaggttgaggtaggagaattgtttgaattcgggatgcggaggttgtattgagttaagattatattatcgtattttagtttgggagatagagcgagatt

SEQ ID NO: 2107 - DNA, 2385 bp, Artificial Sequence
  chemically treated genomic DNA (Homo sapiens)
ataggtttttattattatgttcggttaatttttgaatttttttagtagagacggggttttgttatgttggttaggttggttttaaatttttggttttaagtgatttatttgtttcggttttttaaagtgttgggattataggtttgagttattgcgtttagtttttttttttttttttttttttttttttttttttttttttttttttttttttaagatagggttttgttgtgttgtttagattggggggtagtgttgtgattttagtttattgtaatttttattttttgggtttaagcgatttttttattttagttttaagaataattgggattataggcgtgtgttattatatttagtttatttttgtattgttttataagagttgggttttattatgttgtagaggttggttttgaatttttggatttaagcgatcggtttgttttagttttttaaagtgttgggattataggtatgagttattgtgtttggttttattgtataatttttttaatttttttgtatgtttgaaattttttattataaagtgttggggggggggataaaatttttatttgaaaatattagttagatattttttataaaatttttttttattgttagattaaggttgttacgagattatgttaagttaattgtttttgtgttttttattaatatgtttaggaagaaagagtagggagataatttcgaaagaggttttgagggtgttagggagttttagggattagttaaggcgtttgggttttgtgtttgaggaaattgaggtttaggttgttttgcgttgttgtttagaatttagggaagtttaggatgtttttttttaagttatgttggggtgtttaggtttagtggagaagcggggtatggttatatgaatgatatgtagttggtagtatatagtaggtatataagtgtttgttgaatgaatatttatatgaaattggaaaggagttttttaaagatggagttagtaggagatagtgaagttgtttgtgcgggtcgggggagtttgtttttgtttttgttttagtttatttttggtttggtttgagtattttgagaagtgggtttaggagaggtttttggatttttgggtttttggatagttagggtgagggcgttttgttatatttttaggagagagtatatttaaaataatttttttttttaaaaatttagtgttaacggattttagatgttcgtttgttatataatggggtttgttttaatagcgttaatttttagatgtgtagtttggaattaagaagtttattggttttttgaggatattgtgagttaagttgagagttgttcgggggagagatatggacgtgtagaattagggatgggagaggagttagggtgtttttttgttgtttattgggttgtttatttgttttgtagttgtttttagattgaaagataggaagggtgttttcgttttttttttttttagttttgattttgagtaggggtttttaggggataattatagataggtagtttggggagggtttgttttggaatttggtttaagtaggtttagttggatgagtttggagaagtttttggtttttttgtttttgaatggaaaatagaataacgttattttatttagagaggttattgtgtaaaatgaaatgaagtaagtagtatagtacggggtttagaaagttttgattttttttgagtggagagaataggggtttaagttatcgagtatttttttttattttttttagtaatacggatgtttttgggtagtacgggttgtattttttttggaatattggaaaagagttaaggtggggagtttattattttttttagtggtttgttttatggttttgtagttttaacggatagaatattttttcgtttattgagttaaaggcggtttttgtgtgatttttaattggtttgagttttgttttttggagttttgttgagtaggttatatttttttttatttgatattttcgagtatgggaagatagagatcgagttttttaattttttttttagtaggtagttgtagttatgatattagatggacgaagattaagatgttttaaggagagatgtttaaaattttaaataagaaaagttttaacgtttgggggaatgattttgtggttttttttgtgtagatgttaataaaatttgtatgtttttattttaatttaaagagaaaagggttaggtttacgtttgtaatttttataatgggaggtcgaggaggattatttgagtttaggagtttgagattagtttgagtaatatagagagatttgtttttattaaaaataaaaaaattaattaggggtggtggtatgtgtttgtggttttagttaattgg

SEQ ID NO: 2108 - DNA, 2385 bp, Artificial Sequence
  chemically treated genomic DNA (Homo sapiens)
ttaattagttgggattatagatatatgttattatttttggttaatttttttatttttagtagagataggtttttttatgttgtttaggttgattttaaatttttgggtttaagtgatttttttcggttttttattgtggggattataggcgtgagtttggtttttttttttttgaattggagtgaaggtatatagattttattaatatttatatagggagaattatagaattatttttttagacgttgagattttttttgtttgggattttgaatatttttttttagagtattttaattttcgtttatttgatgttataattgtagttgtttattaggaaaagggttgggagattcggtttttgtttttttatattcgagggtattaggtgaaagagggtgtggtttgtttagtagagttttagagagtagaatttagattagttgggggttatatagaggtcgtttttggtttagtgaacggaagaatgttttattcgttggagttgtagggttatggaataagttattgggggaggtggtgagttttttattttggtttttttttagtgttttagggaaaatgtagttcgtgttgtttaggggtattcgtgttgttgagaggagtaggggaggatgttcggtgatttgggtttttgttttttttatttagggaaagttaaggttttttgagtttcgtgttgtgttgtttattttattttattttgtataatgatttttttgggtagaatggcgttattttattttttatttaaagatagggaggttaaggatttttttaggtttatttagttaggtttgtttgaattagattttaaagtagattttttttaagttgtttgtttatgattgttttttgggagtttttgtttagagttaggattgaaaaaaaaggaagcgggaatattttttttgttttttagtttggggatagttgtagggtaggtgagtagtttagtgggtagtaagaaggtattttggttttttttttatttttggttttgtacgtttatgtttttttttcgggtagtttttagtttggtttatagtgtttttagggggttaatgggttttttgattttaggttgtatatttggaagttgacgttattaaaataaattttattatataataaacggatatttggaattcgttagtattgagtttttagaaaaagaaattgttttggatgtgtttttttttaagaatgtggtaaagcgtttttattttggttgtttaggaatttagggatttaggggttttttttgggtttattttttaaggtatttaggttaggttagaggtgggttggggtagagatagagatagattttttcggttcgtataggtaattttattgttttttgttggttttatttttggaaggtttttttttaattttatgtaaatatttatttagtaaatatttgtgtgtttattatgtgttgttaattgtatattatttatatggttatgtttcgtttttttattgagtttaagtattttaatatggtttaagaaaaaatattttggatttttttggattttaaatagtaacgtaaaatagtttgagttttagtttttttaaatatagagtttaaacgttttagttagtttttagaattttttagtatttttaaggtttttttcggaattgtttttttattttttttttttgggtatattggtgggggatataaggataattgatttggtatagtttcgtggtaattttgatttagtaatgaagaaagattttatgagaaatgtttagttaatatttttaaatggaaattttatttttttttttaatattttatgatgaaaaattttaaatatatagaaaagttgaaagaattatataatgaggttaggtatagtggtttatgtttgtaattttagtattttgggaggttgaggtaggtcgatcgtttgagtttaggagtttaagattagtttttgtaatatggtgagatttaatttttataaaataatataaaaatgagttgggtgtggtggtatacgtttatagttttagttatttttgaggttgaggtgggaggatcgtttgagtttaggagatggaggttgtagtgagttgagattataatattattttttagtttgggtaatatagtaagattttgttttaaaaaaaaaaaaagagaaaagaaaaagaaaaagaaagaaaagaaaagaaagggttgggcgtagtggtttaagtttgtaattttaatattttgggaggtcgaggtaggtggattatttgaggttaggagtttgagattagtttggttagtatggtaaaatttcgtttttattaaaaaaatttaaaaattagtcgggtatggtggtgggaatttgt

SEQ ID NO: 2109 - DNA, 2440 bp, Artificial Sequence
  chemically treated genomic DNA (Homo sapiens)
ttcgcggtcggggtttgttcggattttcgtttttgcgcgcggttcgtagcggcgtatttttaaggacggtcgttcggttcgagcgaaagcgggagcgggagtagtagtttggcgtggtagaggtcgtttttttttttaggtcgtaggtcgtcgtttgtttttcgttaggtcgttcgttcgtcggtttcgttcggattttagttcggtcgggtttggacgtcgtcgtagttttttatttcggttttatttataggggtattttaattcggtcggcggggcggggtcggggattcgcggataaggtcggttcgtcgaggttagggaggaaaataaaaagttaagagaagaatttatttaaaatggtttttgtagtagttaaaatataaatagttattatttggtgaagtttagtttagatattttgtaaggatattttaatttatttcgggttcgttttttttgtcgcgttattgggtttcgtcggtttaaaatatagatttattggttatttcggttgtcgtttagatagaagtttattttaagtttgtttgtaggggcgagtgatgggttcgttttattgtgttcgtatttgtatggatgtgatcgcggttttgattggtcggcgttgagatcgtttcgttttttgtttcgtgtttttcgttttggagacgtcgttgcgttcggtttcgttttttcgggattagcggtagggttacgggggcggggcggggtcggggtttcgcgggtcgagggggcggggcggggttttgtacgttgtagatcgtaggtagggggcggggatttggcgcgttcgggcgtcggcgggggtttagcgtttaggtggaggttttttaggtagttggttagtgatttggaagattcggggttggcgttttcgggggtgggggaggatgtggttggggtttcgcgatataggggtttcgtaggggtcgaggttacgcgggtagatgtaaggagaagcgagggattcgtaggttaggaaaagaagattttgagtggttaagcgaacggagtagtttttattcgcgttttttgtcgtttagttcggttttttggtatttttggtttttaacgggtttttttttaaggtttagcgtattcgggagttttttagtttcggggattttgtagcgttttggatagattttcgtgaaattaggtgtcgagttatggtgtatttattttcgggtttgtcgtttttattatttttgtagtatttttaaggatagggtttagtgtttggtagagatttaattaattgttatattttcgaatttattcgttagtaggtaatttttgagtgtttattaaattttagatattgatataaaacgggatattgcggttaataagataaagtttttgtttttatggaataggcgaaagattaaatataaggggtaggtagtgataaatgttgtaaagaaaatagatggaagaagaagggaaattagattagggtttaggaattaggaaatttttaaattatgaaaggaggtatggagagtttgttttgtttggttgaatattttgtatggcgttttattattgtttttttttattttaattttggtagttattagtttttttcgcgttttgtttgtttatcgtgttttttaagtatttattaaaaaattgattggattttgattgtagaggtttattttattttaaagtagaaatgatttgagtttgatgattttaagagtagtttgtgggatatatttaggataagtatattttgattgtgttaggggttatgataatgatttagtagaggtttattaattttagagagagaatatttttagtttttttgaaattttagttttttgatggtttttagtttgtggttttaatttttttttgagtaatattttttattttttggtagatataagagatttttttagtttgaaaatagaggtagtagttttttgttgtttattttttttatttgtgtgtatttttgttatttgatttaaggttggttaagatgttttatggttttttttttttgttttttttttttttttaaatagatatttattaggtattaattatgttttaggtattgttttagatataaggaatgtagtattaaataagataaataatatttttgtttttaaggagtttataatttagttgagggtgagatagagagttacgtatagattttgaggatttttaattttgttaagttgttggtgagtgagtatattgagggttattcgtttgttgttgttttttggggatagtatgtttgattttttgaattagttgttttaggagttgaagttgaagttgaggtaggattaggtagttggtagttataatttttttagtttaaatattagaattataggttttaaagtttttaatagtgtttatgggagttttggtttttatgttttga

SEQ ID NO: 2110 - DNA, 2440 bp, Artificial Sequence
  chemically treated genomic DNA (Homo sapiens)
ttaagatatgagagttaagatttttatgggtattgttgagagttttggaatttgtgattttggtgtttgagttggagaggttgtggttattagttgtttggttttattttagttttagttttagtttttgaagtagttggtttagaaggttaagtatgttgtttttaagaggtagtagtaggcgagtagtttttagtatatttatttattagtagtttggtaaaattggagatttttaggatttatgcgtaattttttattttatttttaattggattgtaagttttttgagggtaaagatattatttgttttgtttaatgttgtattttttgtgtttagaataatatttggaatatagttggtgtttaataaatatttgtttaagggaggaagaaagataagaaagaaagattataagatattttggttagttttgagttaaatgatagaaatgtatatagatgagagagataggtagtagggggttgttgtttttgtttttaagttggagaaattttttgtgtttgttaagaagtgaagagtgttatttagaagagagttagggttataggttgaaagttattagaaaattgggattttaaagaagttaaaaatattttttttttggagttagtaagtttttgttaaattattattatggtttttgatatagttaaaatgtgtttattttaaatgtattttataaattgtttttagaattattagatttagattatttttgttttgaggtagaatgagtttttatagttagaatttaattagttttttagtgggtgtttagaaaatacgatgggtaagtagggcgcgaggagggttggtgattgttaaggttagggtgggagggggtagtaatgagacgttatatagagtatttagttaggtagggtaaattttttatatttttttttataatttaggaattttttaatttttaaattttggtttaattttttttttttttttatttattttttttatagtatttattattatttattttttgtatttagtttttcgtttattttatgaaagtaagggttttgttttgttgatcgtaatatttcgttttatattaatgtttggaatttagtgggtatttaaagattatttgttaacgaatgaattcgagagtgtaataattagttgaatttttgttaaatattgggttttgtttttgaggatgttataaggatggtaggggcgataggttcgaaaataaatgtattatagttcgatatttgattttacggagatttatttaaggcgttgtagggttttcggggttggaaaattttcgggtgcgttgggttttgggaagaagttcgttgggagttaggagtattagggagtcgggttgagcggtagaagacgcgggtggaggttgtttcgttcgtttggttatttaggattttttttttttgatttgcgggtttttcgtttttttttgtatttgttcgcgtggtttcggtttttgcggaatttttgtgtcgcgggattttagttatatttttttttattttcggagacgttagtttcgggttttttagattattagttagttatttgagagatttttatttgggcgttgaattttcgtcggcgttcgagcgcgttaggttttcgttttttgtttgcgatttgtagcgtgtaggatttcgtttcgttttttcggttcgcgggatttcggtttcgtttcgttttcgtggttttgtcgttagtttcgggggggcggggtcgagcgtagcggcgtttttaaggcggggggtacgaggtagggggcggggcggttttagcgtcggttaattaaggtcgcgattatatttatgtaaatacgagtataatggagcgagtttattattcgtttttgtaagtaagtttgaaatgggtttttgtttgagcggtagtcgggatgattaatgggtttgtgttttggatcggcgaagtttaatggcgcgatagggaaggcgggttcgagatgggttagggtgtttttgtagggtgtttgagttaaattttattaaataatagttgtttgtattttggttgttgtaggagttattttaggtaagttttttttttaattttttatttttttttttggtttcggcggatcggttttgttcgcgggttttcggtttcgtttcgtcggtcgggttagggtgtttttatgaatggagtcgggatgaggggttgcggcggcgtttaggttcggtcgggttggggttcgagcggggtcggcgggcgggcggtttggcggagggtaggcggcggtttgcggtttggggagaggggcggtttttgttacgttaggttattgttttcgttttcgttttcgttcgggtcgggcggtcgtttttgggagtgcgtcgttgcgggtcgcgcgtaggggcgggggttcgggtagatttcggtcgcggg

SEQ ID NO: 2111 - DNA, 2422 bp, Artificial Sequence
  chemically treated genomic DNA (Homo sapiens)
agatggaagttggttggtatgttttgaaatggtgaggttttaggagatatgggtgggatttttttaagaattgttataaatttttgttttgaaattagattatttggatttaaattttcgatgtttttttttatttgttatgtgattttgggtaagttatttaagttttttagttttagttgttgaatagaaaatatgatagtttagattttattaggtggttgtgaagattaaaagagataaggtatgtaagatatttatagggtatttggtataaggtaaatatttaatagattttagttgttatttgtaattagtttatttattgtattgaaattgattgggggaatatttagatttagacgatgttatggggaaaaatagataagaaataataatttaaggttttatttaagagttatgtgatgtagagtgtgattagtggatagtattgtatatttggataaatatgaatatataaatttttgagttgtttttcggatattagtttgtttataggaggattttttgcgtagttgatgaagtttatgtagttggaattaaaagtttttgtatttatgggttgaattggtagtagtaaattgattagggaattagagtatgatatttaagatagtgggaattagttgagatgtaggttataattatgataatagtaggtaatatttattgagaattttttgtgttaagttatgtgtaaaatatattattagattatgatatttttttattataatagtttaaggtggtgtttttgttatgatagtttgtttattttttttttagagtgtatgttaaaataattttttattgtaattagtggattttttagtagttttttttttttttttatttttttttggagttcggttttttataataagtttttaggtgtatttggagttgttatttgtaaatgtggtaggatttttttttattagatttttgtttttgtttttttttttgaagagtaaatatgttgtattagaaggaattagtggtttattgttattggtaaagtcgaggtagtgggaggattattttttttttgggtttagtaatttttttagtggttagtagatagtagtataatggttagttagtgtgaaattgtgtaaattgttttataaataattcgtaatgtataggtaatagggagaggttatagtttatggataaatgattttttgttatttcggggtattaaattagggataattcggattttattatggggatttattaattattatgggtttttcgtacgtaagtttgttgggatttaggtttgtttggtgttttttgtggtattatgatgggggtaaaatatttttaagtagggttatgagaaagagaatgtaagtatttttaataaattagttaggggtgaattttgtaggagttaagtattttttttgtggaatttgttttttgaagaaatttttttgaagcgtagagaaaaatataataattttaataattaatatgtattgggtatttattttgtgttaggtattgtgttaagtttttttttttttttttttttttttgagatggagtttcgttttgtcgtttaggttggagtgtagtggtacgattttggtttattgtaagttttattagtcgggtagttgggattataggcgtttgttattatattcggttaattattgtatttttagtagagatggggttttgttatgttggttaggttggatttgaatttttaattttaggtgatttgtttattttggttttttaaagtgttgggattataggcgtgagttatcgtatttttgtgttaaattttgtgtaatttttataaatattttattgagtggatattattattattagttttatttttatagaggatgaagtgatagtttatagaggtttagttatttattttaggtaatatagttaatatgtggtgaatgtattagttagtttttgttaggttgtggtaataaatagtttattagttttagtggtttaaaattataagagtgttttgtttttattttatgttatttatggattagttgtttttttttatttgattttattataggatttaggttgaaatagtagtttttatttgggatatattatttttatggtagaagaagataagagtaagaaaattggtggaattggttatggttgtgaaagtttttgtttagaatgggtatatattatttttgtttatattttattgattaaaggtggttatatggttaagtttttttttaatggggtgaggaagtttattttttatattgggaggtattgtaatgaatgataattggggagagatatttaagttttttagaggaaaggtagagattagagaatagtaatataatttatgtagttgagtgagattagatttttgtgg

SEQ ID NO: 2112 - DNA, 2422 bp, Artificial Sequence
  chemically treated genomic DNA (Homo sapiens)
ttataaagatttgattttatttagttgtatagattatattattattttttgatttttgttttttttttaagagatttagatatttttttttaattgttatttattgtagtattttttagtgtgaggagtaaatttttttattttattgaaagaaggtttggttatatgattatttttgattaatgaaatgtgagtagaggtgatatatgtttattttgagtagaagtttttatagttatggttagttttattagtttttttgtttttgtttttttttgttatgagaatagtatgttttagatagaggttattattttagtttggattttgtaataaagttaggtaaaggagagtagttgatttatgagtggtataaaataggagtaaaatatttttgtgattttaaattattgagattggtggattatttgttattataatttaataaaagttgattaatgtatttattatatattggttatattgtttaaaataaataattaaatttttgtgagttattattttattttttatgaaaataggattaataataatagtatttatttaatggaatgtttgtgggagttatataagatttagtataggggtgcggtggtttacgtttgtaattttagtattttgggaggttaaggtgggtagattatttgaggttaggagtttaagtttagtttggttaatatggtaaaattttatttttattaaaaatataataattagtcgggtgtggtggtaggcgtttgtagttttagttattcggttggtggagtttatagtaagttaagatcgtattattgtattttagtttgggcgatagagcgagattttattttaaaaaaaaaaaaaaaaaaaaaaagatttagtatagtgtttggtatagagtaaatgtttaatatatgttaattgttaaggttattatgtttttttttgcgttttaaagagatttttttagaaagtaagttttatagagaaaatatttggtttttatagggtttatttttggttggtttgttaaaggtatttatatttttttttttatggttttgtttggaagtgttttgtttttattatgatgttataagaagtattaagtaggtttgagttttagtaggtttgcgtgcgggaaatttatagtagttaatgaatttttatggtgaggttcggattatttttggtttaatatttcgaaatggtagggagttatttatttatgagttatggtttttttttgttgtttgtgtattacgagttatttatgaggtaatttgtatagttttatattggttggttattatgttgttgtttgttaattattaggagggttgttgaatttagagaaaaaatggtttttttattgtttcggttttgttagtgataatgagttattgattttttttagtgtagtatgtttgttttttagggaagagaatagggataaaagtttgatgaagagaaattttgttatatttataggtagtaattttaaatgtatttgggggtttgttatgaaaggtcggattttagaaaaaaataaaaaaaaaagagagattattgggaaatttattggttgtagtgagaggttattttaatatgtattttgaaaggagagtaggtaggttgttatgatagggatattattttggattattgtgatgagaaaatgttataatttggtgatgtgttttgtatatggtttgatatagaaaatttttagtaaatgttatttgttgttattatgattatgatttgtattttagttggtttttattattttgggtgttatgttttaattttttggttagtttgttattattagtttagtttatgggtatagaagtttttgattttagttatatgggttttattaattgcgtagaggatttttttataaataagttaatattcgaaagataatttaaaagtttatatatttatatttgtttaaatatataatgttgtttattggttatattttatattatatagtttttggataaaattttgggttgttgttttttgtttatttttttttataatatcgtttaggtttgaatgtttttttagttagttttagtataataaatagattagttataaataatagttaaagtttgttgagtgtttgttttgtgttaggtattttgtaagtgttttgtatgttttattttttttaatttttatagttatttggtaaagtttggattattatattttttatttaatagttaagattaaagggtttaagtgatttgtttaaggttatataataaataggaaggaatatcggaggtttgaatttaggtagtttgattttagagtaggagtttgtagtagtttttgaaggggttttatttatgttttttggagttttattattttagggtatgttaattaatttttattt

SEQ ID NO: 2113 - DNA, 2186 bp, Artificial Sequence
  chemically treated genomic DNA (Homo sapiens)
gtgtgaaaatgtttttttaattatatcgaacgggaggattttcgattatttgtattttatttgaaaatttagtattcggttgggatgtttgggtgggtggaggattttgtcgtgttgggatgaaatagtagggatacgtttaaaatataagaattatgcgcggtggtttacgtttgtaattttagtattttgggaggttgaggtaggcggattataaggttaggagttcgagattagttttgttaaaacggtgaaatttcgtttttataaaaaaaattaaaataaaataaaaaataaataaaaaaaattattaaaaaaataattagtcgggcgtggtggcgggcgtttgtagttttagttattcgggaggttgaggtaggagaatcgttcgaattcgggaggcgaaggttgtagtgagtcgaaatcgagttattgtattttagtttgggcgacggagcgagatttcgttttaaaataaaataaaataattttacgttaagatcgttttgaaatataggtagaaaaattaggtaaaaaatgttaaacggttaattattttggtttagttatatatttattcgaaagttcgttttttttatttttagttttagcgttaagaatgtaaaatagggcgtttagaagtttaagcgataaagatttttttatcgagagttaagggataaaatttattatagataagtttagtttttttatttttttcggacgttttttttcgattgttaaagaagtagtcgtttttcgggtagttgttaggaaattagttcggtttcgcggcgttgtttttattttgtagggtgtaagaggcgtattttttgcgtttttttcgcggttaaatcggggtgcgggaattttttttagagaagttgcgagttggggaaatttcgttatcgatttatcgtggcgtcgggaaaggggatgcggggttcggaagggttagatttcgtaattttgggatcgatatttttttttttttttattttttttagttttggattgggttaatgaaagttcgaaaaagaaaaaaaaaaaaaattaaattttaatgtagtcggagtgtaaaggtcgttcggttttgtttttcggcgggggaatgcgttgtgttggaggcgcgaataggagtcgtagacggtgagttttatcgttgtaaatgttagggtagtgaagtcgaatagaaaattttatcgttttaaaaaggtagttgttcgtttttttttttttttttcgttagggcgaggggttttttaagttcgggattcgcgagttgcgcggaggatttcgttaaattcgagtatcgtgcggcgttttttaagagttcgaataacgggaatttagtaaaaaataagtcggttttagaaggtagtttttttttttttttcgcgtacgggttataatcgtttttagtttttaaattgttttagtagaggtcgcgcggagagagtagagtcgagggatttagcgtaaggcgggagttaagcgcggttgttttaagaacgcggagagcgcgcgttcgtcgttagttggttcgggttgcgcgttttcgtcgttatcgcgcgttttttgttcgttcgttttttcgttcgtcggttttaaagtttttgttaggatttatgtttatatgttattttttgtatggaggtatggttagtttttagtttcgcgtttttcgtttttttttagtttgcgtcggagttataatttttaggagtatggattgaaggcgttttcgttttagcgtttttttgagattttttgtgttttttttcgtttttttcggtcgtttttattttggggggtttttcgttttttttgtttttttttttttttttttttttcgtaaatatgtttttttttttttcggggttttggaaggagttgtttgtttgaagttcggagacgtcgcgtcgcgtttagtttcgtcgtcgttcgtcggttttcgggttgtgttgcgttgtcgatttaagttggggattttcggttgttcgtcgtcgtcgttcgcggtttttgtttgttttaggttcggggtatcgtcgtcggtcgtcgatttcgcgttttgttcgatcggtttttttttttttaaacggaaagtagttttttttcgtcgagaggatcgtttttagcgtggttttgcgttttcggttattttttgagatttttcggggggcgtt

SEQ ID NO: 2114 - DNA, 2186 bp, Artificial Sequence
  chemically treated genomic DNA (Homo sapiens)
agcgtttttcggaaaattttaaaaagtgatcgggaacgtagagttacgttggggacgattttttcggcggagaaaggttgtttttcgtttaaaaaggagagagtcgatcgggtagggcgcggagtcggcggtcggcggcgatgtttcgggtttggggtaggtagggatcgcgggcggcggcggcgagtagtcgaggatttttaatttgagtcggtagcgtagtatagttcgagagtcggcgggcggcggcggggttgagcgcggcgcggcgttttcgggttttaggtaggtagttttttttagggtttcgggaaggaaggaggtatgtttgcgagaggggaaggggaggggagaggtagggggagcggagagttttttaaaatagaaacggtcggaggaaacggaggaaaatataaaggattttagaggggcgttggggcgagggcgtttttagtttatgtttttgaaagttgtggtttcggcgtaggttgggaaggaacgaagagcgcggggttggaaattggttatgtttttatataggaagtaatatgtgagtatggattttggtagagattttaaagtcggcgagcgaaggagcgagcgaatagggggcgcgcggtggcggcgggggcgcgtagttcgggttagttggcggcgggcgcgcgtttttcgcgtttttaaagtagtcgcgtttggttttcgttttgcgttgggtttttcggttttgtttttttcgcgcggtttttattgggatagtttggggattgggggcgattgtagttcgtgcgcggagagaggagggaggttgttttttggggtcggtttgttttttgttggattttcgttgttcgagtttttaaaagacgtcgtacggtgttcgggtttggcgagatttttcgcgtagttcgcggatttcggatttgaggggtttttcgttttggcgaggggaaagggggagggcggatagttgtttttttaaagcgatggggttttttgttcggttttattgttttggtatttgtagcggtgaggtttatcgtttgcggtttttgttcgcgtttttaatatagcgtattttttcgtcgggaaataaagtcgagcggtttttgtatttcggttatattgagatttaattttttttttttttttttttcgggtttttattggtttagtttaaggttggggaaagtgggggaggggaggaatgtcgattttaggattgcgaaatttagttttttcgagtttcgtattttttttttcggcgttacgatggatcggtggcggagtttttttaattcgtagtttttttggagaaggttttcgtatttcggtttggtcgcggggagggcgtaggaagtgcgttttttatattttgtagggtgaaagtagcgtcgcggggtcggattgattttttggtagttattcggggagcggttgtttttttagtaatcggggagaggcgttcgggggaaatgggaggattaggtttatttgtaatgagttttgttttttggttttcggtaagaagatttttatcgtttagatttttaagcgttttattttatatttttaacgttggggttaaaagtgggggaggcgggttttcgagtaaatgtgtaattgagttaaggtaattagtcgtttgatattttttgtttaatttttttgtttgtgttttaaagcgattttgacgtgggattgttttgttttgttttgagacggagtttcgtttcgtcgtttaggttggagtatagtggttcgatttcggtttattataattttcgtttttcgggttcgggcgatttttttgttttagtttttcgagtagttgggattataggcgttcgttattacgttcggttgattatttttttggtggttttttttgtttgttttttgttttattttggttttttttgtagaggcggggttttatcgttttggtaaggttggtttcgaatttttgattttgtgattcgtttgttttagttttttaaagtgttgagattataggcgtgagttatcgcgtatggtttttgtgttttaaacgtgtttttgttgttttattttaatacggtagggttttttatttatttaaatattttaatcggatgttaggtttttaaataaagtatagatggtcggagattttttcgttcgatgtgattaaggaagtatttttatat

SEQ ID NO: 2115 - DNA, 2420 bp, Artificial Sequence
  chemically treated genomic DNA (Homo sapiens)
agggaggtttaggaatgggatttgttttttttttattttttatgttgggttttggagaatattttaggggtggggaaatttttacggtaaaaaaagtttaaaaaaaattttattgtattattatattgtgtttttaggttttcgagtttttgaatatggtttttttatatttataaggattttgtttataatgttttattttatttttttttgttcgttaggtaattttagttagagaggggatgtttataatttttttttttggggttgtgggtttggcggatacgtggtatttgtttatttttttggatatgttgtttttattgttgttggatattattaaatatggtaacgtttatgttggttttttatttttttttaagtagacggggatagattttgtgtgtgtatgtatgtgtatttgtgtgttcgagtatgtatgtgtgtgtttattgtaggtaggtgttatgggttatgcgttttagtttggatttattggtttagatatttatgaggttagagggtttgtaaagtttttttggtcgtgttttttttttataatttttagtaaattttttggttttttgggtttaaggttttagtttgttttttaggtttttttaggtcggtggggatcgtaggtttcgttacggagtttggagtttagtgtttgtttgggatatatgaggggtttcgagggtttatatgttttttagtttgggaagttatttagtcgggtttcggtggggtttagtagaattttgggtatttttacggttttttgatattttagtttttgtcgtttttatttatacggagatagtttttttttttttatattttttattttttatgatattttttggtatgattttgattattttagttggataattaagttttttaagttttttatgtcgttttattttttttagtattgttgatttaattttagggggattttttttttgacgtttttatgtttcgttttttttttttgtagattttttggtagtttttttgtgtagaatagttattcggttttattttttttgtaaggtcggagttgttgttttatttttttgatttatatataataataaaaaaaattatttttgttatgtgtttttttatttttattaagtggttgaaatttaatttgattgttcgagtatttttggttggatttgggttggagtcgatgggattttatgagggttgtaaaagttaagtttttaatatgttttaaataaattggcgtgtaaaggagaaacgttagaagaaggaatatggttgtagacgggaggtttgggaatgttagtcgtagtattggggtataggtggttttaataatgtatataagtttggttgtaagttgtttttataagagtagaagaggttgtagaattatttttaggaggttgagattaaatttttcggtttttgagtgtatatagttttgtatggtttttaaaatatagattttaggattatttataataatataaatttgtggttaattttgttgaatttttatttagatttaagttgtgttgttagtagaaatgtaattgcgttagagaaaaattgtttatattttttgagatattgtgataatgaaaaatagtattataaatttttattaagtaagaagaatattaattgtattttatgttgtttttttgggttagtacgttgatatagatatgttttattttagtaaaatacggttaatttttgtagtacggtatttatttttttttttaattatatataattgtatagtttaatttattttaacgtttgacgtcgaaaagtgtatatttatgaattaagggttagtttgggagggaggagaattataaacgggtataattgtagttttttgggggttgtttatgagtgattttaaagaatgatgatgtttattttgaatttttattagtgaaagatagtagggttgtttttagttaagatattgttttaagaacgtagataataggataatttgtttagttgtttattatattagtggtttttttttggataagtaggtaagaaagattaaagatgtgggttttatatattttgtgatgtgatgaaatttaggtatatagatagtattagtaaatgtgtaattgaatattaaaatgagtaatgtggttttaggtagtatagttgtagatttttgtggataagggagagtgtttggaattttgttggatgatagtttttttagggggaaaagtaggatttatttgattattagtgtaatttattttagggttttttttggaatagtgtatttagttttgtaatcgtattttagaaaaattatttttaagttttgattataattaattaattaattatgatgaatgttgatggtgatttagtaaaagtggaatgatgatttaggg

SEQ ID NO: 2116 - DNA, 2420 bp, Artificial Sequence
  chemically treated genomic DNA (Homo sapiens)
ttttaagttattattttatttttattaaattattattaatatttattataattgattaattaattatgattaaagtttaaaggtgatttttttgaaatacgattgtaaaattagatgtattgttttagagagagttttaaagtgaattgtattaatggttaaatggattttgtttttttttttgagaaaattattatttaatagagttttaagtatttttttttgtttatagagatttgtagttgtgttgtttggggttatattatttattttaatatttaattgtatatttgttgatgttgtttgtgtgtttggattttattatattataaaatatgtggaatttatatttttaattttttttgtttgtttatttaaaggaaaattattagtgtggtaagtaattagataaattgttttgttatttgcgtttttagaatagtattttaattggaggtagttttattgttttttattggtaagaatttagaataaatattattattttttgaaattatttataagtagtttttaggagattgtaattatattcgtttataattttttttttttttaaattaatttttgatttataaatgtgtatttttcggcgttaggcgttagaataaattagattatataattatgtataattaaaggggaaaatgggtatcgtgttgtaaagattagtcgtgttttgttgaagtaaagtatgtttgtgttagcgtgttggtttagggaggtagtatgaaatataattaatgttttttttatttaatgggggtttatggtattgttttttattattatagtattttaagaaatataaatagtttttttttaacgtaattgtatttttattgataatatagtttgggtttaaatgaaaatttagtagaattaattataggtttatattgttatggatgattttggaatttgtattttaaaagttatgtaaaattgtgtgtatttaggagtcgagaagtttgattttaattttttgagagtggttttgtagttttttttgtttttgtagaagtaatttatagttaaatttgtgtgtattattaaagttatttgtgttttagtattacggttagtatttttaagtttttcgtttgtagttatgtttttttttttaacgttttttttttatacgttaatttgtttgagatatgttaaaagtttgatttttataatttttataaaattttatcgattttaatttaaatttagttagaagtgttcggataattagattgagttttaattatttgatggagataaagaaatatatagtaagaatgattttttttattgttatatatgagttaagggaataaaatagtaatttcggttttgtaagggagatagaatcggatggttgttttgtataaaagggttgttaaagaatttgtagagggaagaaacgaggtatggaggcgttaagagaaaggtttttttgaggttaaattaataatgttggggagaatggggcggtatgaggagtttgaaaagtttgattgtttagttaggatggttaggattatattaagagatgttatgggggatgagggatgtgggaggagaaaagttgttttcgtgtgggtggaggcggtaggggttggagtattaggaggtcgtgggggtgtttaggattttgttgagttttatcgaggttcggttgagtgattttttaggttgggggatatgtgagttttcggggttttttatgtattttaggtagatattgagttttaagtttcgtaacggggtttgcggtttttatcggtttggaaggatttggaaaataggttgaggttttgaatttagaggattagggagtttgttgggaattatggggaagaaatacggttagaggagttttgtagattttttgattttatgggtgtttgagttagtaagtttagattaaaacgtatgatttatagtatttgtttataatgaatatatatatatatgttcggatatataggtatatatgtatgtatatataagatttgttttcgtttatttaaggaaggataaggggttaatatagacgttattatgtttggtaatgtttagtaataatggaaataatatatttaaaaagataagtaaatgttacgtgttcgttaggtttatagttttagaagaagggattgtaagtattttttttttgattggggttatttgacgagtagagaaggatggagtgaaatattgtgggtaggatttttatgggtatgggagagttatgtttaggaattcgaggatttaagggtatagtgtggtaatgtagtggggttttttttagattttttttgtcgtggaaatttttttatttttgaaatattttttagaatttaatataaaaagtaggagggaggtagattttatttttgggttttttt

SEQ ID NO: 2117 - DNA, 2437 bp, Artificial Sequence
  chemically treated genomic DNA (Homo sapiens)
tttgagaatttaatgatgtgggtgatttgataggaggcggagtttaggcggtaatgttcgtttgtttgttgtttattttttgttgtgtagttcggtttttaataggttacgaatgggtatttgtttttagtttaggagttggggatttcgatataaagttttagattgtgtttgatatagattaagttttagagaaattttgttgttgttatgattattattgatattattgatattattgatattattattaggtcgggtacggtggtttatatttgtaattttagtattttgggaggttgaggtaggaggattttttgagtttaggagttagaggtcggtttgggtaatatagcgagatttcgtttttagaaaaataaaaaaataaaaaattagttgggtgtggtggtatgtatttgtagttttagttatataggaggttgaggtaggaggattatttgaatttaagaggtcgaggttgtagtgagttatgattgtgttattgtattttattttgggtgatatagtgagattttgttttttaaataaataataattaatttaaaaataaaagtattagtagtagtagtagtagtagtagtagtagtagtagtagtagaagtatggattaatttaagggggaaaaaaggagggagtgggattgaggtaaagtaagttgttatttggagaaaaaggtaaagaagatgattagatagatgcgtgtgtagatgtttatattatttttagagatttaagagattggcggtagtggtggagggagtggggatttgagggaggggaaaggatatcgattttttattttttgtttttttttacgttgtttgggttgtttttttttttttgtgtatttgtgtggatatttaaaattaaatattatagaaagaaattttgtaagaggtttttttttttagcgaaagttttaaatcgttttttttagtttcgtttttttttatttttatatttcggtttgtgggtggtttagtttggttttttatttttgttggtgttttgcgtttttggttttggagtaggttcgagttggaatgttttgtaagaaagggggttttttagagttttttagagtggttttggttttgggtagttaggggtgtggggttttggggaggggggtttcggttgattgatgagaattttaaatgttttttagtttcggttgttaattatttttagattggtcgggttagggttagggtcgtcgtcgtttggttttataaatagttcgtcgttttagatggcggttggttttagtttggcgagtaggtttatgggggattggggggtggtagtaggtggaggatttttattttattagtcgttttagttgttatatttttatatcgttttgagttggggattttgggttagaaggggtggtagaaattgaatttattgtttagaggagggaaattgaggttcggaaggggtaacgtgggtggtggttaaggtggggggaagatagagatgtaaggggggtgttttttgagggttgatgttgggtttattttatttttgtgaatttagtatattatgaggatgtcgtaaagattcgaggagggagggaaggggggtattattgttagttgggtttaaattttggttttagtttttattttttgagtgaataaattatttttatttttagttttagtttttttatttgtaaaatggggatggttggagtataggattgttggaagatttaatgattcggtttttgtagatagtttgtattttatatacggcgtaggcgttgaatatagtttttttttttttttttttcggaaattttttttatttttgttttttttgtcgtcggagagtatagtggttttttttaggaagttattttgatttttatttagatttttttttttgtgttaggtattgtgttttttttatagttttttttatagggttttttttcgatataattggtatttgacgtttttgtttttttgaaaataaggaaatagagggttagggaagtaattggtatttagtgttgttagggtttcgttttttgtagatgaggagataaagggttagggaggtagtgggatggatatgttgaggtcgttaggaaaagatagtttgatgtgtatttggagttgtttttgaaggttttatagaatttggtatagcgttaggtaattcggttgttttttttgttatatttattaattttagagtttatattttggtatagaaggaagagatttaggttggtgttgggtcgtaatattttagggaaaggggtaaggagttttgatttgtttttatatttgtttgtttttaaattgggttggattttggttgggtggtcgttgggtggtagttttgttttaggatattcggtagtaggataaggtgggggagttagttgttttgtgagttt

SEQ ID NO: 2118 - DNA, 2437 bp, Artificial Sequence
  chemically treated genomic DNA (Homo sapiens)
gaatttatagagtaattggtttttttattttgttttgttgtcgggtgttttgggataaggttattatttagcggttatttagttaggatttagtttagtttggagataggtaggtatgggagtaggttaaggttttttatttttttttttgggatattacgatttagtattagtttggattttttttttttgtgttaaggtgtgggttttggggttggtgggtgtggtaggagaggtagtcgggttatttgacgttgtgttaggttttgtgagatttttagagatagttttaggtgtatattaggttgtttttttttggcgattttaatatatttattttattgtttttttggttttttgtttttttatttgtaaggggcggggttttaatagtattaggtattagttatttttttgattttttgtttttttgtttttaaaaggataagagcgttaggtgttagttgtgtcgaggagagattttgtgagagaggttgtgggaaaagtatagtgtttggtataaagggagaggtttgagtaaaagttaaggtggttttttggaggaggttattgtgtttttcggcggtaggagaagtaggaatagaaggagttttcggaaaaggaagagggagaagttgtgtttagcgtttgcgtcgtgtgtggagtgtaaattgtttgtaggagtcgaattattgaattttttagtaattttgtattttagttatttttattttatagatgagaaaattgaggttgggggtggaaataatttatttatttagggagtaaaagttggagttagaatttaaatttagttggtaatgatgtttttttttttttttttttcgggtttttacggtatttttatggtgtgttggatttatagaggtaaagtgaatttagtattaatttttaaggagtattttttttatatttttgttttttttttattttgattattatttacgttgtttttttcgggttttagttttttttttttgagtaatgggtttagtttttgttattttttttggtttagggtttttaatttagggcggtgtggaggtgtggtagttgaggcggttagtgaggtgggggttttttatttgttgttattttttagttttttatgaatttgttcgttaggttggagttagtcgttatttggagcgacgggttgtttatggagttaggcggcggcggttttggttttgattcggttaatttggaagtgattagtagtcggggttggggagtatttggagtttttattagttagtcgggatttttttttttaaagttttatatttttggttgtttagagttagggttattttgagggattttgaggagtttttttttttgtagggtattttagttcggatttgttttaaggttaggagcgtagaatattagtagaggtgggagattagattgggttatttataggtcgggatgtgggggtgggagggggcggggttgagagggacgatttggggttttcgttaaggaaggaaattttttgtagaatttttttttgtagtgtttggttttgaatatttatataagtgtatagaaaaaaaggaataatttaaatagcgtggaaggggataaagggtggaaagtcggtgttttttttttttttttaggtttttattttttttattattgtcgttagttttttgggtttttggagatggtgtgaatatttatatacgtatttatttggttattttttttatttttttttttaagtagtagtttgttttattttagttttatttttttttttttttttttttggattaatttatatttttattattattattattattattattattattattattgttaatgtttttatttttaaattaattattatttatttaagaggtagagttttattgtgttatttagggtggaatgtagtggtataattatagtttattgtagtttcgattttttagatttaagtgatttttttgttttagttttttgtgtagttgggattataggtgtatgttattatatttagttaattttttgtttttttatttttttagagacgaggtttcgttgtgttgtttaggtcggtttttaatttttgggtttaaaggatttttttgttttagttttttaaagtgttgggattataggtgtgagttatcgtgttcgatttaatgataatgttaataatattaataatgttaataataattatagtaatagtaaagtttttttagggtttagtttgtattagatatagtttgaggttttatatcggggtttttaatttttggattggagataggtatttattcgtggtttgttaggaatcgggttgtatagtaggaggtgagtagtagataagcgagtattatcgtttgaatttcgttttttgttagattatttatattattagatttttaga

SEQ ID NO: 2119 - DNA, 2383 bp, Artificial Sequence
  chemically treated genomic DNA (Homo sapiens)
ttgtttattcgtttttgggtggtagttttatttttgttttttttggttattattgtgtttttagattttaataaagtatttcgtataagaaagtgtttagtttatagttgtagaataaatgaatgaatgaatgaatgaatgaatgaatggaaagtgtttagttttacgttcgatttttagtaagtatttgaaatttaatgtcgtgtggtggtgttagttttggttttcgatttttagttttatttaattttatttttattagttcggcgttcgtgttttttttgtttggttagttttttgttgtttgtatagttttttttttgggttaggacgatttttgagggaatcgtgggtttgtacggttggttttttttggttttgtttttagttttttttatatttttcgggggtagaggtttttgggaaataggttttgaagtttttttgggttagattcgttggggttttttttaggtattgtttgatgtgattttattagtgaataaatggggatagtgagatttagagaggggtagttatgttcgatgttaggtttcggggtttttaaaatatttagggaagtttttaggattttggtttttttgttgtttttggaatagagttgagtttaggtgtttgttttttagatgataaaattgaatttcgttataggttttggagttaggtttgaattttagtttttttattttttggttgtgtgatcgaggtttgttatttggtttttttgaggtttagtttttttgtttgtaaaatggtattttaatggtatttaatttacggaggtgtttggggggataaggttagttattttgtaggtaggtggggtttttggttttttttacggggttttgggatttttggtttcggaatttttaaggtttagtttttttagggttcgtatggttttttttttgttgggataatttatagttttagggttatagttgttgttgttttatttttttttttttttcgattttttttttttttattttggttttatttttttagaattagtttgtttttgttttttgtttttacggttttataaatgagttacgggtttgatttgatttaatttcgttgtaattgttatttttttaagtttgtttttttttattcggttatttacgagattataaaaatttaaataggacggggttttttttagttcggttttttggtttttcgggatttcgggttagggttagtagtttttggagattgaggtggggtttgtggagtttttgtggggagggatttggtgtttttagtaggattgggtatttcgagtttcgggttgtagttttgttgttggatagttttgagagaattgttcgagttttttgatttttttagtattttttttagtaggttttagaatagggaattaaaatttaggtatttttgggttagaaggtgaaaggatgagtaaggtggtttggtgttggtttcggtgaattggagagaataggttttttttaggggacggtggtttttgagttagtaggcggttcggatttttttatttagtaagagaagttagaagtttgagattgtatgtgaaaagttttgatttttaaatgttggttaacgagttaaattaaaaataaataaataaaatttgattttgtggatatttgtggtttcgtgggttatttttggtttagaaggttttaattttagttgcggtagtcgtgtttttagtttttttatttttttgtttgagtagttttttttgtttgaaattttttttttttttttttttattttagttatttttattttttgaatttcggtgtgttttttgttcgtagtttagaagagatgatatttgttttatttatgttcgtttttttaaggcgtttagttgtttttaatttatttttgtttttatgtttttttttttatggagggtttgttttgtttgagatcgttttcgtagtgggggaaattagttttttagttgttaaaagttataatatatattttgtttgttttattatttatttttaaaatggggtacgatatttttttggttatttaaaaatcgaagacgcgaggtcgacgtttttagggatgtgcgttgggcggtaggagttaggtgtggggttaaggagtgggggcggaggaggaagttaggtttttagttagggggttgagggttgtttttttaaagtttgggtatggatatgtgattagggtttattaattatatgtagttatgttagatttatgaattagaagttggaaatgttgggggttgattgtttaggatttcgttttggggtgggtggggttgtagttcggttatttttttagaagttgtagtgggttagttttgggggtagtgattagggtt

SEQ ID NO: 2120 - DNA, 2383 bp, Artificial Sequence
  chemically treated genomic DNA (Homo sapiens)
agttttggttattgtttttagaattggtttattgtagtttttggaaaaatagtcgggttgtagttttatttattttagaacggagttttaagtaattagtttttaatatttttaatttttgatttataaatttggtatggttgtatgtgattggtgggttttggttatatgtttatatttaagttttggaggagtagtttttagttttttggttggggatttggttttttttttcgtttttattttttggttttatatttggtttttatcgtttagcgtatatttttggaggcgtcggtttcgcgttttcggtttttaaatgattaaagaagtatcgtgttttattttagaaatgaatgataagataggtaggatatgtgttatgatttttaataattaaggggttaattttttttattacgaaggcggttttaaataagatagattttttatggaagagaaagtatagaaataaaagtgaattgggaataattaggcgttttgggaaggcgaatatggatgaagtagatgttattttttttgagttgcgaataggagatatatcgaggtttagagaatgagagtgattgagatgaggaggaagaaggagagagttttaggtagaggggattgtttaggtagaagggtggaaggattgagaatacggttgtcgtagttagaattggaattttttagattagaggtggtttacggggttatagatatttatagagttaggttttgtttatttgtttttaatttgattcgttggttaatatttaaaaattaggattttttatatataattttagatttttggttttttttattaaatgggaagattcgggtcgtttgttggtttagaggttatcgttttttgaggagagtttgttttttttagtttatcggagttagtattaggttattttatttatttttttattttttggtttagaggtgtttgggttttggttttttgttttaaagtttgttaaggaggatgttggggaaattagaaagttcgaataatttttttaaggttgtttagtaatagagttgtagttcgggattcgggatatttagttttgttggggatattaagtttttttttatagaagttttatagattttattttagtttttaggagttgttgattttggttcggagtttcgggggattaggaggtcgggttggggaaggtttcgttttgtttaggtttttgtggtttcgtgagtaatcgagtggaaaaaaataagtttgaaaagataataattataacgaaattaaattaaattagattcgtgatttatttatggagtcgtaaaaatagaaaataaaaataagttggttttggagaagtgaggttagggtgaggaagggagaagtcggggaagggaaaaaaataaagtaatagtagttatggttttgggattgtaaattattttagtaaggagggaattatgcgggttttggaggggttgggttttgggggtttcggagttaggagttttaggatttcgtgggagaggttagagattttatttgtttgtaggatggttgattttgtttttttaaatattttcgtgagttgggtattattagggtgttattttgtagataaggaagttgagttttagagggattaagtgataaatttcgattatatagttaggaagtaagaggattgagatttaaatttggttttaaagtttgtaacggggtttagttttgttatttagaaaataggtatttgagtttagttttgttttaaaaataataaagaagttagagttttggaagtttttttggatgttttgggagtttcgaagtttgatatcggatatggttgtttttttttaggttttattgtttttatttgtttattaatggggttatattaggtaatgtttaaggaaggttttagcgggtttgatttaggggagttttaaagtttgttttttagaagtttttgttttcgggagatgtaagaggagttggaggtagagttagagggagttagtcgtgtaggtttacgatttttttagaggtcgttttgatttagggaggagattgtgtaggtagtaggaagttggttaggtagagaaagtacgggcgtcgggttgatgagggtgggattggatggggttagaaatcgggagttaaagttaatattattatacggtattgggttttaggtgtttattaagggtcgggcgtggagttaagtattttttatttatttatttatttatttatttatttatttattttgtaattatggattgagtatttttttgtacgaggtgttttgttgggatttggggatatagtgatgattaagagagataaagatggagttgttatttaggagcgggtagataa

SEQ ID NO: 2121 - DNA, 2495 bp, Artificial Sequence
  chemically treated genomic DNA (Homo sapiens)
atatagagggtatagatttttttttattttttttttttttataaaagaaatgtaaatagaaaatataaataagagtaaaattttatgtaaatttattatttaattatggttaatttttaatattattgtttttttttaaaattgggagtttgggattatattggatttattatttggtaatagattttgattttgtaatatatttttattgtaattttatattattatttttatggttatagatttggtttatagttgtgaaagtagatttattataatgggattagttaattttttttttttggatattaggatatttttaattttttatttttatatagatatttaagtgaatgaagtaaaatgtttgtatatatttttagttatttaaaggtatgatgttagattgtttttttttatttatatttttattatattagaatgttgattatagttatttttgatggtatgatgtgagattattattttgtttttatatttattttttttaaatgttttgtaatgaataggttttatttgtataaatataatattatttaaaatgatgttatgaaaatttttatatgattatcgtttttatggtaatggtttgttacggttgtttgtaattttatataggggataggtcgtaatttatttaattattttttattattgatcggttgggttttttttaatgtttttaagatcgttatataggaaatttattttatatttggggttacgtttttagggagtagtttagtaaaggttggtgaatagattttatatttttggtttattttgttaagttgttttttcgaaaagatgttttaatttttttttttatcggtagtgcgtgggaatgtttgtttagtcgtttttttttttttgagacggtttaggtttttggatagtcgtattttttgttaggagggtaagagaaagtaggaaataatttggttagtaagtgattttagatttagagttaggagtgatttttaataagtttgatttttagaatagaatttgtagagaaaaagaaagtaagtaaggaaaaaaaaaaaaaaatttttttttattggaaaaaatatatatatatatagattaaaataatatttggtatttacgtcgtatttttaaaattttttaaacgttttataaatattagttaattaattaagtcgtttaaatttggttgtagtcggtggagagagttcgagaggagttaaaaaaaaaatgggggagttagcgttatataattttagattttattgtcgtttgtttggggtgtgattataggttttcggttgtattataagaatagttttgttttaatatgttgtacgtttgatttcgtagttttttttgcgttttttgtttttttattaattgttgatttatagttttttgtggtgttattgataaggataataataattgtaagttaggttgagtttcgggtttcgggtttgtatttttttttggatatgttagtattaattttatttaatatatgaagagagaggagatttgtttagggttatggagttaacgatattttttttttttttatttattatcgtatttattttgtatatttttatcgatgatattgtgttttaggtaggaggttggaaatagttttttgtggattttatattttattattgggaatgtgataatttagagaaaattaaatatgtgaataatatagttatgtgataataatgggaataagaattaaaatttatttagtatttatgtagtaggtatattatcgtgttagggtttttatgattgtgttggggtggatgtcggaattttattttatggatgatggaatgggggtttagggaaggtgggtatagaggtggttaagaggggagttatgttgttatttaggtttgttggttttagtaattgtgttttttcgaggtagtttttttagttggtttagtttcgaggttgaaatatagatttattcggaaagtttttagtttagtgttgttggtgttgtttttgatgttttcgtttggatgggtttttcgggttttttatatatttggttattagttttattttttttaggtcgtttgatgttggttgggtttttgtttattgtgggttttgtttgtttattgtgggttttgttttttttttttgtgttatgaagattttgttatgtttaattttaaatggaaatgaaatgagaagttggattttttgataataaaagtagttgaggttttaagtggttgattaggaaaaggaagtcgaaatggtaatatttatatttaaagtaggtggagtggttttaggtattttgagattttatttatttgttatgagaatcgggttttaagggtgattttttgttagagttaagattgggtgaggttgggaatgggagaaagaggtaggataatgggtagatagttttgggttttttgtagtgagggtagataggggtttgtgagtttttttttttggtt

SEQ ID NO: 2122 - DNA, 2495 bp, Artificial Sequence
  chemically treated genomic DNA (Homo sapiens)
agttagggaaagaggtttatagatttttatttgtttttattgtaggaagtttagggttatttgtttattgttttgttttttttttttatttttagttttatttagttttgattttggtaagggattatttttggggttcggtttttatggtaggtgagtggagttttagagtgtttaagattattttatttgttttgggtgtaaatattattatttcgattttttttttttgattaattatttaagattttaattgtttttattattaggaagtttagttttttattttatttttatttgaagttgaatatggtaagatttttatggtataggagaaaaaaatagaatttatagtggatagatagaatttatagtggatagaggtttagttagtattagacggtttgagaggggtgaggttggtggttaaatgtgtgggaggttcgggaggtttatttaggcggggatattagaggtagtattagtagtattgagttaggaatttttcggataggtttgtattttagtttcgagattggattaattggaaaggttgtttcggggaagtatagttgttagggttagtaggtttgggtgatagtatggttttttttttagttatttttgtatttattttttttggatttttattttattatttatgaagtggggtttcggtatttattttagtatagttatgaggattttgatacggtggtatgtttgttgtataggtgttgggtaagttttaatttttatttttattattattatatagttgtattatttatatatttgattttttttggattgttatatttttaatagtaggatgtaggatttataagggattgtttttaattttttgtttaaaatatagtgttatcgataaaaatatgtagaatgaatgcggtaatgaatgaaggaaggaaggatgtcgttggttttatgattttgggtaaattttttttttttttatgtgttaggtggagttgatattggtatatttaggggagggtgtaggttcggagttcgggatttagtttggtttgtagttattattatttttattaataatattataaggggttgtgagttagtagttggtgagggagtaggaggcgtaggagaggttgcggagttaggcgtgtagtatgttggagtagggttatttttgtggtgtagtcggaggtttgtaattatattttaggtaggcgataataaaatttggagttgtgtagcgttggtttttttattttttttttagtttttttcgagttttttttatcgattgtagttagatttaggcggtttaattaattagttagtgtttataaagcgtttgaagaattttaaaagtgcgacgtaagtgttaaatattattttaatttgtgtatgtgtatgttttttttagtagagaggggtttttttttttttttttttgtttgttttttttttttttgtaggttttgttttgagaattaggtttgttaaaaattatttttggttttgggtttggggttatttgttggttaaattattttttgtttttttttgtttttttagtagaggatgcgattgtttaggggtttgaatcgttttagggagaggagggcggttgggtaggtatttttacgtattgtcggtgggaggggaaattggaatattttttcgggaaagtagtttggtaggatgaattaaaggtgtgaaatttgtttattagtttttgttgggttgttttttgaggacgtaattttagatatggagtaggttttttgtataacgattttaaagatattagaaaaagtttagtcggttaatgataggggatggttaagtgaattacggtttattttttatgtggaattataggtagtcgtaataagttattattatgaaaacggtggttatatagaaatttttatggtattattttaaataatattgtgtttatgtaaataaaatttgtttattgtaaggtatttagagaaaataagtatggaaataaagtaataattttatattatattattaaagataattgtaattaatattttgatgtagtaaaaatatgagtgaagaaaaataatttaatattatatttttaggtaattaagaatatgtgtagatattttgttttatttatttaagtgtttgtatgaaaataaaaaattgaaaatattttaatatttaaggaaaggagattggttgattttattatggtgaatttatttttatagttataggttaagtttatagttatgaaaatgatggtatagaattataatggaaatgtgttataagattagagtttgttattaagtagtagatttagtgtgattttaaatttttaattttagaaaaaaataatgatattaaagattagttatgattgagtggtagatttatatgggattttgtttttgtttatgttttttgtttgtattttttttgtaagaaaaaaaaagatggagaaaaatttatattttttgtat

SEQ ID NO: 2123 - DNA, 2491 bp, Artificial Sequence
  chemically treated genomic DNA (Homo sapiens)
aaaaaagaagatatttacggtgtttttgtattatatgtttgatagatatattatgtgtatatggtgggtatgtgttttgtatgattaagttttttttatgtgtataatggatataaaatgtgtgggaggaggatatgttatgtgggaggtgaatttgttgggggtatttgttatatgggatggttttatagtatttgtaataattatattttgggtaattatttataatataaaatgcgtattaatgtatttgttttgtgtattttttatttttttgtgtatatattgtgtagggtgggtatatatcgtgtatgatgggtataggttttgtgtttgtttagtatgttatatgtgtgggatgagtgtaggttatatgtggagtatatgttgtttatgtttgtgtgaaggttatatttcgagtgtgtgtgatggttgtattttgtgagtaatagtatttaaggtataaatagtgtttataaagaatgtgttgtgtttgaggagtgtatatggtgtgggtgatgggtatattttggggagggatgtgttgtataatagatgtgttatatgggtgatgagtatatattgtgacgtatatatagtgtgtgataatattatatggggtatgtgtgcgtatacgttatatacggagtatatattgtatgtgtgatgggtatatagtgcgttgggtataatgagtaataagtataggtagtgtatataatggatttattttttatggtgaatatatattgtgtgggagtgttaagtatatattttgtggtataaataagttttgtgtgattagtatacggtgtgtatggttgtatagcgaagttgttattgtgatgggtttgtttggtgtgtattaggtattttggtatatggaggttatgatgggaatatgggatgtgtgtttgagtgggagtaggtagaggggatttattttgtggggagggggtatggtagggagtagttggatttttatttgtttttagaatttttagatttttgagtttatcgattatattgttttaggtttttttttaagtttttttttaaatgtaattagaattgtttgaagaatgcggggaattttagagatatgcgtcgtttttaggtgggtttggagagagggtttttttttgtaattttatttttttttgatggaggggaggggagggggaagggaaggttgtgattttgttattttgggaaaggtttttaaggtagatttttgtttagttttgtgtttttttagtttggttggtgtttgttgggggtggggtagtttttttttaatttgtgttggttgttaagggaggttttattagagttttatttaagaagatgttaattgtgatatttttatatgattaacgatttaggtaatttgtatagcgtgaagcggagagtagttgtttttagtatatttttaagttgtatattttttttagtgtagggcgggggaagaaggtagttttagttttttttttagaatagggtaggggtttttgttgttgagtttttcggttgatgttgtttatttttatttgtttaagattttatttttggtttggaggttcgtggatataatttagtattttgtgtatgtaaaaatagtagttattttttgtttaaggagttagtttttttaggggtttttatttttgtagcgtttggggagttagtttatttgggggtattatttgatttagttggtttttttttattagtttagatattgtaggattgaagtttttttttttttattagtgattttaaattttagtatttaattattagttttaaggtgttggttttttattatatttttttttcgggagttttcgagggttttagttaggttggtttcggtttttttcgtaggtggtggtgtttacgacggtgagcgtggacggatacgtgttggtcgtgttcgataatatgtttgtgtataataattttaagtatggtcgtagggcgcgtcgtttggattttttcgaaggttaggattttcggtttagtttcggtcgtcgcgggtttagttagttttttaggttttattttagcgcggttttttgatttgggtttttttttgttttttagttgttattttttgtattaaggttattagtttcggggagggttggattacgggcggcgttatcgttattgttatcggcgataattttttcgacgggttgtaggtcgtgttcggaaacgtgttcgtgtggagcgaggtgggttaatttcgttagtttttttttgggtttaggggttgggtttttttttcgtcggtgcgggatttgtaggtttttttttttttttcgtagtttattacgttttacgttattcgggtgtagacgttttcgcggtatattttcggggtggtggaggtgatttttttttataagtttaagtagttttgtaagggatgtttcggtcgttttgtttatataggtaaggagtcgggcgggggagtggaggttta

SEQ ID NO: 2124 - DNA, 2491 bp, Artificial Sequence
  chemically treated genomic DNA (Homo sapiens)
tagatttttattttttcgttcgattttttatttgtgtagataaagcggtcggggtattttttgtaaaattgtttggatttgtaggagagggttatttttattatttcggggatgtgtcgcgggggcgtttgtattcggatggcgtggggcgtgatgagttgcgaggggagaggggaggtttgtaggtttcgtatcggcgaggggagggtttagtttttaggtttagagggagattggcggggttggtttatttcgttttatacgagtacgttttcgaatacgatttgtaattcgtcgaagaagttgtcgtcgatgataatgacggtggcgtcgttcgtggtttagtttttttcggggttgatggttttgatgtagggggtggtagttgggaggtaggagaggatttaggttaggggatcgcgttgaggtggggtttggggggttggttgggttcgcggcggtcggggttgggtcgggggttttgattttcggaggggtttaggcggcgcgttttgcggttatgtttggagttgttgtgtataaatatgttgtcggatacggttagtacgtgttcgtttacgtttatcgtcgtggatattattatttgcggggagagtcgaggttagtttggttggggttttcgggggttttcgggaggggaatgtggtggggaattagtattttgaggttggtggttggatgttggaatttagggttattggtgggaggaggagggttttaattttgtagtgtttgagttggtggaagggggttagttggattaggtgatatttttagatgaattgattttttaggcgttataaaaataaagatttttgaaaaaattggttttttaggtaaagaatggttattgtttttgtatatatagaatgttgggttgtatttacggatttttaagttaggaatggggttttaggtaagtggaggtgggtagtattagtcggagaatttagtagtaggagtttttgttttattttggggagaaaattggggttgtttttttttttcgttttgtattgagaggggtgtgtagtttggggatgtgttaagggtagttgtttttcgttttacgttatgtaaattgtttgggtcgttaattatgtaaaaatgttataattagtatttttttaagtgggattttaatgaagttttttttggtagttagtataagttgagaaggagttgttttatttttagtaggtattaattaggttggggaggtatagggttgggtagagatttgttttggaggttttttttagggtggtagggttatagtttttttttttttttttttttttttttattaggaaagggtggggttgtaaggggaaattttttttttagatttatttggaagcggcgtatgtttttgggatttttcgtattttttaggtagttttggttgtatttgaggaagaatttgaggaagaatttgaaatagtgtggtcggtgggtttaagggtttgggggttttggaaatagatgaagatttaattgttttttgttatgttttttttttataggatgagttttttttgtttgtttttatttaggtatatattttatatttttattatggtttttatatattagggtgtttgatatatattagatagatttattataatgataatttcgttatataattatatatatcgtgtgttgattatatagggtttatttatgttataaagtgtatatttagtatttttatatagtatatatttattatgaagagtaagtttattatatatattatttatatttattatttattatatttaacgtattgtatatttattatatatataatatatgtttcgtatgtggcgtgtacgtatatatattttatgtaatgttattatatattgtgtatacgttatagtatatgtttattatttatatagtatatttgttatataatatatttttttttagagtatatttattatttatattatgtatattttttagatatagtatattttttgtagatattgtttatgttttggatattattatttataaaatatagttattatatatattcggggtataatttttatataagtataaataatatgtattttatatatagtttgtatttattttatatatatggtatattaagtagatatagagtttgtatttattatgtacggtgtatgtttattttatatagtatatgtatagagaaataggaaatatatagaataaatatattaatacgtattttatgttgtaaatgattatttaaaatatagttattgtaaatattgtaaagttattttatatagtagatgtttttagtaaatttattttttatatggtatattttttttttatatattttatatttattatatatataggaaaagtttaattatatagagtatatatttattatatatatatggtgtatttgttagatatgtggtatagagatatcgtgaatgttttttttttt

SEQ ID NO: 2125 - DNA, 2395 bp, Artificial Sequence
  chemically treated genomic DNA (Homo sapiens)
aagtttatttttattttcgggattttgtatttgttggttttttagtttggaatgtttttttattatagtaagatttgtttttttattttttttagatttttgtttagatgtgatttttaagaagtttttttgttttttttatttaatttgggtttttatttatttcgttttttattttttttttttattttattttttattatggtatttattattgtttgtggttaaattttttatttatttgtttattttttgttttattattggaatataagttttatagagtaagtagtttgttttttttgtttatttttgtatttttagtatttagaataagtttggtatatagtagttgtttaggaaatttgtgtaaaatgatgaataattaattattattttttttttatgattattgaagagttatgtttttgttgttgtttgttttttttttttttttgggataaatttggtttttaattttaattttaggagatgaaggttgtatttttaagggaaaaaaatgtatttaaggaataatttgatgataaaatttttaattttttgtaatatggattgaagtttgtgtttttttagttttattcgaagattttaaaatttatattgttttttttaaattttaatatttagattgttttttaaatttaaagttgtggatgaatttttgtgatttttgtacgtattttgattgttacggttattcgaagttttttttttaaaattataggatggtttagttaaattatgttttttttaaattattttattgagttttttttgttatattttaaagagaagatgtatttttttattagtagttggaatttgaaagaataaataatttaaaatagatttagtttttgttggtttttatgattatgaaggtatggaatattatttattaataagtgtcgtcggttgattgtttttttttgtatataaaaaatgagtatgtatataatcgtagtaatttgtttttgttgtagagtgaatagttttagaaatggattattttgttttattttgtttttatatatgtgggatttagtatgaggttatttagaaataatagaattaggtcgaggttagttaatatagtcggtagttgttattgaatgtttattgggtggttgtaggtttttggttgattacgtttttaagagttggttaatggagttttcgttatagttttggttaagttagtatatttaatagttcgtagtgtaaatgaaaaatatataggtttgattagggagtattttttttttttgttttttttcgtaaagagaggaaagtgattgttttggaagtttttgatattaatagttatgttggtatgtggttgtaagataatttgagttaagatggtgatatgttatttaaaataataaggtcggtatagtggtttatgtttgtaattttagtgttttgggaggttaaggtgggaggttgggtttaagtttaggagattaaggttgtagtgagttatgattgtgttattgcgtttttgtttgggtgatagagtagaattttgtttttaaaagaaaaaagtaatagggtgtgttgtgttattgttatatttataaattattttttattttttagagtatggttgtttttatgattttatttgttgtaagagattttaaatgatattgattaatatttttttgatagtgtaagtttttatttttagaattgagtattatgtaattgacgatatggggagtggggtttgaattttttggattatttagggttgggatgtgagtgttattggagagttttttggtttataggaaggaagggttgtatatgggtatagggttatacggaggtattgtatgagtggtgggaggttagttggtattaagtattgttttttattattagtgggtgtgaatacgattgtaggttatttttttgtgttgtttaggttttgtttttattttttttttgttggtttgattaagttgtttattgtttgtagatggtaataaaatataattaagttgtttgttgttgaagtttttgtaggaaaaaattatttagttttattaattttgtaattatagtttttttttttttatattgaaatagttatttatatgatttttttataatgtgaagtttttaggaatatagttattatagtagagttaattgtaatatgtttgaatgtaaggatttaaattattgaggattattgttattttgatatttgtataaaattatgtattgttaaaaaaaaaaaaaagaaaaagattatgtattgttattgaggtagtttgtataggatagtaagattttttttaagtggtttttttttgatagtttttatagatggtttttttgtgagttgttattatagtttttt

SEQ ID NO: 2126 - DNA, 2395 bp, Artificial Sequence
  chemically treated genomic DNA (Homo sapiens)
aagggattgtgatggtaatttataggaaagttatttgtgaggattgttaaaggaaagttatttggagaagattttgttattttatataaattgttttaatgataatgtataattttttttttttttttttttttgatagtgtataattttgtataggtattagaatggtagtaatttttaatgatttggatttttgtatttaaatatattataattagttttgttataataattatgtttttaagaattttatattataaaaaaattatataaatagttattttaatatgggaaaaggagggttgtggttatagagttgataaaattagataatttttttttataggagttttaataataaataatttaattatattttgttattatttgtaaataataaatagtttgattagattaataaaagagaaataaaagtaaaatttgaatagtatagaaaaataatttgtagtcgtatttatatttattgatggtagagaatagtgtttgatgttagttggttttttattatttatatagtattttcgtgtggttttatatttatgtgtagttttttttttttgtgggttaaggggttttttagtggtatttatattttaattttgagtggtttagaaaatttaagttttattttttatgtcgttagttgtataatatttagttttgagaatgaaaatttatattgttaggaaaatattgattaatattatttaaggttttttgtagtagataagattataaaaataattatgttttggaaaataaggagtggtttataaatgtaataatagtatagtatattttattattttttttttttagagatagggttttgttttgttatttaggtaggagcgtaatggtataattatagtttattatagttttgattttttgggtttaagtttagttttttattttggttttttaaagtattgggattataggtatgagttattgtgtcggttttgttattttaagtggtatattattattttaatttaggttgttttatagttatatgttaatatggttattaatgttagaaatttttagagtaattatttttttttttttacggaaaaagatagaaagggaaaatgttttttagttagatttatgtattttttatttgtattgcgggttgttaaatgtgttagtttaattaagattgtaacgaggattttattaattagtttttagaaacgtggttagttaggagtttgtagttatttagtgggtatttaataatagttatcgattgtattgattggtttcgatttgattttgttgtttttgaatagttttatgttgggttttatatatgtaaagataggatgagatagaatggtttatttttgaagttgtttattttgtagtaaaggtaggttgttgcgattatatgtatgtttattttttatgtgtaagagaaggtagttagtcgacgatatttgttaatgaatgatgttttatatttttatagttatagaaattaataaaggttgaatttattttgaattatttatttttttaggttttaattgttaataaaggagtatattttttttttggggtataataggagggatttagtaaagtagtttggaaaggatatggtttagttaagttattttgtggttttgaaaaggaagtttcgagtgatcgtagtagttaaagtacgtatagaagttataagaatttatttataattttagatttgaaaaataatttaaatgttaggatttggaaaaagtagtatgaattttaggattttcgaataaaattgggaagatataaattttaatttatgttatagaaaattggagattttgttattaaattgttttttgggtatattttttttttttaaaaatgtaatttttattttttgaagttgaggttgggagttaggtttgttttaaaaaaaaaaaaaaaataaataataataaaaatatagttttttaatgattatagaagagaaataataattaattatttattattttgtataaattttttgagtagttattgtatgttaggtttattttaggtgttggagatataggagtgaataagagagataagttatttgttttgtggagtttatattttagtggtgaaatagaaaataaataaataaataaggaatttaattataggtagtgataaatgttataatgaaagataaaatagaggaaggggatagagagcgaggtgaatggaggtttaggttggatggggaaggtaagaaggttttttggaagttatatttgagtagagatttgaagaaagtgagggaataggttttgttgtagtggaagaatattttagattaagggattagtaagtgtaaaatttcggaggtgggagtgagttt

SEQ ID NO: 2127 - DNA, 2469 bp, Artificial Sequence
  chemically treated genomic DNA (Homo sapiens)
gttttttttttgagggttttaggggagatttttttttgttttttttagttttggtgtttgttggtaattttaggtttttttgggtttgtaaatgtattgtaatttttgtttttgttattatatagtttttttttttgtgtttttgttttttttttttagaagaataatagttatattggattaaagatttattttaatgagtttattttaatttgattataattgtaaagattatttttaaataaagttatatttataggtattgggagttaggatttattttaatattttttggattttatgatatttagtttagtttataattaaatttataatgtttttcgtgagaaagaagtagtagttatgaagaaagtttagatatttttaagggtggagagcgtttttgattttttttttgatagttttgagtttttttaaatattgttgtttttattgattggtttgttttaggagtagggtttttgatttttaaattttggagtgtagtttagtaaagtgagataagtatattttttgtttttgaggtttaggagtattggaagagtggatagattaattgtgaatagagaatgttttgaaaatataggaagaattatttttttgtagatgtagttttggttttttgtgggagtttttggattttcggtgaggtagatttggaaggttatagtaggggatgtaaagagtttttttttagattcgttttttggtttattattttgtttttttaaatgtattttaagggttttttattttgattattgtttagtggtattgttgtagaggaagtaggagggtgtttggtggagtttgggaggtttatgaatttttgtatttggagaaatgttaatgttgagtttatatttttttttttgtagtatagaagattattattaggtttgtgtgtagaagtttaagtagttagagggggtttttgcgaggtttgtgggatttttttggttagaagatgggttatggtggaggaaggttatgttaaatggttgtgatttattgtttatagggaagagtacgtaatatatatttaggagggtttaggtagtcggaattgtggcggttttatatttttaaagtgaattttaaatttgatttatttatgtcgtttttatagtaataggaaaattgtttcgatttatagttacggaagattttgtaaaagaaattgtaggaggaaaaaaagataatgttaggaaaaaaaaaaatttaatgaagtattatttttttatttatttagttaattgagaataatagtttgtgtatttggtaattaaatgggaagtggtatttcgtgttgtaatatgaatttgtttatattaagtgatttatttttttgtttagatatattgtattgagaattttttttaagtagaaagttattaaaaatgtgagaataagtagtttttattaatttgaagtatttggggatttagaggaatgataaatgtaaatagtttagaatttagaaattgttttgaatatttaaattttagattttgggaatgtgtgtatgtttttagttagttagatgtagataatttttttttttgtgaggtttttttttatttatattttgtttggatagggtggagtttttgtttaaattttatttttagtttgaagaaagattaaattattgtagattaaagttagtgttattcggaaaatggaaaagatataggagatagggtatgttttttttagttcgattgtgaatttagggttttttttttggtgagtgtttttgggaggttgtataaggtttatgtttagttattgggttaagttgaaggaacgttttttattttttttatgtttgtattgaagattcgtgtttggtaattattttatagattttttttattatttgattttgggtttgtagttaatgttgtgtttagtatatttttgtgtgattttgataagaaatttattggttaaagattttgtgagttatttttgttttttgttttttttattttttatttaatatgtttgtttgtattatatacgtataaatataatcgagttgtattatattaattttttttttttttaaaaatatattaaaattattttttttttttaatttgtttatttatgagtttttgtacggtaatattttgatttttattttggttgagaaattatataaattagtttattgtatgttgttttattttgtatttatggttatgatattgaaattttaggattatatatagatagtatagtttttggttatttaagtatgtaaatagtttggttttttataaagtggaaaaatattttttgtgtattattttaatatgattagtatgttgaaatttggtgtgtaattgtgttaatatttttttggttttgaggagtaaattcggagaattttatggtaatatataaaatgtaaagttggtttgtttattattgggattt

SEQ ID NO: 2128 - DNA, 2469 bp, Artificial Sequence
  chemically treated genomic DNA (Homo sapiens)
aaattttagtagtaaataaattagttttgtattttatatgttattatgaggtttttcgggtttgttttttagagttaaagaaatgttgatatagttgtatattaagttttaatatgttgattatgttaaaatagtgtataagaaatatttttttattttataaaaagttagattgtttatatgtttaagtggttagagattatgttatttgtgtgtggttttgaagttttaatattataattatgaatataaaatggagtagtatgtaataaattagtttatgtagttttttagttaaaatgggaattaagatgttatcgtgtaagagtttataaatgggtaggttagaaaaggggaataattttaatatatttttgaaaaaaaaaagaattaatgtaatataattcggttatatttatacgtatataatatagataaatatattaaatagaagatgagagagatagaggatagaaatagtttataaggtttttggttaatagattttttattaagattatatagaaatatgttgagtatagtattaattataagtttaggattaagtggtagaaaagatttatgaaatggttattaaatacggatttttagtataaatatgagagagatgagaggcgtttttttagtttggtttagtagttgaatataagttttgtgtaattttttaggagtatttattagaggaggggttttaagtttatagtcgggttaaagaagatatgttttgttttttatgttttttttatttttcgagtagtattggttttggtttataataatttagtttttttttaagttagaaatagaatttaagtaggggttttattttgtttagataagatataagtgaaaagagattttatagaaagaaaaattatttatatttgattaattgaagatatgtatatatttttagagtttagagtttaaatgtttaagatagtttttggattttgggttgtttgtatttattatttttttaagtttttaaatgttttaggttagtgaggattgtttgtttttatatttttaatagttttttatttgaagaaagtttttagtatagtgtgtttaaataaaaaaataaattatttaatgtgagtaggtttatgttgtaatacgaaatgttattttttatttgattgttaaatgtataaattgttatttttagttgattgaataagtgaaagaatggtattttattaaattttttttttttttggtattatttttttttttttttatagttttttttatagagtttttcgtggttataggtcggaatagtttttttgttgttatgagaacggtataaataagttaagtttaaaatttattttgggggtatggagtcgttatagtttcggttatttaagtttttttgggtgtgtgttgcgtatttttttttataggtagtggattatagttatttaatatggtttttttttattatggtttattttttggttagaaaaattttataagtttcgtagaggttttttttaattgtttgggtttttatatatagatttagtaatggttttttgtgttgtaaggagagaaatataagtttaatattaatatttttttaagtgtagaaatttatgggttttttaaattttattaagtatttttttattttttttataataatgttattgagtaatgattaaaatgaggagtttttggaatatatttggaagggtagaataatgggttaggaagcgggtttaggaaggggttttttatattttttgttgtagttttttagatttgttttatcgaaggtttaggggtttttataagggattagagttatatttgtaggagggtggttttttttgtatttttagggtattttttatttataattaatttgtttatttttttagtgtttttggattttagagatagaaggtatgtttgttttattttattgaattgtattttaaggtttgaagattaaaaattttatttttaagataagttagttagtgaggataatagtatttagggaagtttaaggttgttaaaggaaaggttaagagcgttttttatttttaaaaatatttaggttttttttatggttgttgttttttttttacgaagagtattgtgggtttaattgtgggttgaattggatattataagatttaaaagatattaggataagttttaatttttaatatttgtgaatgtgattttatttggaaatagtttttgtagttgtaattaggttaagatgagtttattagggtagatttttaatttaatatgattgttgtttttttaagagaagaagatagagatatagagagaagagttgtgtaatgatagaggtaaagattgtaatgtatttataaatttaagaaggtttagggttgttaataaatattaaaattagaagaggtaaggaaggattttttttagagtttttagagagaaagt

SEQ ID NO: 2129 - DNA, 2485 bp, Artificial Sequence
  chemically treated genomic DNA (Homo sapiens)
ttattaagtttttttaattggatgtttatgaaattttaggtttaagattagatttttttttttgatattagtatgaggtttttattttgttaattgtagggaagggtgcggtggattttaagatttgttgttttgtgttttgtttttgttttagtttagttgaggtagtggttagtaattaaggggaaaaataaatttttaagtgttgagatttagttatcgatatagtttttggagtaaatttgtattttgttatttattgtttggttaggtaataagtttattttgtttggatttgagtagtagtttggagaaaaaaaaaattatattgacggtaatagtttgaaatatgaaattgtttttatttttagtttggagaaattgtagggtacgttttgtttaagtaatttttttgattttagtttgaatataaatggaatattaaaagtgttgggtatatttttttttattttttatttagagattgattttattattataattgtgggtttgtttggtttttggtagttttttttttttaagatttttaatagttttgtagacgattgttgtagtttagtttttttagatggggttgtagagaagaaaggttatgtttttaaaggtttagtatcgttttgttattgtttagtttggttcggttttatttagttgtgtgttttttttttatttgtttttttgagtttttgtgtgggtttttgttattattatttttttacgattatttattttagtaaatagtaatgatataagatgtatgatgtatttttttttttttttttttttttatttttttttttttttttatttttgggattattgaaaagttttataattatttataaatatgtaaagggtgtttataagattggagtaagggtggtggtatggggtaaagttagtagtgtttttttaggtgtttcgtgatagaggagaagggtgtatttggtttgttgtagtttgagtagattttggggttgaaagttatttttttgattatgtgtttagattttataaaattatagttcgggtttattggttgggtaatattatttgaagtgagtagaataatttaaatttttttattcgtaatataaaaggaaggggttatttgttttagggatgggtacgttttggtgtaatttggtagagtattttagtaattttattagatgttaggttagggtaaaagtggaaatgcgtttgtttagtatattttgggttgattatttggagtgtatgtttttgatttatttgtatataatttatttagggggtgttgtaagagttatgcgatggttaaaggaatttaatgcgttttttattatgttttttaaataagtttttttacgttgattgttttttggaattaagaagttttatttttttagtttcgtgatagattttaaaatgagatttttataaatttgagaataagttttagttttggttttaggattatttgttttgattttaagggttagttgaggagtgtgaaggttaggatgagttatggggtgagtgaaaattgtagttgggaaagtttcgttttgaggagtttgtatttatgtttttatatattttgaagtaattagtttttatttgtatttgtggtttttttgtttttttggttttatgaggagatagtagttttgttatttattttttgagagatagtgtggtaaagttagggatagtatgggttttagaattagattttttatgtttgttatttattagttttgtgattttaggtaagttgttgatgtttttgtgtattagttttttttggtggtaaaagttatttggtaattattttaaaatttaatagtttgagataatgattacgggattgttgtgggttaggaatttgattgggatttagttgggagagtttgtttttgttttatgtgatgttggttagagtgatttaattgaggttggaagatttacgatggttttatttatatgattgaggttttagagttagacgtgggttgagggattttggtttttttttatgtagtttttttttttatatggtttttatatatgtagtggtttaggttaagtttttttatatagcggttagaatattttaagagaatgaaaatgaaagttgtaaggtttttgttaatatttgttattattttatttttatttattttgttggatagagtgaattatatggttaatgtagatttttagggaggagaaatgggttttattttttttaatgggagatgtggtatataaaaatatagatgggaggtttttataagagttaaataatataggtggagtatttaggatagtgtttggtatagagtttgtgtttataaatgttatgttttattataatatgattattttggtattattttaggaataaatatagtatatgtttattttttgagtgaaaggttttttaatattatatggaggagagataaattttttaggt

SEQ ID NO: 2130 - DNA, 2485 bp, Artificial Sequence
  chemically treated genomic DNA (Homo sapiens)
gtttggagagtttgttttttttttatgtggtattgagaagttttttatttaggaagtaaatatgtattatatttgtttttgaagtgatattagaataattatattataataaaatataatatttatgaatataaattttgtattaggtattattttaaatgttttatttgtattatttaatttttgtaaagattttttatttgtgtttttgtgtgttatattttttattgagagaggtggagtttattttttttttttggagatttgtattagttatgtgatttattttgtttagtagaatgggtaggagtggaatggtgataggtattaatagaggttttatagtttttatttttatttttttggaatgttttaatcgttatgtaaggaagtttagtttagattattatatgtgtagagattatgtaaagagagaggttgtatggaggagaattaaggttttttagtttacgtttagttttgaggttttagttatgtgagtagggttatcgtggattttttagttttaattgggttattttagttaatattatatggagtagagataagtttttttagttgagttttagttaaatttttgatttatagtaatttcgtggttattgttttaaattattaagttttgagatgattgttagataatttttattattaaggaaaattggtgtatagagatattaataatttgtttaaagttatagggttagtaagtggtagatatggggagtttggttttagagtttatgttgtttttaattttgttatattgttttttaaaaagtaagtgatagagttattgtttttttatgagattaaagaaataaaaagattataggtgtaggtgggggttggttgttttagggtgtatagagatataagtataagttttttaagacgaggtttttttagttataatttttatttattttatggtttattttagtttttatattttttaattaatttttagggttagagtagatagttttggagttaaagttagaatttgtttttagatttatgaaagttttattttgaagtttgttacggggttggaagaatgaagttttttggttttaagagataattaacgtagagagatttgtttaaaaaatataataaaagacgtattgggtttttttggttatcgtatagtttttgtaatattttttggatgagttatgtgtaaatgaattagaaatatgtattttaagtaattaatttaagatgtattgggtagacgtatttttatttttgttttaatttgatatttgatagagttgttgagatgttttgttaaattgtattagggcgtgtttatttttgagataaataattttttttttttgtgttacgaatggggaggtttgaattattttgtttattttaaatgatgttgtttagttaatgggttcgggttgtggttttgtggagtttggatatatggttaagagggtgatttttaattttagagtttatttaggttgtagtaggttaagtgtattttttttttttgttacgggatatttagaagggtattattagttttattttatgttattatttttattttagttttgtaggtattttttgtatatttgtaaataattgtggagttttttagtaattttaaaagtaaaaaaaaaaaaaagggtaggggggaagaaaagaaaaggaatatattatatattttgtattattgttatttgttggaatgaatggtcgtgggagagtaatggtaatagggatttatatagaagtttagaaagataagtggagaaggagtatatagttgggtagagtcgagttaagttgggtagtgatagggcgatgttgagtttttggagatataattttttttttttgtagttttatttgagggaattgagttgtaataatcgtttgtaaggttattaagggttttggaggggagaggttgttaagagttaggtaagtttataattatggtaatgaaattagtttttgggtaggagataagagggaatgtgtttaatatttttggtattttatttgtatttagattggagttaaagggattgtttaaataaaacgtgttttgtaatttttttaagttgggaataaaaataattttatgttttaagttattatcgttaatatgattttttttttttttaaattgttgtttagatttaaataaaatagatttgttgtttggttaggtaatgagtagtaaaatataaatttattttaaaagttatatcgatgattaaattttaatatttagaggtttatttttttttttaattgttagttattgttttaattgaattaaaataaaaataaaatataaaataataaattttaggatttatcgtatttttttttatagttaataaagtgaaaattttatgttgatattaaaagaagaaatttaattttgagtttgaggttttataggtatttaattaaaaagatttaatga

SEQ ID NO: 2131 - DNA, 2500 bp, Artificial Sequence
  chemically treated genomic DNA (Homo sapiens)
atatattatgatgttgttaattttttggtgttattagtagtaatttgattgttttattttgaatatgaaagttaagttttgaatttttagaaatggattatagggttatgagggtaagtatttatgggatttatacgaggttgtgtttagtttaatttagttttttttgggtttattgattagtaagtatttttagagtattaatttgtggaatatatagtatttttaaaagataagatataagtaaaaaaaaaaaaatgatgttagaggtttggtggtggttaaataattggggagtaatattaatagggtattattaatggttaaaaaaaaaaaaaaatgagttggatgtaggtaggtaattagtaatgtttatagttaagaaaatttttgttggggttgttaagaattgttttttagtatagggttaatggttagtggaaaagattttatagagtaaagaagggtttgagaggtattttgaagtttgagtgagatttatatggatggtaagggataagttggttttttcgtgtggtagatatatggttagaagattagagggttaagtggattagagatgggtgatgagattgagatttgatttgtaattttgttattttttaattgtgtgatatttatttttagtggttatataattattgtaggttttagtttttttatgtgtaaattgtagacgatggtattttttattggaagagtaaatgataatgtatatatagtatttaaagtaggatttgaggtatatagagttattttttatggtttttattatgattattattatcgttattgttaaaggattttgataagaaaataggattaagtgtgagtattaataatttgtttttgttatttttgttatggtgatgggaggtatttttagttgggttatttgatttatgttaatggggtagttggaatgagtaggtggtaggaaaaaaggtaggaaaatggattaaatttggtttataaagtattgagaaggtaatgggagagttaagtttaggatattgttgtttagtttggttttatatgaatttaatattttatatttgtggaattttacgaggggttaagttaggttgtacggtgaattttggtttagtcgtgagaattttgggagaaaatgaagtataatagaaatttttatagaaagttgcgggggtatcgtagttagagtagagagttcggaattcgtcggtttgaattaggatttagttaagtttattttattaaaatttatgaagttaatagttttttttatttggtttttgaaggaatatttttattgtgtaattattttcgtggaaattgtaatattgtgtttgttattatatagtattaatattaaatggttaggtgataaaagttaaggatattaagttaaaagtttatgttgtatttttattgtatattataggttataaattgagagtgtgttttttattattttaaagtttttggggttggatttttgtttagtaattttatttatataatatatttgtaattatttttttaaatttttaatttatttttttgaaataatagtattagggtttttgattgttattttgttgttgttttgtttgagggaattattagatagcgatggtaaatgtaatttatagtataagttaattatttgaatggaggttgttttgaattttttaggtaatgtgatgggtgaagttatagtaatatttttgagtaggttttttttgttattagtaattagttttatgtattagttaaatgttaaggtggggttttttggttagtatattggatttttgttgaagtttttttaggaggtgttgtgggtggggggagtattgcggagagggtaaggttttatttttttaatttgagttttagttaagattttaattgagtagggagtggtggtttatgattataatttcggtattttaggaggtttaggtgggagaattgtttgaatttaggagtttgagattagattgggtaatatagggaaattttatttttaaaaaaataaaatatataaaataaataaataaataaataaatagttaggtatggtagtatgtatttggggttttagttatttgggtggttggggtaggaggattgtttgagtttaggagtttgaggttgtagtgagttatgattatattattgtattttagtttggatttagagtaagattttgtgattttatttattttttttttgtataagtggtgatattgaggtttagtgatgaaagattttgtttaaggtaggaatatgttattattttgataggaaggggttgaattaggttataaattttttttgtaagtttttaaattgggtgatgtttgtattatttaggtggttgttggtttttttgtgagttttgttattaagtttttaaggttttagaaaaggtgtttttaaatttatataatatgtattttgagaatttatggtttggtaagtatggtgatag

SEQ ID NO: 2132 - DNA, 2500 bp, Artificial Sequence
  chemically treated genomic DNA (Homo sapiens)
ttgttattatatttattagattataagtttttaaaatgtatattatgtgaatttgaggatattttttttggagttttgaagatttgatggtaagatttatagaaaggttaatagttatttgggtgatgtaaatattatttaatttggagatttgtaagaggaatttatggtttggtttagtttttttttattaagatggtagtatgtttttattttgggtaggattttttattattgggttttagtgttattatttgtataagaagaggatggatgagattatagggttttgttttgggtttaggttggagtgtagtagtgtgattatagtttattgtagttttaaatttttgggtttaagtaatttttttgttttagttatttaagtggttgggattttaggtgtatattattatgtttggttatttatttatttatttatttattttatgtattttatttttttagagatggggtttttttgtgttgtttagtttggttttaaatttttaggtttaagtagtttttttatttgagttttttaaagtgtcgggattatagttatgagttattattttttgtttagttgagattttaattgaagtttagattggagagatgaaattttgtttttttcgtagtattttttttatttatagtattttttaagggggttttaatagaagtttagtgtattggttaggagattttattttggtatttagttgatgtatggggttggttgttgataataaggaagatttatttagaagtgttattgtagttttatttattatattgtttgaaaagtttaggataatttttatttaaatgattggtttatgttatggattatatttattatcgttgtttggtagtttttttaggtaaaatagtaataaaataataattaaaaattttaatgttgttattttagagaaataggttggaggtttaaaaaaatgattgtaggtatgttatgtaaatgaaattgttagataaagatttagttttaggaattttaaagtagtggagggtatatttttaatttgtagtttgtagtgtgtaataagaatgtagtatgagtttttagtttgatgtttttggtttttgttatttggttatttagtattaatattgtataatagtagatatagtattgtagtttttacggaagtgattatataatgggagtgtttttttagaagttaagtaaagggggttgttagttttatgagttttgatgaaatagatttagttaagttttaatttaggtcgacggatttcgggttttttgttttgattgcgatattttcgtagttttttatgggaatttttgttgtgttttatttttttttagggtttttacggttaagttaggatttatcgtgtagtttgatttggtttttcgtaaaattttataagtgtgaaatattaaatttatgtgggattagattggataatagtgttttgaatttggtttttttattgtttttttagtgttttatgaattaggtttaatttatttttttgtttttttttttattatttgtttattttagttgttttattgatatggattaggtaatttaattagaaatattttttattattatagtagggataatagaggtaagttgttaatatttatatttaattttgtttttttgttagagttttttaataatgacgatgataatagttatgatgaaaattatgaagaataattttgtgtattttagattttgttttaaatgttgtgtgtgtattgttatttatttttttaataaagggtgttatcgtttatagtttatatatgaggaagttgaagtttgtagtggttgtataattattggggatgagtgttatatagttagaaagtggtagagttgtaagttagattttaattttattatttatttttgatttatttagttttttagttttttgattatgtatttgttatacgggaaggttagtttgttttttgttatttatataaattttatttagattttaggatattttttaaatttttttttgttttgtggagttttttttattggttattggttttgtgttgaaggataatttttaataattttagtaggagtttttttaattgtaaatattgttaattgtttgtttatatttagtttatttttttttttttttggttattgatgatattttattaatattgttttttaattatttggttattattaggtttttgatattatttttttttttttgtttatgttttgttttttgaaaatattgtgtgttttataaattgatgttttagaagtatttgttaattaataaatttagaaagggttgagttaaattgggtatagtttcgtgtgggttttatgagtgtttatttttatgattttgtgatttatttttgaaaatttagaatttggtttttatgtttaagatagagtagttaaattgttgttggtgatattagagggttgatagtattatggtgtgt

SEQ ID NO: 2133 - DNA, 2419 bp, Artificial Sequence
  chemically treated genomic DNA (Homo sapiens)
aggttaaataattagtaagtggtagatttagtatgtgggtttagatagtttttttttagagattgatttttattatttttttatttagtattttttgtattgtatgagaaaaaatatatgttgtatttgtagttgaattttatataacgtatattaattatatttgggagatagatttatttatttataaatttttagtggttattaaaatatttgatagttaaaaagtttattttaaatgtttgtggaaatgaatggaattggatggttttagtagttttaatttgatttatttaagaaaatagtataatttatatgtagttgtttttttgagggtggtttttgtttttattatttgttagttatgaaatagggttgttttatttttgtatagatatttttagtagaatttgttagtaattaattttatttttttagtatgaatattagttttttttttgtatgcgggaggtagaataatgatttttttaaagatgtttatattttaagttttagaatttgtgaatatgttatgttatatggtaaggtggggttaaggttttagacgaaatgaaagttgttaataagttggttttgagatagggagattattttgaattatttgaatggttttaatgtaattacgagtatttttataagaggaaggtagaagagaaagttaaggtgatattatataagaaatattttatttattgttgcgtcgttaatgatggagaaatgggattataagttaaggaatgaggaagtttttagaagttggaaaaggtaaaaaaagaatttttgttttttataagagtttttagaaggagtatagttttgttgatattttgtttttagatttttgatttttagaattgtaagagaatgaatttgtgttgttttaagttattaagtcggtggttatttgttatagtagttatagaaaattgtttattgtaggatgaaaagttatttttttttggtattttttaaaggttaatttaagagtatggattgttttgtattttttaggagtattattgtaaagtcgatttattattttttttatttgtttcgtattatcgtgttggggtttattaacgttttgttatcgggtgttttgtgcgtaagtagaagtgtgttaagaattaatcgttttgatttttattttttgttggtgttttgttattcgtgggttgtttggtttgatatatgaattattttttagttgtttggtgttggggaggtatagttattagtttttaaatattttagatatatgttaattgtaattttaatatatattttttttttatcgttattttggaattgttttattggtaatgtatgaaatatgaataagaggaaataattgataaggtattattgttgattaaggggttaatttttgaggaagattaaaaatagatgtttttgaagaagaaagaattgaggaagtgaattttttttttttttaattttttagtttattgtttttatttaaaaattaaattaatatattttgaagaaggtttaaggagattaggaatttttaagaatttatttgtattttgtagtagatagtttgtttgttttttattgaaaatttataagaaataatattgtaatttttgttatagtaaataattggtgggtgtatttttttatgttaaatatatgttaagtataaaaaatgtgtttagaaaaataaataattttggaaggttttttttttagtgtttttttattttttttgttttagtttttttttttgtgatggtgtttaatttaagttttggattttttgttgttgattttagtagtatttttttttgatttgtaggaaattgtttaaggtttttaaaattattttttttataaatttttgtttttttttcgaataattttaattagtatttttgtaaaaagttgtttaattaatgattttatgtataagtgtgggtaagtgataatatttggatgtgttgttttttttagaggatttgttttttaaatttttttaaatagagatataattagtttggataatgagtgtttaaaattaaagtttaattttttatggtaggagtgtggttagtgtgcgtgtgtttaggggaggtgatatgggttattggaggttttttttgtgttttttaaattatatgatttgtattatttaaatgttgtttttgtttttattttgacgatgaaatgattttatgaatatattgattattataattatagttagtgatatttatagtatgttttattatttttaataagaaaagtttattttatgttatttttattaataagtttgtgaggttaagaattttattatgttcgtgttatatattagaaattaataaattttttgtaaagggttagagagtaaatattttaggttttgaggtta

SEQ ID NO: 2134 - DNA, 2419 bp, Artificial Sequence
  chemically treated genomic DNA (Homo sapiens)
tggttttaaagtttgaaatatttgttttttggttttttatagaaagtttgttgatttttggtgtatagtacggatatgatggaatttttgattttataggtttattggtgaggatgatatgaaataaattttttttgttgagaataatgaagtatattataaatgttattggttataattataatggttaatatatttatgaaattattttatcgttagagtggaagtaggggtagtatttgggtagtataaattatgtgatttgaggggtataaagaaagtttttaatgatttatattattttttttgagtatacgtatattgattatatttttgttatgaagggttaagttttagttttgagtatttattatttaggttgattatgtttttatttgaaaagatttggaaaataagttttttgggaagggtaatatatttaggtgttattatttatttatatttgtgtatgaagttattaattaggtagttttttgtaaagatgttggttgagattgttcgaggaaggaataggagtttatggaaaaggtaattttgaaagttttgggtagttttttgtaagttagggagaaatgttattgaaattaatagtaaaggatttagggtttaggttgggtattattatagaaaggaggattaagataaaggaagtaagaaggtattgggaaaagagttttttaaagttatttgtttttttaggtatattttttatgtttggtatgtgtttggtatggagggatatatttattagttatttgttataataaaggttgtagtattgttttttgtaggtttttaatggggaataaataagttgtttgttatagaatataaatgaatttttgaaaatttttgatttttttaaattttttttagagtgtgttagtttaatttttggatgaggataatgaattaaagagttaagaggagagaagatttatttttttagtttttttttttttaaggatatttgtttttaattttttttaaaggttagttttttagttaatagtggtgttttgttaattatttttttttgtttatattttatgtattgttaatggaatagttttagggtgacggtagaaaaaaaatgtgtgttgaaattgtaattggtatatgtttgaaatatttgggggttggtgattgtgtttttttagtattaggtagttggagagtaatttatatgttaagttaagtagtttacgaatgataaaatattaatagggaataaaggttagagcgattgatttttaatatatttttatttacgtatagagtattcgatgatagggcgttaatgagttttagtacggtgatgcggaataaatgaaaaaagtaatgaatcgattttgtaatagtgtttttggaagatatagaataatttatgtttttagattagtttttgagaaatattaggagaaagtggttttttattttgtagtgggtagttttttgtggttgttgtaatagatggttatcgatttagtggtttaaaataatataaatttatttttttatagttttaggaattagaggtttaaaagtagggtgttagtagggttgtgttttttttagaggtttttgtagggggtagggattttttttttgttttttttagtttttggaggtttttttattttttggtttatgattttatttttttattattaacggcgtaatagtggatgaaatattttttgtatgatattattttgatttttttttttgttttttttttgtaaggatattcgtgattatattggggttatttagataatttaggataatttttttgttttaaagttagtttattaataatttttatttcgtttaaaattttaattttattttgttatgtggtataatatatttataagttttagggtttagaatgtgggtatttttgagaaggttattattttgtttttcgtatgtagagagagagttaatatttatgttggagaagtgaggttggttgttgataagttttattgaagatatttgtgtagggatgaagtagttttgttttatggttggtagatagtgaaaatagaggttatttttaggaggatagttatatgtgggttatattgtttttttagatgagttaaattgaagttattaaaattatttaattttatttatttttataaatatttaagatgggttttttaattattagatgttttggtggttattgggaatttgtaaataaatgaatttgttttttaaatgtagttggtgtgcgttgtatgaagtttagttatagatgtaatatgtatttttttttatgtaatatagagagtgttgaataaagggatagtgagagttagtttttggagaaggattgtttaggtttatatattgaatttattatttgttagttgtttggttt

SEQ ID NO: 2135 - DNA, 2353 bp, Artificial Sequence
  chemically treated genomic DNA (Homo sapiens)
tttggaaaatattaattaaataatatattttaaataattttgaaaaagataaaggtatttttttaatttggggtattttattagttattaagaattaatgttattatttttttatttgtttagtgtttagaattttttttaagtttgttgataatggtggtaatgagggttaaaggatggagttgtttagttttggtaaatattggttaggtatagaggtttatgtttgtaattttagtattttgggaggttgaggtaggtagattatttgacgtttggagttcgagattagtttggtttggttaatatggtaaaatttcgtttttattaaaaattagttaggtatggtggtatatttgtaattttagttatttaggaggttgaggtaggagaattatttgaattttagggatagaggttgtagtgagttgagattatgttttcgtatttaagtttgggtaatagagtaagattttgttttaaaaaaaaaaaaaaaaaggtatggtggtttatgtttgtaattttagtattttgggaggttaaggcgggtggattacgaggttaggagattaagattattttggttaatatagtgaatttcgtttttattaaaagtataaaaataaaattagttaggcgtggtggtgggtttttgtagttttagttattcgggaggttgaggcgggagaatggtatgaatttgggaggcggagtttgtagtgagttaagattacgttattgtattttagtttgggcgatagagcgagatttcgttttaaaaaaaaaaagaaaagaaaagaagaaaagaaaatataaaatgtttagttatttaggatataattgtgtggtttgatcgtttagttgtattattttttttatttggaaagtgttttagtgattatagaagttgttagaatttttaaaagtaagaagaaagtgatgggaaaatgtgttaaatttataatgggagaatattgtgttattagaaaattatatgattttggtaattttaggagtatggaagaaagattttaaataagtttttgattatgtatttttttttaaatttttttgaatgttgaagaaatgttaaattttattaagttttatagttagatttaatatagatataaatttttttaatgttcgttttagttaaaagtgagcggaatattatcgttaaattagtgtatgtgggagaattatttgaggaaaattaaaataggtatagttgggaatattaagtcgtggttatattagacgtaagtaggcgtaatagtaaaattttttaggttttaatggattgggttattttgttttttagtttttatatagatgagttttgttttggggtaatatggttgtagtttgagagtttatttgaaggagtttattttttttttattagtttatgagtatagtgtaattttagttaatattgttatatagtttttagttgggttatttggttaaatgtttttagggaaagtagtaagatagaataaaaggataaatgtaatgcggttttttgttttgagtttttgtagttgtggaattatattggtagttaattattattacgttgtattcgtgattataaatttttgttatttaagatgttatttaagttttataagaaatattttgttttttgtggtataatttttttgaggtcgggtttgtgtataattataattatagagatttgttttttgtgtttcgtggatatgttagtaggtatatagtgttatttgtgtgaaattgaaaatgatattttttattggtgggtgaattgggaaatagtattttgtttatgggtaaattagaaaagatgtttttttttgggtggataaatgagtaaaaggtagtttttttgggttgattaatttttttttaaagttttttttattttggggtgtgggggtggtgtatatggtttggtaagtttaatgtagattttagttgttttttgtgggtaggaatttttggcgtaatgtataatttgtataattgtatataatagttttgattatagaatttatttttataattttgtagttggattatagagtttgttttttagtattttaaaaatatttgtttaattatattagtggatgtttatattaaatatattggtttttttttttatggtaagtaattgttattttttgttaagggtagtgttttaattttggaaataaataggatattcgtaggttgagaaatagaagaattagaggacggtgatttttaggggtttgattagtggtgggtagtggagtggtggaaattacggtggtatttttttattatcgtaatgtaatgttttttttagtttttattattattt

SEQ ID NO: 2136 - DNA, 2353 bp, Artificial Sequence
  chemically treated genomic DNA (Homo sapiens)
aggtaatgatggaggttgaggagagtattatattgcgatggtgaagaggtgttatcgtggtttttattattttattgtttattattggttaagtttttaggagttatcgttttttagtttttttgttttttaatttacgagtgttttgtttgtttttaaggttagaatattgtttttggtagagagtggtagttatttgttataagaaagaagattaatgtatttaatatggatatttattgatgtgattgaatagatatttttagagtattgaggggtaaattttgtggtttaattataaaattgtgaaaatggattttgtaattagggttgttgtgtatagttgtgtaggttgtgtattgcgttaggggtttttgtttatagggagtaattagggtttgtattggatttattaagttatgtgtattatttttatattttaaggtggaggaggttttaaaaaagaattggttagtttagaggggttgttttttgtttatttgtttatttagaaggggatattttttttaatttgtttatagatagggtgttgttttttagtttatttattagtagggaatgttatttttaattttatataaatggtattatatatttattagtatgtttacgaagtataagaaataggtttttatggttatagttgtgtataaattcgattttaaggaaattgtgttatagaagataagatgttttttgtgagatttgaataatattttaaataataggagtttatgattacgagtataacgtggtaatgattaattgttaatgtaattttatagttataggaatttagaataagaaatcgtattgtatttgtttttttattttgttttgttattttttttgaaggtatttaattaaataatttagttaggagttgtgtaatagtattagttgaaattgtattgtgtttatggattaatgaaagagaaatgagtttttttagatagatttttaaattgtaattatattgttttagaataaagtttatttgtatggaaattgagaagtaaaatagtttagtttattagagtttaaagaattttgttattgcgtttatttgcgtttaatatggttacggtttaatgtttttaattgtgtttattttgattttttttaagtaatttttttatatgtattggtttaacgataatgtttcgtttatttttgattgaaacgaatattaaagggatttatgtttatattaaatttggttgtaaaatttaatgaaatttaatatttttttagtatttaaaaaaatttagaaaaagatatatagttagaaatttgtttgaaattttttttttatatttttaaggttgttagggttatataattttttagtgatatagtgtttttttattgtggatttgatatatttttttattattttttttttgtttttggaaattttagtaatttttgtagttattggagtattttttagataagaggagtgatataattgaacggttaggttatatagttgtgttttgggtggttggatattttatgttttttttttttttttttttttttttttttttttgagacggagtttcgttttgtcgtttaggttggagtgtagtggcgtgattttggtttattgtaagtttcgttttttaggtttatgttattttttcgttttagtttttcgagtagttgggattataggagtttattattacgtttggttaattttgtttttgtatttttagtagagacggggtttattatattagttaggatggttttgattttttaatttcgtgatttattcgttttggttttttaaagtgttgggattataggtatgagttattatgtttttttttttttttttttgagatagagttttgttttgttgtttaggtttgagtgcgggggtataattttagtttattgtaatttttgtttttagggtttaagtgatttttttgttttagttttttgagtagttgggattataggtgtgttattatgtttggttaatttttagtagagacggggttttgttatgttggttaggttaggttggtttcgaattttagacgttaagtgatttgtttgttttagttttttaaagtgttgggattataggtatgagtttttgtgtttggttagtatttattagagttaagtagttttattttttggtttttattgttattattattagtagatttgggagaggttttaaatattaaatagatgaggagataataatattaatttttaatggttaatagggtgttttaaattaaaaagatgtttttattttttttaaagttgtttaaaatatattatttaattgatattttttaaa

SEQ ID NO: 2137 - DNA, 2486 bp, Artificial Sequence
  chemically treated genomic DNA (Homo sapiens)
tgtatattgtttagtaaaagaagttaatttgaaagggttatatattgtatgattttaattatgtgatattttggaaaagataaaattgtatagatagtagaaagataagtagttgtttggggttttaggggtagggaggaaggagggataattaggtggagtgtagagggtttttaaggtggtaaaattatttttttatgatattgtaatgatggatatatgatattatatatttttaaaatttataaaatgtagaatattaaaggttgattttaatgttagttatgtattttagttaataataatgtattaatattggttaattagttgttataaatgtattttattaatgtaagatgttagtaataggggaaattggttatcgggggagtatttgggaattttgtatattttgtttagttttttttaaaattattttaaatttgttaagattttattttaaggtttattgataaatgataagaaaaaaattatgtaaattggagttttaaaaattagtatttgtgattattaatttataaaataaattggaatagaatttatggtttgtttgttaaaaaatgagttttgtttgaaagataaaagggcgatattatagaaatggaaaatattgtgtttgaggttgtgtatggtgtagtggaaggttatagtttaggggttggttattttgtgtttgagttttttttagttcgtttttgagaagtattgggattttaaattagttataattaagtttcggattttatatttgtaaagtgaggatagggagatttatttgatggggttgttgtgaaggtgaagagagaggaagtttgttaaagtaattaaataatattcggtatgtggagttttgtgtttcgttttgtttcgaaattttttttggtgttgatttgaatgtttttttttgattcggttaatagttgtgttatttttggttagtgatttgtggttgggttgttagtcgatgataggtagttttttaagtaggttataataaggtggtaattgattttgtttttcgaggatgtttgttcgggttttgttagaagttaagggttttttgatgtggggtttcggttttatattgtggtattttgaataattttttatgggttggtaaaaggcgttttatattttagataggttttaggaggatgatttgttttttttaaggagaattgagaatttttagatgattggaaggttttgtatttttattttagtattttcgatagatttttttatatgtggtaaatatagttatagttggaggtttattgtcggttgttaataggtagtgaattgttgttgaattagatagtttacgtatagggtatttttattattatagaaagttttgttggttagagtatttaaagtatattcggtttttttttttagttattttgtttattttttgtttgtatttttttttggtatttgtgttgttgttattttagttttagtttttaatgtttaataatattttgatagattaatagagttgtgttttagtaggtttaatattatgttgtatttttggttttttaaatggtagagttatttttttgtttggtgtttaaggttttattagggttttgatcgtttgtgttattttatagtttttattttttaggatatgtcgaggagtgtatggagtgtatatatagattgtttgttgtttattgagtaagttttgttagtttgtgttaggtttgttttataatttattttttatttgttttggttaaatttttttttattgtgtatttgttttttatatattattagagataattttttttttaggtaaatatttgaatattttaggttttttttttacgtgatatttagtatattttgttttatatgtaatttgtttgtttgtattttttagttttgtttttttttggagtgtttgtttttttaggaataggtgttttaggtttttttttgtgtaggttagtttagtaatatataattattaagtaatatatatttggtaaattgtaagatgttttttttaagatataatttttaaattttttttttaagaagtttttttttaaatttttataggaataagttagtatatttgtattgattttatattgggagattatagaatcgtttttttaagtaattttttttttttgtattagttttttgtttttgtgtttttagattaatatttagttatattagttgagtgtttttttttgtagattaggaggattgggttgtgtattagatattgtttatgtttagttcgtattttttaggcgttattatttagtatgtattattagagttttttattgtttgaatttgaatttttttgtttgagggttttgggagatttttttaatttttaagaggattatattatttgttttttaaagtagattagaagttttaggagaatgaagatttttgagaaaagtttttgattaagaattgatgag

SEQ ID NO: 2138 - DNA, 2486 bp, Artificial Sequence
  chemically treated genomic DNA (Homo sapiens)
tttattagtttttggttaaggattttttttaggggtttttatttttttggaatttttggtttgttttgaggggtaggtggtgtggtttttttagggattggagaagttttttagaatttttaggtaaagagatttaggtttaggtaatgggaggttttgataatatatattaagtagtaacgtttaagagatacgaattaggtatggatagtgtttaatatataatttaatttttttagtttgtagaaggggatatttagttagtgtggttgaatgttagtttagaggtatagagataggagattgatgtaaggagagaggattgtttgagggagcgattttgtagttttttaatgtggagttaatgtaagtatgttggtttgtttttatggaagtttaggaaagaattttttagagaagaaatttagaaattgtattttggaaaaagtattttataatttattaagtatgtattgtttggtaattatgtattgttgggttagtttatatagaagaaggtttagagtatttgtttttaaaggaataagtattttaggaagaagtaaggttgggggatgtagatagataaattgtatatgaagtaggatatgttgggtgttacgtggaagggaaatttgaagtatttaggtgtttatttgagggagaaattgtttttggtgatatataagaagtagatatataatggagaagagtttgattagggtagatggagagtggattgtgaaatagatttagtatagattgataaagtttatttaataaatagtaagtagtttgtgtgtgtattttatgtatttttcggtatattttggaggatggagattgtaaggtgatataggcggttagggttttgatgaggttttaagtattaagtagaggagtagttttgttatttgagaggttagagatataatatgatgttagatttgttaaaatataattttattgatttattaggatgttattaggtattgggggttggaattggggtggtagtagtataaatattaaggaggaatgtaagtaagagataaatagggtggttagggggagaggtcgaatatgttttagatgttttgattaatagaattttttgtgatgatggaaatgttttatacgtggattgtttgatttagtaatagtttattgtttgttaataatcgataatggatttttagttatgattgtgtttgttatatgtgggagaatttatcggaggtgttaaaatgagagtatagaattttttaattatttgagaatttttagttttttttgaagaaagtaaattatttttttggggtttatttgaagtgtgaaacgttttttgttagtttataaagaattgtttagagtgttatagtgtgaaatcgaaattttatattagggagtttttggtttttagtagaattcgaatagatattttcggggagtaaggttaattgttattttgttgtgatttgtttggggaattgtttgttatcggttggtagtttagttatagattattagttaaaaatggtataattgttgatcgaattagagagaaatatttaggttagtattaggaaaggtttcgaagtagggcgaggtatagagttttatatgtcgggtgttgtttaattgttttgatagattttttttttttttatttttataataattttattaagtaggtttttttatttttattttgtagatgtgaagttcgaagtttagttgtaattaatttgaagttttagtattttttagaaacgggttggaggggatttaaatatagagtgattagtttttgaattgtggttttttattatattatgtataattttaaatatagtattttttatttttataatgtcgtttttttgttttttaaatagaatttattttttaataagtaaattatgaattttgttttaatttattttgtaagttaataattataaatattaatttttaaaattttaatttatataattttttttttgttatttgttaatagattttaaaataaggttttaataaatttagagtggttttgggaaaagttgaatagaatgtatagagtttttaaatgttttttcgataattagttttttttattattaatattttgtattggtgaggtatatttgtaataattgattaattaatattgatatattattattaattgaggtgtatggttaatattagggttagtttttgatgttttatattttatgagttttgaaaatatgtaatgttatgtatttattattatagtattataagagaatagttttgttattttaaaaattttttatattttatttagttattttttttttttttttatttttggagttttaagtaattatttatttttttattgtttgtatagttttattttttttaaaatgttatatagttggaattatataatatataatttttttaaattggttttttttgttgagtaatatgta

SEQ ID NO: 2139 - DNA, 2457 bp, Artificial Sequence
  chemically treated genomic DNA (Homo sapiens)
aatttttttttttttttttttattaaaatataaaaatttaagagattttttattaatgtttttttacgtggtttgttagaatgtatatttgtttgttataatttagttaatgaataatgaaatttatttaagatgttttttgtaaaaattagagttgatgatgtgttattatattagtgattttatagaataggatttatgtgattaatttatgtatgagtttgggggttttcgggaaaataagttatgttatttttgtagattaattgtggtttttttttagtagataaaattgatgtggtttagtaggtttttttttgttatagatgttagaaaatgtataggtaaagtagttgtttaattgtatttagtagtttttttttgtgatgtaatagaattttacgttattttttttgggtttgtgtttttattattggaagtatattagaattattggagagttttttaaataatatagtgaaatttaggttttattttaggataattaaattagaatttttgtatgtagtttgagaaatgatattttttaaagttttttaggagttttttttgtgtatttagggtgagttagttttttttaggtagttattttttttgtttttttagttgttttattttgtatttgatttttttgtgaattgtttaaggtttatttagaagtatattgggataaattttaaataaaattttatagtgtgtttgttagataaagtataaatgtatttttattatgtagagaagtttggttttttttgaatgtaggagtttaaataataaatttgaatagaatttttgtgaagtgttaaataatgttattattttaggttgattttttttatatttattttttgtaatagtttttttagttatatcgtttgattgttataggaaaggatgttgtagattttttttgagtggtgattaagtgaaatgtattaaagaaatgaggatagtgagtaattaagatgtttgaagtaatattggaaagggagttaggtttgagttatttttttttgtagttagtgtgtagtggaagtggttcgtgggtgttttatatttggattggagagtaaagtataattttagcgttaagggaagttttttatgtttttggaatagtgttttatatttttttgaaaaggtaataaaatatgtgtattcgttgattaggaataaatgttaaagcgtttattatgatggaagtgttcgatttttatggttttgataagtcgttataggattttatgaatttttaatggttggtttatatttaggggtttttagtttttgagggtggtaaaaggtttatagagatgttatttttttagtatattggtttttgttaagatcggtgtttatttaaagtatttttcgtttttcgaatgtatagagattttgttgataataagaaatttttttgggtttgaaattagatgaaaagattttttatttagaaagtgtttattaatttatttaaaaatatgatttggattatttattatatgttagggtttattttgggtatattgaggaataagatagggtttttgatttttgagtttgtattttagttaggggatataggtattaggtaagaaaataaataatcgaggtaatgatagtatagggtaattgttatgaaaagaataagtcgggtaatcggatattatttaagtatagtagtgatatgagtttatttgtattttgaaagattattttagttgttggatgggaaaaatggattgtagggggataaaagtaaaagtcgggaaattaattaagaggttattgagtggtttagggaagagatggtagtggtgatagagatagaagagagtagatgtgtaatatatatttgagaatgaaagagaatgtgttggtgattgggatagaatcgtagaaagaaaagaagtaagaaaaattttaaacgggtggtttaattatttggtggattgtgatagtattttttgagatagagaagattgggttgtatatataaagaatagatttgggggaaattttaagtgtatagttatttaaattatttaagtatggttattatttaagggtagatatgtttagagtttggttagaggttaagtttggagatatttattttggagatataagtttgtaagtggtattgaaagttagagttgatttggaaagataatttagttagaaaatgagttttttgaggttaggtatggtggtttatgtttgtaattttagtattttgagagttcgaggagtgtggattatttgaggttaggaagtcgagattagtttggttaatatggtgaaattttatttttattaaaaatataaaaattagttgggcgtagtggtgtacgtttgtaattttagttatttgtgaagttgaggaacgagaatagtttgaatttgggaggtggaggttgtagtgagttgagatta

SEQ ID NO: 2140 - DNA, 2457 bp, Artificial Sequence
  chemically treated genomic DNA (Homo sapiens)
tgattttagtttattgtaatttttattttttaggtttaagttattttcgttttttagttttataagtagttgggattataggcgtgtattattacgtttagttaatttttgtatttttagtggagatggggttttattatgttggttaggttggtttcgattttttgattttaggtgatttatatttttcgggtttttaaagtgttaggattataggtatgagttattatgtttagttttaaagggtttattttttaattgagttgtttttttaggttagttttagtttttagtattatttataagtttatgtttttaaagtgagtatttttaggtttgatttttagttagattttaggtatatttatttttagataatagttatatttggataatttagatgattgtatatttgaaattttttttaaatttattttttatatgtataatttagttttttttgttttaggaaatgttgttataatttattaagtggttaagttattcgtttggagttttttttgttttttttttttttgcgattttgttttaattattagtatatttttttttatttttaaatatatgttgtatatttgtttttttttatttttattattattattattttttttttggattatttaatggttttttaattgatttttcggtttttgtttttatttttttataatttattttttttatttaatagttagagtgattttttaaaatgtaaataagtttatgttattgttgtgtttaaatgatattcgattgttcggtttattttttttatagtaattattttgtattgttattatttcgattatttgtttttttatttagtgtttgtattttttaattagaatgtaagtttagaggttagggattttgttttattttttagtgtgtttagaataagttttgatatgtagtggatgatttagattatatttttaaataaattaataaatattttttgagtgggaggtttttttatttaattttaggtttaagaaagttttttgttgttagtagaatttttgtatattcgaaagacgagaggtgttttaaatagatatcggttttggtagaagttagtgtgttaggagaatagtatttttgtggattttttattatttttagaaattgaaagtttttaaatataggttagttattaaagatttatgagattttgtggcgatttattagagttatggaaatcggatatttttattatggtggacgttttgatatttgtttttaattagcgaatgtatatattttattatttttttagggaagtatggggtattattttagaagtataagaggttttttttagcgttgggattatgttttgttttttaatttaaatatggaatatttacgagttatttttattgtatattggttgtaaaaagaggtggtttagatttgattttttttttagtgttgttttaggtattttagttgtttattgtttttatttttttggtgtattttatttaattattatttaggagaggtttgtagtatttttttttgtggtaattagacggtgtggttaaaagaattattgtagggaataggtatgggaggaattaatttgaaataatgatattatttgatattttatagaaattttatttagatttattatttagatttttatatttaagaaaagttaaatttttttatatagtgaaaatatatttgtattttgtttaataaatatattatagaattttatttaaggtttattttagtgtatttttaaatggattttgggtagtttataaggaaattaaatataaaataagatagttggggagataaggagaatgattatttaaagaggattggtttattttggatatatagaagaagtttttagagggttttaaaagatgttattttttaggttgtatgtagagattttggtttaattattttgggatgaggtttgggttttattgtgttatttggaaagttttttagtgattttaatgtgtttttagtggtagaagtataagtttagagaaagtagcgtgagattttattatattatagagaggaattgttgagtgtaattgggtagttattttgtttgtatattttttgatatttatgataaaggggaatttgttgagttatattaattttgtttgttaagaggaggttatagttggtttgtagagataatataatttgttttttcggaagtttttagatttatgtatgagttgattatatggattttgttttatagaattattaatataatggtatattattaattttggtttttgtaggaagtattttaaataaattttattgtttattggttggattgtagtaaataaatgtgtattttagtaaattacgtgaaagaatattagtaaaaagttttttgagtttttgtgttttgataaaaaaaaaaaaaaaaaaatt

SEQ ID NO: 2141 - DNA, 2431 bp, Artificial Sequence
  chemically treated genomic DNA (Homo sapiens)
ggttaaatattaatttaaatattaaatattaatttatttgtttatttttatttttttttaatgtgtttattagaaaatttgaaatgatatttgtggtttgtattatttttttgttggatgtaattagtatagagtttttaaggtttaatgtagtatttattttagggatatttgtagttgaagtaatgatttttattttaaagttaaagaataaattttgtattgtaatatttatgatggaagagagaatttgggagataaattaagtaagtaataagttatatgtttttgaggttagttttatttaggatgtaaggtaaatgttgagtgagattattgtgggattaaatgagtgaatatatagtaagtatttgaaattatgtcgtcgttatcgttatttggatttttgggatttgtgttgtttgttttttgggagtttttaagtttatgaattaaaatatggttttttttttgcgtttttagttatcgtataatttttttcgagtgtttttgagttatatattattcgatagaagtggggataaggtatatagaagtgttattggttttataaagttgtttagaaaattatttaaaaaataagaaatttaggtagtatttgtgttgttttgatataggtattagtattatttttattagttagttagtttatatttgtattgtttttagaatttgaagatttgtttataagtataggggtatcgagttgagtggattaatgtgtggatgtttgaattatttatttattatttaggttattttaaaagttttagaaggaggagataaagtttttttaaaatttggaagatttaattggaaagttttgttagaattttgttattgtgagtttttagtttttaggttttttggattttaagagtaatatttgattttgattttgggaatgttgaataaaataagttaatggattttgaacgtggtatttgttttttattttttaaatttataagagtattttttttttttgttatatgaatagagtagtagttgttgatttaagagcgtcgggaaaagggtgattgttttttatttggtatagatatttttgaggataagattattgagttaataatcgattttatttttttgtaggttttttcgtagtttattcgtgagggtaggaggaagggcgggtgttttggatttatttatagtttttgtttttttaaataattgtgagtaaggaggatagaaggcggtaaacggagttagtgagatagtttaaatgtcgtttgggtgttgtattatttagatataaaatattaattttaaatgttaggttgttttgtgtttgtggatgtttcgaaattttttttttattttgtgttgatttagttcgaatattgatttagtttttaattcgtgttttttttttttttgtagtttttgaatacgttgtttatgtatttttttgtggtcgtggatgagtattttgttggttgttgtaaagagatttttcggtgagtggatatggtcgtgtagtggtgaatatgaaagagattgtgtggatagttttgaaatattttttaaaagatatgaaattttttggggtgtttaatttgtttgtaatttgtggttatattaaaatatttattttgaatagtaatgatatttttgaaaggagatagttttttgaatttattgtttattttgtacgttgttattatttgaggtaaatagatagtgtagtaatttaaagaaatggatttaggttgaggggagtaggagaagaattaagtgtcgtaagtttggatatttttaaaaattgtttttttttattttatttttagaaatgtttattaatatgatagattttaaagtattttgaataataggatgtatggaaaatgattagtagggttatcgagttatggcgatgtgtttttgatagtttttgatagtttgtatagatatttgggggtggtggttatagtttttaagttattttgtaatgttatattagatcgtttagatgttaggttaaaggttaatattagtagaaatttggtgtgttatatgaatatggtattttttattttttttgtttttatgggatagatcgaaaaggggttttttagaatttaaggaaaagtagagaagaaaaagaaattgttttgaggttgtttttgttattgtaggtggggagtaaaggagtttatgtggatttaggaatattttatttttttagtgatagtatttgtttttattaagtgttagttgatgggattgttttgttagtaatattgttttattttttttttttttattagaatcgtgtataaggtagtgttagagttgtattttatattttttatcgtgttattttatatgagtttaggtaaggttcgtttaattatttttggttttcggtagtaaatattgaaaattt

SEQ ID NO: 2142 - DNA, 2431 bp, Artificial Sequence
  chemically treated genomic DNA (Homo sapiens)
gaatttttaatgtttgttatcggggattagaggtggttgggcgggttttatttaggtttatgtaggatggtacgatgagaaatatgaagtgtagttttggtattgttttatatacggttttggtgaggaaagagagggtggggtagtgttattaataaagtaattttattagttggtatttgatgaagataaatgttgttattaaaaaggtgaggtgtttttaaatttatatgggtttttttgttttttatttgtaatggtaagaatagttttaaggtaattttttttttttttttatttttttttgggttttaaagggttttttttcgatttgttttatggaggtagagagaataaagggtgttatgtttatatggtatattagatttttgttaatattaatttttgatttggtatttggacggtttggtgtgatattataaagtgatttgaaagttgtgattattatttttaaatgtttgtgtaggttgttagaggttgttagagatatatcgttatgattcggtagttttgttggttattttttatgtattttattatttaggatgttttgaagtttgttatgttaataaatatttttaaagataagataaagaaaagtagtttttagaaatgtttaagtttgcgatatttaattttttttttattttttttaatttaaatttatttttttaaattattgtattatttgtttgttttaaatgataatagcgtgtagaatggataatagatttaaagaattatttttttttagaaatattattgttatttaaagtaaatattttaatatagttataaattataagtaaattaaatattttaaagaattttatgttttttaaaaaatattttaaaattatttatatagttttttttatgtttattattgtacggttatatttatttatcgaagaatttttttgtaatagttaatagaatatttatttacggttataaagaggtgtatgaataacgtatttaggggttgtagaagaagagagaatacggattaaaggttgagttagtattcgggttaggttagtatagggtggaaagagggtttcggggtatttatagatatagaatagtttggtatttagggttgatattttatgtttaagtgatgtaatatttaggcggtatttgagttgttttattgatttcgtttgtcgttttttgttttttttatttataattatttaaggaaatagggattgtaaatgagtttagagtattcgtttttttttttgtttttacgaatgagttgcgggagagtttgtaggggagtgaaatcgattattaatttagtagttttgtttttaggggtgtttatgttaagtgaaagataattatttttttttcggcgtttttgagttagtagttgttgttttatttatgtgataggagggagagatgtttttatgaatttgaaaaatggaaggtagatgttacgtttagaatttattggtttgttttgtttaatatttttagagttagaattaaatattatttttgggatttaaaaaatttgggagttgaaaatttatagtagtaagattttagtaagattttttagttaaattttttaagttttaaaagagttttgttttttttttttgagatttttaaagtggtttaaataatgagtaaatggtttaaatatttatatattggtttatttaattcggtatttttgtgtttatgaataaatttttaaattttggaaatagtgtagatgtagattggttgattggtgagggtggtgttggtatttatattaggatagtataggtgttgtttaggttttttgttttttgaataattttttggatagttttgtgggattagtggtatttttgtgtgttttgtttttatttttgtcggatggtgtgtgatttagaagtattcggaaagaattgtacggtgattaaaagcgtaagaggaaaattatgttttgatttatgagtttgaaaatttttaaaaggtaaataatataaattttaaaagtttagataacgatgacgacgatatgattttaagtatttgttgtgtatttatttatttaattttataataattttatttagtatttgttttatattttgaataggattagttttaggagtatatggtttattatttgtttgatttgttttttaaatttttttttttattataaatattataatgtaagatttattttttagttttaagataaaaattattattttagttgtaaatatttttgggatagatattgtattaagttttaaaggttttatattggttatatttagtagaaaagtaatgtaagttataaatgttattttaaattttttagtagatatattaaaaaagaataaagataaataggtgaattaatgtttaatatttaagttaatatttaatt

SEQ ID NO: 2143 - DNA, 2402 bp, Artificial Sequence
  chemically treated genomic DNA (Homo sapiens)
ggtaattattgttaattagaggaaatagaaagaagtttattaagtttgtttttttgaatagttatggtagttttaggttaggtatgtagtatgtttgagggtaaggttgtgttttgtgggaaatttttattattgaaagggtttttagttataaggattttttttggtttgatagttagtttggaggagtttggggttattattttatataagttttttgttataattgtattttggtttattttgatatttggtgtttattttaagttgaggttttagggaagggtagttggaggttagcggcggtttttagtgatagatgggtagagcgtttgttttggtattatttagggtgtgggtagtagtggttcgagtaggtattattgatttgtaggtagggaaagtttgttaggttagttatgcgtttggtattaggaggagaggattagagttagtagtggttataatgagggtaaaatttttatagtggaatattgttatttaaaagggatgggtggttgtagggttttttggatggaagtataaatgagaaaatatatacgtttttgtaaatggatttgtttgggaagataaggttatagtatatatagttttttagtaatttaaattttatgtgttatgatgtagatatttataggataagtaagaataataaaatttttagttttgttttttagtataagataattgaagatatttgtggtgaaaagtatttttgttattaggaagatagataatagttagtaattaatgtttttttgttgtataagttaaaaagtttattaaatttattttttttttagtgtatatataagaatatatttggatatttttgtaaatttatatttaagaatagtgttttttaaatcggttatttgaaagaaatttaaaggaaaaagtagatatttttataatatgtttttgttttgttgtagtttgtaattgtgaatttttgtaaattgttataattttggatgaatgatgggaatataataggttgtagaattggagaacgttaaatttttgtttttaatggtaaaatatgttttttttatttttattagaatgtgtgatttatgttatttgaaattaaattttaaatataatgagttattagtgtaatagtttattattaatagcggttttataaataatatatttttattatatatatgtagttcgttgtgaagttagtaaaaggtattttaggttatcgaagttttgttgcgttagcgcggttgtagattagaaggatatttttatgtgaattaagatggatgttaattttttttgtcgagagttaggttggtcgtttttttttgtatatatggtagatggattggttaattagcgtttgttgagttttgggtttgaaattatagagaagttagataattgcggttatgtagtttttgtttacgagtgtaaataagataaataattatttgttatttgggaaaaaaattaaaatgtttattttggatttttattaaagtgttaatggttttataaaatagttgtgtaaatttaggtttttttagtaagtattattttagggggtttgtaaagaaaggaatatatatgaaaaaattaatttttaaaaattttttttatattttagtattgagaagaaaatagaggaggttttatttttattttgtaaatacgtttgagaataaatgatttttaattgggagatatattcgagaataaatagtagtttaatatttatttttttttttttttttggtgttatttaaaaaattgagtattattgtagttcgattttttgttttaggagattaaagtattttttttgattgggtatttatggaaagatgttgcgtttttgggaatagagaatgtttgtgattattgagttttgttattttttgaatgtaatggttatttaaaagtttgaatatttgagagataggatttagtaaatgtaggtttttaataagagttattagagtttaattagttaattagaatttgtttaaaatttattaataattattttatgtgaaatttaaaggattatgtattttttttttttttttaaattttaaatattttttttgtagaaaataatgaaatatagaattatttaagggatatattaaggagttttagttatagtcgtttttttatgtggaatatgatagaattaaagtttgttgttaatttttaatgttttggtattaattaggtatttggtatttaattaaggtttagattagttagttatttattttttcgtttatgtattatttattaaagattgaaaattatggggacgattgtaagagttttagaattaggtattttagggtgatgggaagtttaatatttgtagattagatttatttggtgaatta

SEQ ID NO: 2144 - DNA, 2402 bp, Artificial Sequence
  chemically treated genomic DNA (Homo sapiens)
tggtttattaggtgggtttgatttgtaaatgttgaattttttattattttgaaatgtttggttttgaagtttttgtagtcgtttttatgatttttagtttttgatgagtaatatataggcgagaagatgagtaattagttgatttgaattttggttgggtattaggtatttgattggtattaaaatattagaaattaataatagattttaattttattatattttatatggagagacggttgtgattgaaattttttaatatattttttaagtaattttgtattttattgttttttgtaaggaaagtatttaaaatttaaaaagagagagaaaatatatagttttttaaattttatataaaataattattagtagattttaagtaaattttggttgattgattagattttgatagtttttattagaaatttgtatttattgggttttattttttaagtgtttagatttttagataattattgtatttagaaagtagtagaatttaataattataggtattttttatttttaagaacgtagtatttttttataaatgtttagttagagaaaatgttttaattttttaaaatagagaatcgggttataataatatttagttttttaaatgatattaaaaaaaaaaaaaaaaataggtattaaattattatttgttttcgaatatgttttttagttaaaaattatttgtttttaaacgtgtttgtaaaataaaagtgagattttttttattttttttttaatattgaaatatgaggggaatttttaaaaattaatttttttatgtatatttttttttttataggttttttaaaatgatatttgttgaaaaagtttggatttatatagttgttttataaagttattgatattttaataaaagtttaaaataaatattttaattttttttttaaataataagtgattgtttgttttgtttgtattcgtgaataaaggttgtatagtcgtagttgtttagtttttttgtaattttaggtttaagatttagtagacgttgattaattaatttatttattatatgtgtagaaagagacggttagtttgattttcggtagggaaaattggtatttattttggtttatatggagatgtttttttaatttatagtcgcgttggcgtaataaaatttcgatggtttgaaatattttttgttggttttatagcgagttgtatgtgtatgataagaatgtattatttataagatcgttgttagtaatgagttattatattaatggtttattgtgtttggaatttgattttaaatggtatggattatatattttgatgaaaatgagaaaaatatgttttgttattaggaataaagatttaacgttttttaattttataatttgttatatttttattatttatttagggttgtaataatttataaaagtttataattatagattataatagagtaaggatatattgtggaagtgtttgtttttttttttgagttttttttaaataatcgatttgagaaatattatttttaaatatgaatttgtaggagtatttaaatgtatttttgtgtatgtattgaaaaaaaaatggatttaatggattttttaatttgtataatagaaaggtattgattgttggttgttatttatttttttggtgatagaagtattttttattataagtgtttttaattattttatattggagaataaaattgaaggttttgttgtttttgtttgttttgtaaatatttatattatgatatataaggtttagattgttagaaaattatgtgtattgtggttttgtttttttaaataggtttatttatagaaacgtgtgtatttttttatttatgtttttatttaaaaagttttatagttatttattttttttgggtgataatattttattgtgagggttttgtttttattgtgattattgttggttttgattttttttttttgatgttaagcgtatggttgatttggtaggttttttttgtttgtaggttagtggtgtttattcggattattgttgtttatattttggatgatgttaaagtagacgttttgtttatttgttattaggagtcgtcgttggtttttaattatttttttttaaaattttagtttggagtaaatattagatgttaaggtaagttagggtatagttatgataaggaatttgtatgaagtgatggttttaaatttttttaaattagttattaagttaaagaaagtttttgtaattaaaaatttttttagtagtaagggttttttatagggtatagttttgtttttaggtatgttgtatgtttggtttggaattgttatggttgtttagaaagataaatttgatggatttttttttgttttttttggttgatagtggttgtt

SEQ ID NO: 2145 - DNA, 2471 bp, Artificial Sequence
  chemically treated genomic DNA (Homo sapiens)
tggattaattttattatattgtaatggtttgtattttaaatgtaaggataatattaaatttttagttggttattattttttttttttttttaggttttttgaattaaaatattaagaaagcgatttgtttaatttattttgttagaatttatagttaaatttattaaatgtgtaaatattttataagaaagtttataaggtatgttaataattatatttatgtattataagtgtattatttttttaaaaaattaaaaaaattatttttgattttataaagtgaattaaaatggtttgtatgttttttatttaaaaataaaggtgatatttttaggatattaaatgatattttagaagtttatgttgaaaatgagttaataaagttaattaatttatattaaatattaaagaaatatattttttttttttgaaagttataagatattaaatttattggtttttttatattaaaatttttagtttaattttttaaagtagtgttttttatggataaatataaatgttagtattaagagttatttttatatataaaattgaaaattttacgtatatggagattagaataaaaaatgatgtaaatatttaatatgaagtgatttttggtatttgcgtttttttaatagaaaagagggttttttttatgttaggttttgtaatagttagaatgggatttttatgaatttaggagttgatttataatgtatttattttgagaataataagtatgttaaatttggaatttattaagtattttttttttatagtagtaataataaaaaataatagtaataataataataataatagttaatatttaagtagtttttattttggattaggtattgtttgaagtattttttatttattagtttatttaatttttataattttaattttttagattaggttataaattttaatatgaataataaatttgttgtttattattttaaagttttaaaagagagtttttagaagggtaatttttagtttttttaggagaataatttgaaatgaaaatgaagattatatatattattaagttgaaaaatataatgttattttttttgagggatggtttaatatgttaatgtttaatttaagaattttaaaaacgtttttttattagtaattttaaaataaaaataagtcgttatataaagtatggttaaaatattattaaaggtatgataaggatcgaaattgtagttaatttagtatatagtatatagattattggattgttttagttttttttatgattaatattaattgatatggttgaattgattttgtagtaaggtgttttaattgttgaaatttattacgtgggtcgtgttttagagtttcggttttttcgtggatatgtttgtaattttgtaggattgattttattagtatagttagaggtttggtaagtgttcgatattaggtaaggttggattttatatttacggttttttataaaatgttagatgtgatatggggtttttttaatttttattattaattaatataattaaaattttaagatataattttttaaaagtataaaatttagaaaatttaaaatatttataaaataataaatttgatattataatttttaaagaggtttagtaatataataatataattttgtgtttatgatgaaaaattttttgaaaattttaatttatatttaatttttataaagtatgtataatttagatatatgtaagatatttaataattggatgagagttttttttaatatatttgtattattgatttttaatgataatgaattatatggtaaatgttttatgagttagtataataatgtaatgaaaacgtattttaggttttttcgttatcgcgatgaagaatatgtgattttttattgggtaaataatgattgaaatatttttaaaggtagttgggataatatttttgcggtagtttttggagtgtttagattagacgatatggatttcgttattttttaagtgacgaagttgtaatagtaaattgattgtttattaattagggtgataatagtagtttatgaggggttatggtttataaattgaattataaaatttaaaggttaaaaaaattttattattaaaaaaggttataatattgatgtttttttgtgaggattttaaaaagtataagtgtataaaaatatagtttgtttttttaatgtgttggtattaagataaggtatgttagtttcgtaggtatattatagttggatggggttgaggtttttgtaagaatttattttttaatggaattttatttttgcgttagagttttgtgttttatattgttgaatatgtttttaaataattaataatacgtgttttttattttatattgtagttgtgttttataagatttttaatttaatggttattatgaaaataagaatatgaatataagagaatataagttattataat

SEQ ID NO: 2146 - DNA, 2471 bp, Artificial Sequence
  chemically treated genomic DNA (Homo sapiens)
gttgtagtggtttatgtttttttatgtttatatttttatttttataataattattgaattgagaattttataaagtataattgtaatgtggaataaaagatacgtgttgttaattgtttagaaatatatttagtaatataaagtataggattttgacgtaggagtaaaattttattagaaaataaatttttataaaggttttagttttatttagttgtaatgtgtttgcgaagttagtatgttttattttggtattaatatattaagaagataggttgtgtttttatgtatttgtgttttttaaaatttttatagaagaatattaatgttgtagttttttttggtagtgaaatttttttggtttttgagttttataatttaatttgtaagttatgattttttataaattgttgttattattttgattaataaatagttaatttgttgttgtagtttcgttatttggggaatgacgaggtttatatcgtttggtttgaatattttagagattatcgtaggggtattattttaattgtttttggagatgttttaattattatttatttaatgaagaattatatgttttttatcgcgataacgaagaaatttgaggtacgtttttattgtattgttgtattgatttataaagtatttgttatgtgatttattgttattgaaaattagtgatataaatatgttaaaggggatttttatttagttgttgaatgttttatatatatttgaattatgtatgttttataggaattaaatatgaattgggatttttaaagaattttttattatgagtataaaattgtattattgtattattaggtttttttggaaattataatgttaaatttattattttgtaaatgttttaagttttttaaattttgtatttttgaaaaattgtattttgaaattttggttatgttgattaataataagagttgaaggaattttatattatatttagtattttgtggagaatcgtgggtatggaatttagttttgtttggtgtcgggtatttgttaagtttttgattgtgttaatggggttaattttgtagaattgtaggtatgtttacgaagaggtcgggattttggagtacggtttacgtgatgagttttaataattggagtattttgttgtagaattaatttagttatgttaattggtattgattatgggaagagttggaataatttaatgatttgtgtgttgtgtattaaattggttgtagtttcgatttttgttatatttttagtggtattttagttatgttttatgtagcgatttgtttttgttttagaattattaatagaagggcgtttttaaagtttttaaattaaatattagtatattaagttattttttaagaggaatgatattgtgttttttagtttgatagtatgtataatttttatttttattttaagttgtttttttgaaggagttgaaagttatttttttgaaaatttttttttaaagttttgaaataataggtaatagatttattgtttatattgggatttatgatttaatttaaagggttaaagttgtgaggattaaatgagttaataaatagaaagtgttttaaatagtgtttggtttagagtaaaagttatttaagtgttagttattattattattattgttgttgttgttttttgttattattattatggagagagaatatttaatgaattttaagtttaatatgtttattatttttagaatagatgtattgtgggttaatttttgaatttataaaagttttattttggttgttgtaaagtttgatataaagggaatttttttttttattgagggaacgtagatgttaaaagttattttatattaaatatttgtattattttttattttgatttttatgtgcgtgaagtttttagttttgtgtatgaaaatggtttttagtgttaatatttgtatttgtttatgaagagtattattttaaagaattaaattgaaaattttaatataagagaattagtgaatttagtgttttatagtttttaaaaagaggaaatgtgtttttttaatatttagtatggattaattggttttattagtttatttttaatatgggtttttaaaatgttatttaatgttttaaaaatgttatttttatttttaagtaaaaaatatgtaagttattttaatttattttatagaattaaaagtgatttttttgattttttaaaaagatagtatatttataatgtatgaatataattattaatatattttgtaaatttttttataaaatgtttgtatatttaatgaatttggttataaattttgataagatgaattgagtaaatcgtttttttaatattttaatttaaaaagtttaaagggaagaagagaataatggttaattggaaatttagtattatttttatatttaaagtataaattattataatgtaataaaattaattta

SEQ ID NO: 2147 - DNA, 2499 bp, Artificial Sequence
  chemically treated genomic DNA (Homo sapiens)
tatttaatttttgtttgtggtagattaggggtttattattggatagtatttatgttatttatggttaggttatatttttgaagttatttgtgtaagcgtgtttgtgtgtgtgtgtgtgtaataggaattagtaagaaaattataaattataaatttatgtagttgttggttatgtatattaattaaaatatatattgaagtatagtcgtgtcgttttatgatgaggatatattttaagaaatgtgttgttaggtaatttatgattattttgtgaatattatagagtgatttatataaatttagatggtagatgtttattatatatttaggatataaatgtgtataatatgttattatatcgaatagtgtaggtaattgtaatataatggaaattgtttgtatattaaattatatttagtatagaaaaggtttagtaaaaatatagtattataattttataggattattattatatatgtggtttgttattgattgaaatgttatatgattatattatagtaacgtgatttatagttatataatttattatagttttaatataagagtaagaagtaaaatttttatatatatatatatatatatatataaaattttagtttttttttttagattttagtatggttatttaaaaaatttttaaaaataattttgatttaattttattagtattatattagagtaaagtagtagtaatatgttaaattttaatatgtttagtttgttataataaaaattattttatttaataatttatttttttaaaaaattttgtatgtgtttataaattattttttttaagatttttttttttttatatgggttttagtttttataaattttgatatttatatttttaaaattattgtataatgtttaatttagtagagtttatatatggtaaatagtttagtaagtattaatttaaagttttagtattttagtagattttttttttatattagaaataaatagataaatagataagtgaaaaaggaaggaaggaagaaaaaaaaatatgaattatgttttttttaggttaatgtttaagtttgttttaattacgttttttgatatattttaaggtttatattagttaaggtaaatattttaagggatcgagtagatggatgttgtagtttagaaagtgtgtggtaaatttaggatttaagagtggaataaaagatttattttttttataattaagtttttgattaatgttttaggttttttagtatatatttgtaattatttatagaggtatttattgtgttgggatttgtttcggaatattaggtattaagttattcggtagtagatggaagtatatttttgttgatatatgttgtaatgaaaggattcgtgtaaatttggttagtaaggtagtagaatgttatgtatttgaagattaataatgtaaataattatgatgttaattttgttatgtttgtgttaattttatttgttgagatgtggaattaaattttgaagtttgtgggttttaaaaatttttagtatatatttgaattaaataagtttttttttattattggaatttagagttttaattaaaaaatgtttttttaggttaaatttatgggaattatgaattaaattttttaataagttaatattataatttgtaaatgaatttattttgtattgtaagatttgtatgtgtaaaggtaataatttgtaaaatggggtatttaaaaaatatgattaagttgttatattgatgttaaagatagtagataggtatgtagttgagataaagttatatggtttttttattttttggattttagttaattattttaacggaatttgttattatgagtaagaaggttggaaagagagggtaaaataatagatggttagtttattttattttgttatttacgtaagatagcgttttgaggagatatagcgtttgtgtgaagtcgttaaagatagtattgggggagggtaaatgggggggttaaagagggaattatatgattagttagttaaattatggttatatgtttgttttcgttgtttttttatattgaagtggaataattcgaagattgtatttttgtgataatattttaaaattaggaataattacgtggtatttaaagaagagtcgttgtatatttttaatagtgggatatttataaaatgttttatttatttttaatttagtagaattttttttttattatttttattatatattaagatatagttataatagaagtttttgaaaaatataataaaaatttgaaattttttttatagtttttagggttttatatatatatgggaaagaatgatgtttttagatatgagttatttatgtgtaatttttatgttttttgttatttttttgtttaaagtgaatattatttgtttaataggttttttaaagtgatttatgttttaatttttttatttttataggtttttggggaataggcgttatttggttagatg

SEQ ID NO: 2148 - DNA, 2499 bp, Artificial Sequence
  chemically treated genomic DNA (Homo sapiens)
tatttgattaaatagcgtttgttttttaaaaatttatggaaataaaaaaattaaaatatgagttattttgaaaaatttgttaggtaagtaatgtttattttggatagggagatggtaaaaggtatgaggattgtatatgaatgatttatgtttgagagtattatttttttttatgtatatataaagttttggaggttgtgaggaaggttttagatttttattatattttttaaagatttttgttatagttgtgttttaatgtatggtggggatggtgaaagaaggattttattgagttagaaatgagtggggtattttgtggatgttttattattgagaatatgtagcggtttttttttgagtattacgtggttatttttaattttaaaatgttattataaagatatagttttcgagttgttttattttagtgtggagaagtaacggaagtaggtatatggttataatttggttgattggttatatagttttttttttaatttttttatttatttttttttagtgttgtttttggcgattttatataggcgttgtgtttttttagggcgttgttttacgtgggtggtagggtagggtaggttagttatttgttattttgttttttttttttaatttttttgtttatagtagtaggtttcgttgaagtgattggttgaggtttagggggtgagggagttatgtgattttattttagttatatgtttatttgttgtttttagtattagtatagtaatttagttatattttttgaatgttttattttatagattgttgtttttatatatataaattttataatgtaaaatggatttatttataaattgtggtattagtttgttaaaggatttagtttataatttttataaatttagtttagaaaagtattttttaattaaaattttaaattttagtggtgaaaaggggtttatttgatttaagtatgtgttaaagatttttaaagtttataagttttaaggtttagttttatattttaatagatggaattaatataagtataataaagttaatattatggttgtttgtattattaatttttaaatgtatggtattttgttattttgttagttaggtttgtacgaatttttttattgtaatatatgttaatagaaatgtgtttttatttgttgtcggatagtttgatgtttgatatttcgagataagttttagtataatgagtatttttgtgagtaattataggtgtgtgttgaggagtttagggtattaattagaggtttaattatgaaaaaggtggattttttgttttatttttggattttgagtttattatatattttttaaattgtagtatttatttgttcggttttttagaatgtttgttttgattgatatggattttaaagtgtattaaaggacgtgattaaagtaggtttaaatattaatttggaagaagtatggtttatgttttttttttttttttttttttttttttatttatttatttatttgtttatttttgatgtaggaaaaaagtttgttgaaatgttaaaattttaaattagtatttgttaaattatttattatatgtgaattttattgaattaagtattatatagtaattttaagaatgtaaatattaagatttgtagaaattaagatttatgtaaagaaaaaaaagttttaggaaaaatggtttgtgaatatatataaagttttttaggaagataagttgttaaatgaggtaatttttattatgatagattgaatatgttagaatttagtatgttattattgttttgttttaatgtgatattgatagaattaaattaggattatttttaaggattttttagataattatattgaaatttaagaaaagaaattaggattttgtgtgtgtgtgtgtgtgtgtgtgtggagattttgttttttatttttatattgagattataataggttgtataattataagttacgttattatagtatagttatgtaatattttagttagtggtagattatatatatgatggtggttttataagattatagtgttgtgtttttattgaattttttttgtgttagatgtggtttgatatgtagataatttttattgtgttataattgtttatattattcggtatagtaatatgttgtgtatatttgtattttggatgtgtagtaggtatttattatttaggtttgtgtaagttattttatgatgtttataagatgattatagattgtttaatagtatattttttagaatgtatttttattataaagcgatacgattgtattttagtgtgtgttttgattaatgtatatggttaatagttgtataagtttgtggtttgtggtttttttattaatttttgttatatatatatatatataaatacgtttgtatagatggttttagagatgtggtttggttatggatggtatgaatgttgtttagtggtggatttttgatttgttataggtaagaattagata

SEQ ID NO: 2149 - DNA, 2400 bp, Artificial Sequence
  chemically treated genomic DNA (Homo sapiens)
ataaattattttttttaagatttttttttttttatatgggttttagtttttataaattttgatatttatatttttaaaattattgtataatgtttaatttagtagagtttatatatggtaaatagtttagtaagtattaatttaaagttttagtattttagtagattttttttttatattagaaataaatagataaatagataagtgaaaaaggaaggaaggaagaaaaaaaaatatgaattatgttttttttaggttaatgtttaagtttgttttaattacgttttttgatatattttaaggtttatattagttaaggtaaatattttaagggatcgagtagatggatgttgtagtttagaaagtgtgtggtaaatttaggatttaagagtggaataaaagatttattttttttataattaagtttttgattaatgttttaggttttttagtatatatttgtaattatttatagaggtatttattgtgttgggatttgtttcggaatattaggtattaagttattcggtagtagatggaagtatatttttgttgatatatgttgtaatgaaaggattcgtgtaaatttggttagtaaggtagtagaatgttatgtatttgaagattaataatgtaaataattatgatgttaattttgttatgtttgtgttaattttatttgttgagatgtggaattaaattttgaagtttgtgggttttaaaaatttttagtatatatttgaattaaataagtttttttttattattggaatttagagttttaattaaaaaatgtttttttaggttaaatttatgggaattatgaattaaattttttaataagttaatattataatttgtaaatgaatttattttgtattgtaagatttgtatgtgtaaaggtaataatttgtaaaatggggtatttaaaaaatatgattaagttgttatattgatgttaaagatagtagataggtatgtagttgagataaagttatatggtttttttattttttggattttagttaattattttaacggaatttgttattatgagtaagaaggttggaaagagagggtaaaataatagatggttagtttattttattttgttatttacgtaagatagcgttttgaggagatatagcgtttgtgtgaagtcgttaaagatagtattgggggagggtaaatgggggggttaaagagggaattatatgattagttagttaaattatggttatatgtttgttttcgttgtttttttatattgaagtggaataattcgaagattgtatttttgtgataatattttaaaattaggaataattacgtggtatttaaagaagagtcgttgtatatttttaatagtgggatatttataaaatgttttatttatttttaatttagtagaattttttttttattatttttattatatattaagatatagttataatagaagtttttgaaaaatataataaaaatttgaaattttttttatagtttttagggttttatatatatatgggaaagaatgatgtttttagatatgagttatttatgtgtaatttttatgttttttgttatttttttgtttaaagtgaatattatttgtttaataggttttttaaagtgatttatgttttaatttttttatttttataggtttttggggaataggcgttatttggttagatgagtaagttttttagtggtgatttgtgagattttgatgtatttattatttaagtagtaagtattatatttaatttgtagttttttattttttatttttttttatttttttttttaagtttttaaagtttattgtattatttttatgtttttgcgtatttagaatttagtttttatttatgagtgagaatatataatgtttggttttttattttcgagttatttcgtttagaataatggtttaattattttgaaaaatttatgtgtatttttttttataagtaaaaagtaatttaagtaatataatgatagtaattaatgttgttaaatttttgttaaaaatattattttttgatgaagattttgggtttgagagtagttttttttgttgaatataagtatagaatgtaatgttagggtggtgtgaaagaataattttttttaattttagttggtttatttaatagtattataaggatttgtagagaggaggaaaggggttattttttttattgtgtgatttaatgttatttagcgttgtttttattgagatggttagtgagaaacggttttgtattttgacgtggtgaaaagaattttagaatttgagttatgaggtttaggtttaaagttttgtgtgattgtgggtagattatgttatatttagagttttatgtttttttttcgtaaaatgaaatgatattt

SEQ ID NO: 2150 - DNA, 2400 bp, Artificial Sequence
  chemically treated genomic DNA (Homo sapiens)
gagtattattttattttacggaagagaagtatgaagttttgggtatgatatgatttgtttatagttatataaggttttggatttaggttttatggtttaagttttagagttttttttattacgttagagtgtagggtcgttttttattagttattttagtggaggtagcgttgaatagtattgaattatatagtagaaaggatggtttttttttttttttttgtaggtttttgtgatattgttaggtaggttagttggagttgagagaagttatttttttatattattttgatattgtattttgtgtttatatttaataaggagagttgtttttagatttagagtttttattagaggatggtatttttagtaaaaatttagtagtattgattattgttattgtattatttgagttattttttatttatgagaaaggatatatataaattttttagaataattgggttattattttaagcgaagtaattcgggaatggaaaattaaatattgtatgtttttatttataagtgggagttaagttttgagtacgtagaggtataagaataatatagtggattttggggatttgggggaaagggtggaaggggatgagggataaaagattataaattgggtatagtgtttattgtttgggtgatgggtgtattaaaattttataaattattattaaagaatttatttatttgattaaatagcgtttgttttttaaaaatttatggaaataaaaaaattaaaatatgagttattttgaaaaatttgttaggtaagtaatgtttattttggatagggagatggtaaaaggtatgaggattgtatatgaatgatttatgtttgagagtattatttttttttatgtatatataaagttttggaggttgtgaggaaggttttagatttttattatattttttaaagatttttgttatagttgtgttttaatgtatggtggggatggtgaaagaaggattttattgagttagaaatgagtggggtattttgtggatgttttattattgagaatatgtagcggtttttttttgagtattacgtggttatttttaattttaaaatgttattataaagatatagttttcgagttgttttattttagtgtggagaagtaacggaagtaggtatatggttataatttggttgattggttatatagttttttttttaatttttttatttatttttttttagtgttgtttttggcgattttatataggcgttgtgtttttttagggcgttgttttacgtgggtggtagggtagggtaggttagttatttgttattttgttttttttttttaatttttttgtttatagtagtaggtttcgttgaagtgattggttgaggtttagggggtgagggagttatgtgattttattttagttatatgtttatttgttgtttttagtattagtatagtaatttagttatattttttgaatgttttattttatagattgttgtttttatatatataaattttataatgtaaaatggatttatttataaattgtggtattagtttgttaaaggatttagtttataatttttataaatttagtttagaaaagtattttttaattaaaattttaaattttagtggtgaaaaggggtttatttgatttaagtatgtgttaaagatttttaaagtttataagttttaaggtttagttttatattttaatagatggaattaatataagtataataaagttaatattatggttgtttgtattattaatttttaaatgtatggtattttgttattttgttagttaggtttgtacgaatttttttattgtaatatatgttaatagaaatgtgtttttatttgttgtcggatagtttgatgtttgatatttcgagataagttttagtataatgagtatttttgtgagtaattataggtgtgtgttgaggagtttagggtattaattagaggtttaattatgaaaaaggtggattttttgttttatttttggattttgagtttattatatattttttaaattgtagtatttatttgttcggttttttagaatgtttgttttgattgatatggattttaaagtgtattaaaggacgtgattaaagtaggtttaaatattaatttggaagaagtatggtttatgttttttttttttttttttttttttttttatttatttatttatttgtttatttttgatgtaggaaaaaagtttgttgaaatgttaaaattttaaattagtatttgttaaattatttattatatgtgaattttattgaattaagtattatatagtaattttaagaatgtaaatattaagatttgtagaaattaagatttatgtaaagaaaaaaaagttttaggaaaaatggtttgt

SEQ ID NO: 2151 - DNA, 2490 bp, Artificial Sequence
  chemically treated genomic DNA (Homo sapiens)
ttagttaattatttatttttttgagttgtttttttatttataaaatgggtataataattttttaaattataaaaatgttttgaggattaaatgagattatgaatataaagtatttagtagaaggttgggtatttattaagtgtttagtggtagttattattattagtattatttaggttaataagaaataagataaattgaggaattaaaagttttaaaattttaaatttttttttttggattttatttttatattttttttattgaatttagagatagcggttttttttttttattattttggtattttttcgtttattattttttataattgttttttttatggaggtgttaaggagtaataaaatgtttaaaaggtaagagaggaggaaggggaagtttttatttaggaaatttatattttagttagttttggtattagatgtgttttttagtagtgtattaatattaggagggtttatatgggaaggtaatagtagatttttagtattttttttaaattaggattagaattggttttattttgattattattatttttttgggttattgtgttttagggtttagattatttttttttagtaaagtttgtttaatatttttaggtgttgagaggttttttttatagggttttagagtatatatgtatattttttttagaagacggtagcgagttcgtattggaatttatttttttttattagtttgattgtttgagggtttgtattattttttttttatttttatatatttaatatttagaaaaggaattttaattttattttagataggtaaattagttattgaatgtaggttgatttttagggattaatttaggtttaggtagttttggtttaaattgggttcgtagttatttttaagtggggagtcgaaattttaaagtttgatttttttttttgttgaatagaaggggagatgtgtaagaacgatataattttattttagatattaatttagaggaagaggatgggagttattatattgatttttaaaaggggataagagatttatatttatatttttaagtttattatagattattaattacgatgtaatttgttataatagggggattttttttgaagagatggtgttaaaatttgattatgaggtttttttatgtgaagagagaaaagggggtgtttggggattatttacgagaatttggggagggttttaattgtataaattagttgtgggttatagaatgtttgtttagtttattagtatttgttgtttatagtgattatttatttaatagattggtcgtgaataagatgatgggattagcgggtttatgttttagagagttttgtttattattaatatgagttacgttttgtttaggaattattttttttgttgaagaaatattgcgatgtaatatgataaatacgtttttattacgagtgtagatttgtttagaaagatttgtattaaggtggttgtattttgtatgaattatatgttggggaggggtaggtagtattaaaaattagttttatttgagtttttaagttattatggtatatgtgtttgttttattataaattttaaaggtttgtgacgtttggtttttattgtttaagttttttttttttttgtaagggtggaattatttgtttgtaatattagtaattattatgtattttggaattgagtagagagtgtgttcgagtgtgtatgtttagattggagggaattatttttatttttaaagttaaattttattttttttttaatttgaaattatgtattttagtttttggaaagttgggaatggtagttagaaggaaataagttatattaatttggttgatgtgagagaggagtttagttttggaaattttatataaatttagaaagagaatattacgtttttattttttatacgtttattttatttgtttttttgaataagtataaataagatataatagtttagtaggttgttattgaaagagtgagtaatgggtttttaggaaagaggttggtggtggttaaggagtttgtattgatagaattaaaggaggaaagtagtagttatgtgtttattttgatttgtttttaatggggttatgtttttataaagaaaagagttaatattttgattttatttttttatattttttaaaaggtataggaagtttttatttatagttattagtagttttttggataattaaagttgttagtgttatttaggaatttttttggggatttagtttttttttgttttttgtttgaaaatttttttgatttagaaagatttttgggtttgttttatataagtagaaggtttgtttttttagatttgtttttttttagtaaaattgtgaaagaattttattttttttttaaagttgtttttttggttttatattttaattttaataattatagattatagagaagttgatagaatttgtttttataaaataaatataa

SEQ ID NO: 2152 - DNA, 2490 bp, Artificial Sequence
  chemically treated genomic DNA (Homo sapiens)
ttgtgtttgttttatggaaataggttttgttagtttttttatagtttatagttgttaagattaaaatgtgagattagaagagtagttttgaaagagaagtagaatttttttatagttttgttgaggaaggataagtttgaaggaataggttttttgtttatgtaagataaatttaggaatttttttggattagaggagtttttagataaagggtagagagagattagatttttaaaagggtttttaggtaatattagtagttttggttatttaagaggttgttggtgattgtaggtagggattttttgtgttttttgaaaagtgtaggagagtaggattagggtgttggtttttttttttgtgaagatatagttttattaaaagtagattaaggtgagtatatggttgttgttttttttttttggttttattagtataagttttttagttattattagttttttttttagaagtttattatttatttttttagtagtagtttattaaattattgtgttttgtttgtgtttgtttaggagaatagatgaggtggacgtgtgggaggtggggacgtaatgttttttttttgagtttgtgtggagtttttagggttaggttttttttttatattagttaaattgatgtgatttgtttttttttggttgttatttttaattttttagaggttgaggtgtatgattttaaattgaagggggagtagaatttgattttgaaggtaggggtaattttttttaatttaaatatgtatattcgagtatattttttgtttaattttaaggtgtatagtaattgttggtattataaataggtaattttatttttgtaaaggaggaggggatttaaataatgaaagttagacgttataggtttttgaggtttatagtgaagtaggtatatatgttataatgatttgaaggtttaagtgggattagtttttagtgttatttatttttttttagtatgtgatttatgtaaaatgtagttattttaatgtagatttttttagataaatttatattcgtgatggggacgtgtttattatattatatcgtagtgtttttttaataagaggaatggtttttgaataggacgtagtttatgttaatgatgagtaaagttttttggggtatgaattcgttgattttattattttgtttacggttagtttgttggatgaatggttattgtaagtagtaggtgttaatgagttgagtaagtattttgtggtttatagttagtttgtgtagttggagttttttttagattttcgtggataatttttagatatttttttttttttttttatatggaaaagttttatgattaaattttggtattatttttttaaagggaatttttttgttgtagtaggttgtatcgtggttggtaatttgtggtaagtttgggagtatgaatgtgggttttttgtttttttttgagagttagtgtggtaatttttattttttttttttggattagtatttggaatggagttgtgtcgtttttgtatatttttttttttatttaataagagaaagaattagattttaagatttcggttttttatttgggaatggttgcgaatttagtttaaattagaattatttgggtttaggttggtttttgagaattaatttgtatttagtgattagtttatttatttgaaataaagttagggttttttttttagatattaggtatatagagatgaaagagagatgatgtaagtttttagataattaggttggtggagaggagtaaattttaatgcgagttcgttatcgttttttaaaggagatgtgtatatgtattttgaggttttgtaggaggggttttttagtatttaggggtgttggataggttttgttaaagagggatggtttgggttttgagatatagtgatttagagaagtggtggtggttaggatgggattagttttagttttggtttagggaaaatgttaagaatttgttgttgtttttttatatagatttttttgatgttgatgtattgttaagaaatatatttggtattaggattgattaggatgtaaattttttaagtagaggttttttttttttttttttttgttttttgggtattttattgttttttagtatttttatgaggaggataattgtggaaagtagtggacgaggaggtgttagggtaataagaaggaggaatcgttatttttaggtttaatggaaaggatataaaagtgaggtttagaagaaaaagtttgaagttttggggtttttggttttttagtttattttgttttttattagtttagatggtattagtaatagtagttattattaagtatttaatggatgtttagttttttgttgaatgttttatatttatgattttatttaatttttaaaatatttttataatttaggagattattatgtttattttataaatgaggaaatagtttagggaagtaagtaattggttga

SEQ ID NO: 2153 - DNA, 2475 bp, Artificial Sequence
  chemically treated genomic DNA (Homo sapiens)
gttatcgcgttcggtttatggataaggttttgatgttggagaaaggagagtgaataaaataattatgatttttgtttttatggggtttatagatagggagtaattagataattgtataaataaataattatagattttggtaaatgttaagatatttatagagggttagaagaaaatatgttaggtagttttaatttttaggttaagagagataggtattttttgttgagttggaagaggaaattaaggtttaggatagggtaggtgtgtttgttgtcgtttggtgagttagggttgtattaggattagaagttttatttttgattattgaataaaaggtttagttttaggttgatatttattatgatatatttttttatttttttttttgttattttttgattttattttttttggaaaataagttttgattcgtagttttgatatttgacgtttataaatttttaaattttatttttattatttttttatttttattttatatagagtgtagtttagttaggttggtaagggttgttggttagggttagatgattagaaagtgtagaggaggagagaatttggggtttttaggttgggagtagttagggaagggttaagtcggaaaagtagtatttgttaggttggtaagagataaggtttaagtgtaggtattgcgaggaagcgagagtgaggtagaaggatgttttaatgttaggaagtgacgtgtagggatagagggatgggggatgaaggatgaagaatggaggggaggatgaagttgggttatatggttaggaggaagagtagtagggaaggaatgtatagagagttttttgtttttaggttttttttaatttttgtttttttttttttttatttttattttttataattttagtagagggttgaggggaatatagtaaaattttggagattgttttttagggagtagagtattttattaatatttcggttagatttatggtttagggaggggtggggtaatttataggagagtgaaggcgttttagtttttaaggatttttgagaggttatgtagtttatgttttcgttttttaatatttaatagaggggaattatattttttttatttttttttagatatgaagagatttttcgttttttttagattttttgttttttataatttttggttgtggggaattttttttaaggtatagattggattttttttgttgtagtttttgatttggttttttttattttgttttttgtggttagagaaagtttttttttgggtgattatagcggttttttaggattttttttttaatatttttttatcgttagttggttttttttagaaggtaagtttaattttttttattgtagtttttagtatttttttcgttgtcgtattttacgtttttaaggtagaaatgtatttttttttttattaaataattaatagagataagggagaagaagggagagatttaagaagatggggatgaattaaggagatggagttggaggtggatgtttgatatagaagaaggaagatcggggattttttaaggtagggtagggacggggttagcgggttttatcggtgtcggggttttttagaaaggcgttttcgtttttgcggttttttagcggggtcgcgggcgtcggttcgttttcgggtagtcgcgggaagttggtgatgtttatgtagtttattggcgagtaggcgtttagggcgtttttttggttggtttcgtttttcgtcgttattttcgttcgcgttttttagtagcgtagcgtttgtcggaagtggttgcggcgggggagtgggagggcggagggcggggtttgattttcgcgatagtcgggagggggcgttttttttagttttcggtcgtgtttcggtttgattcgttttcgtttgtttagcgttattagtttgtagttggtatataggtgcgtgtagatggatagttaggaaggtagcgtagggtcgaggggagagcgcggggtaagcgagattttagtggttttgtattttacgtagtttagggattaaatttttttttttttttagtttgaatatagttagtgttttttttaaattttaggtttttttttcgggttttagatttttttattgatcgtaaatttttttcgattttagattttgtttttgattttaaatttttcggattttagatttttttttgaatttcgagatttttttttttcgattttagatttttttttcgattttagatttttttttcgattttagattttgtttttatttttaaatttttttgaaaattttagtttatgttttatttttaggtttttttgattgtagacgtttttttggataatagattttttttttgattttagattttttttcgtatttcgatatttttgattttttttttaatcgtatttttaaattttagtgtgtgttaggatttttgaaagcggattttt

SEQ ID NO: 2154 - DNA, 2475 bp, Artificial Sequence
  chemically treated genomic DNA (Homo sapiens)
ggggattcgtttttaaagattttaatatatattaaagtttgagaatgcggttgaaagaggagttagaagtgtcggggtgcgggaagggatttgaggttagaggagggatttgttgtttaaagaggcgtttgtagttaaagaggtttggagatgaagtatgggttggggtttttaaaagggtttgggggtgaagatagagtttgaagtcgaaaaagaggtttaaggtcggaggaggagtttaaaatcggaggaggaggatttcggaatttaaggaggggtttggggttcgaggagtttggggttagagataggatttggggtcgagagggatttgcggttagtgaaagggtttggggttcgaaaaggaagtttgggatttgaggaggatattagttgtatttaggttggaaggaggaaggggtttggtttttgagttgcgtaaagtgtagagttattgaagtttcgtttgtttcgcgtttttttttcgattttgcgttgtttttttggttgtttatttatacgtatttgtgtgttagttgtaggttgatagcgttgagtagacgggggcgagttagatcgggatacggtcgagggttgggagaggcgttttttttcggttgtcgcgaagattaggtttcgtttttcgtttttttattttttcgtcgtagttattttcggtaggcgttgcgttgttggggggcgcgggcgaggatggcggcggagaacgaggttagttaggagagcgttttgggcgtttattcgttagtggattatatgagtattattagtttttcgcggttgttcgaggacgagtcggcgttcgcggtttcgttgaggggtcgtaaggacgaggacgtttttttgggagatttcgatatcggtgaggttcgttgatttcgtttttgttttgttttgggaagttttcggtttttttttttttgtgttaagtatttatttttagttttatttttttaatttatttttatttttttggattttttttttttttttttttgtttttgttaattatttggtgaggaagggggtgtatttttgttttggaggcgtaggatgcgataacggagaggatgttagggattgtagtagaagggattgggtttattttttgggaagaattaattaacgatgaaggaatgttgaaggggagattttaaggaatcgttgtgattatttagaagagggttttttttagttatagaggataggataggagaaattaagttagagattgtagtaagagggatttaatttgtgttttaagagaagttttttatagttagggattgtgagaagtagagggtttgggagaagcggagaatttttttatgtttagggaggggtaaagagaatatgatttttttttgttgggtgttgggagacggaggtatggattgtatgattttttaaaagtttttggggattagaacgtttttatttttttgtggattattttatttttttttgagttatggatttggtcggggtattagtaaggtattttgttttttaggaagtagtttttagaattttattgtgttttttttagttttttgttggaattgtgagaagtgggggtaagagaaggaggagatagggattggaagagatttgggggtaaagagttttttgtgtattttttttttgttgtttttttttttagttatgtggtttagttttatttttttttttattttttattttttattttttatttttttgtttttgtacgttattttttggtattagagtatttttttattttattttcgttttttcgtagtgtttgtatttgagttttgttttttattagtttggtagatgttgttttttcggtttggtttttttttagttgtttttagtttgaaagttttaaattttttttttttttatattttttggttatttggttttgattagtagtttttgttaatttgattggattgtattttgtatggggtgggggtgaggagataatgaagatggagtttagaggtttatgggcgttaaatgttagggttgcggattaaaatttattttttaaagggagtggaattaggaggtagtagggagaggagtgggaagatgtgttatgatggatattagtttgaagttaggttttttatttagtagttaggagtgagatttttggttttaatatagttttgatttattaagcgataataggtatatttattttgttttgggttttagtttttttttttagtttaatagagaatgtttgttttttttgatttagagattggaattgtttgatatgtttttttttggttttttgtaaatgttttagtatttattaaaatttatgattatttatttgtgtaattatttgattattttttgtttgtaagttttatgagggtagggattatgattgttttgtttatttttttttttttagtattaagattttatttataggtcgggcgcggtggt

SEQ ID NO: 2155 - DNA, 2498 bp, Artificial Sequence
  chemically treated genomic DNA (Homo sapiens)
ttttttatagttgggcgtttaggtgattgatagttttttaaatattatgttagtattgaagatatttatttttttattttgtaggttagaagattgaggtttagtgatgtcggagggttttatagttagtgagtgaggaagttaaaatgtgaatttgatggttttttttgatttattttatgtttgtgtgtgatagttatggttgtggcgggggtgagagtgggtatagagatgttagtttgggtttgttattgttagaagtgaagatgatattttagtgttgtagattttgtaggaggggattggagttaagttataaatttttttttgttaggagatgggtttttggagtgggtgtggtgtttgattattcggggagatggttgaagttggggatttgggaaggtttttagaagggaggtggtttggggaattaggggtttagtttttttaggatggattggtttgatggtggttttttaagttcgttttgtttttagttattgggtattttgtttattttggaggaggaatgtatgttttttaaggttttagacgttagttttcgggttaagttttacgataattacgcggggaagttatttaatttttagtagtttcggtttgataagaagcgtaagtattaggtttatttcgaggtggtttattacgtaggcgtggtaggtgtttgttggaattttagttttcggttaggtttttttcgttttgttttaggttttttattcgggtttagtatttgatttgtttttttaggtgttttatagtattgtgggttggttggagaaaaataaggattttttgaatgagatcgtggtttttattttttagaagttatagaataggtttttggcgattttttatgagaattatgcgggtttttgttttagtgagtatggagggataagatttttattttgataggggtttatagagcgatattttttggagtgattaggttttttgtttttattagttgagttttttaagtttggggtgaaagagaagcgtaagaaggtagtatcgttttagacggtgttttagttgtataaggtaaggttttatttgggagatagatttttttttttggtagtttttagtttcgttttttattttttgttttgttttttgtgttttgggcgggcggttgttaagatttgtagtgatgtttaatttttttttacgtgaatattatagtaagtttgtgttgtttttcgtttttacgttgtttgggtagggtttgtggggaaggggtgggagttttggggttttgggagggacggggatttggtagggaagtgaagattttggtggtggtgatgggagatagcgaagggttttttattattagaatgagagtgaaagagtaaaagtgtagggtatttagggttttgttttcgtttcggttttgattattgcggtatttaattttggttttttgttttttttgtgttttttttttatttttttttattgttaggagaattttaataagttgatgattaatttgcgggttatatagttttatttcgttcgttgtattgtttttaacgagaataaaattttaggtagttatttagggttggtttggttggggtcgggaggtattatgggaaggtgatagggtagaggtcgggaggttgagtatatttttttttttatttcgtagggtttttattgttgttttttttttggggtttgcgggtgtgtttgttgatttttgattttttttttttttacgtttaggggttatggatgtttttttggtgttatattagttgcgttgtaatggggttttggaggggattcggatttgtcgttaagggttttttaataggttgttttatatcgattttcggtagcggtgggtgattttttttttttgtttgttgttttaggtggaggtttgaggggttgggtaggatatatatattagagtttaatagacggttttttgtttggagggggaagtagggattgtgaggggtttggttaggtattttagtaagatatgggggtggtttagatttggtcggggatttggggagaagtgaataggtttggggtaaatagtggaggtggagtttataggtttcgttgataagttggatatggaattttggatgtagaaaagacgaatgatttttagttttgggagtgagtaatttgggagttattagtggtagatttattgagttataaaaatagggttttttgatttggaggagaggtgaagggatattggtttgagttttgttttgcgtgtattaggtttgaaatgtttttagtagatattttagaaaagttatgggggagattgggattattaatttggagtttagggtagcgggtagaaaggatgtagatttgggagttgaacgagaattatgtggacgaggttttatgagatatttggtatatagtaagtatttgggtagtgttgttagttttttttcgtttttttaatgggtaataagtat

SEQ ID NO: 2156 - DNA, 2498 bp, Artificial Sequence
  chemically treated genomic DNA (Homo sapiens)
atgtttgttgtttattgagggaacggggaggagttggtagtattgtttaggtgtttgttatgtgttaggtgttttatgaagtttcgtttatatgattttcgtttaatttttaaatttgtattttttttgttcgttgttttgagttttagattgataattttaattttttttatgatttttttaggatgtttgttggaggtattttaaatttgatatacgtaaaatagagtttaaattagtatttttttattttttttttaaattaaaaaattttgtttttgtagtttagtaaatttattattggtagtttttaggttgtttatttttaaaattagaaattattcgttttttttgtatttagaattttatgtttagtttattagcgaggtttgtaggttttatttttattatttgttttaagtttatttatttttttttaagttttcggttaggtttgagttatttttatgttttgttgggatatttggttaggttttttatagtttttgtttttttttttagataggggatcgtttgttgggttttgatatgtgtgttttgtttagttttttaggtttttatttggagtagtaggtagggggaaggggttatttatcgttgtcggaagtcggtgtagagtaatttgttggggaatttttggcggtagattcggattttttttaggattttattgtagcgtagttggtgtagtattaagaaggtatttatgatttttggacgtgagaggggaaaaggttagaggttaataggtatattcgtaggttttagagaaaaagtagtagtggagattttgcgaggtgagggggaagatgtatttagtttttcggtttttgttttgttatttttttatgatgtttttcggttttagttaggttagttttgggtgattatttggggttttgttttcgttggggataatgtagcggacgaagtggggttgtgtggttcgtaggttggttattagtttgttgaggtttttttggtagtggggaagagtgagggaaaggtataaagggggtagagaattagaattggatgtcgtagtggttaggatcgagacgggagtagggttttaagtgttttgtatttttgtttttttatttttattttggtgatgggagatttttcgttgttttttattattattattaaagtttttatttttttgttaaattttcgttttttttagagttttagggtttttattttttttttataaattttgtttaggtagcgtagggacgggaagtagtatagatttgttgtgatgtttacgtggagaggagttaaatattattgtaagttttaatagtcgttcgtttaaggtataggggatagggtagggggtgaaggacggggttggaggttgttaagagggagggtttgttttttagatggggttttattttgtgtagttgggatatcgtttggaacgatgttgtttttttacgttttttttttattttagatttggggggtttagttaatagagataaggggtttggttattttagggaatgtcgttttgtgggtttttgttagagtggagattttgtttttttatatttattggagtaggagttcgtataatttttatagagagtcgttaggagtttattttgtgatttttggaagatggggattacggttttatttaggggatttttgtttttttttagttagtttataatgttgtaaggtatttggagagataagttaggtgttgagttcgggtgggagatttggagtagggcgggaggagtttggtcgagggttggggttttagtaagtatttattacgtttgcgtagtggattatttcgaagtgggtttggtatttgcgttttttgttaggtcgaggttgttggaaattgggtgattttttcgcgtggttgtcgtagagtttggttcggaagttggcgtttgaggttttggggaatatgtattttttttttaggatggataggatgtttagtggttgggaatagaacgagtttgaaaagttattattaagttagtttattttggaaggattgaatttttggttttttaggttattttttttttgggagtttttttagatttttagttttagttattttttcggatggttagatattatatttattttaagaatttattttttaatagagaaaagtttgtggtttggttttagtttttttttgtaaaatttgtagtattgaggtgttatttttatttttaataatggtaaatttaagttggtatttttgtatttatttttattttcgttatagttatggttgttatatataaatatggggtaagttaaaaaaagttattaagtttatattttggtttttttatttattagttgtggggtttttcgatattattaagttttagttttttaatttgtagagtgggaagatgaatgtttttagtgttgatataatatttaaaaagttgttaattatttaaacgtttagttgtagggga

SEQ ID NO: 2157 - DNA, 2282 bp, Artificial Sequence
  chemically treated genomic DNA (Homo sapiens)
tcggttaaatttttggagatataggattttgtcgtgttgtttgggttggtttcgaatttttggatttaagcgatttgtttgtttcggttttttaaagtgttgggattatagggttttaagttaggttttaagaatataagggggaaaaaggttgtttatttatggttgtgtgatggttaggaaaatattttttatttataattgtttttttcgtttatagttttttatatatatagattttttagtttttattttattttatttttttcgttatttgaggaagtgatatttaaattaaatttaaataaagttatattgtgaaaagttttatttttattttttttttttttagtttaatttttattttatttttattaattattttattagttttttgagtattttttaaattttttatgaaaaagttgtttttaaataaagttaatgttttataggtgttagtaaggttcggggtgggggagggtggaagaagtagtggattaggttttatttaatttggtttattttaaagtagtgtttttcgtttatttaaaaataataataattatatgttgggtatttgttataagttagatgtttaatattaattatttttagtttttagtatgtattagaaatgtattaatgttttatataattgttttttttgatttttataataattttaaaaggtaggttattaatttttatttttattttataagtgaggaaattgaggtatagaaaggttatttgtttaagtaagagagaggagtagggttttgaatttaggtttgattttagagttttttttaatcgtgacgttttatattagtaaattagatatagtttttgtattcgttggaatttagtttaatgtgggagacgggcgagaaaaaggtagataataaagaaatacgaaattatagattaagaaagtaatgtaaacgaaacgaattcgcggttgtgatagaataataatggggatttattttagaaaggggaaggaaagagtgttaaggaaaggtttgagaaaatgatatttatgaaatgttcgggaattatttgggggttgtaatgatgatttttttttttacgtttaatatacgggataaattcgaggtttatagaggttaaaataaatacgatagggttttttagacgtgtagacgtggcgtaaagaagggaggatttagaaattgggtttagggttcgtatacgttattagtgtttatagtagtttagtttcgttcggtttttgataagggatattaagttagttgttttttacggtttcgttgtagttgagagcgttcgggtagtttatagggaggtttttcggttagttaaaagggttttggttcgtttagcggcggtttggaaaggtttttttttcggtttttcgttagttttcgtttggttcgtttcgtttcgttttttttggtttagtttcgtatttgtatcgttcggattaggtttcggtcggttagttggttttgtcgtagttgtagtagaatgttattaggtcgcggtcggtcgttttattcgttttaagtcgttattgtggttgtcgatcgtttttttcggtcggttttagatttagtcgttatcggcgtcgtcgttatgttttttcgtcggataaataggaagtaagcggtttcggggtcgcggagatttttacggggcggcggaggggtcgtcgtagcgtttttagtgggtcgtcggcggaggcgtaagtcgcgtggtagggatcgtgtgcggcgtggaggttattgggaattgtagttttgcgcggtagcggggtaggtgggaaaagagatgtggttttttttgtattgtcggtttttttggttttcgggtttagtatttcggcgaaattttttaaggtttatatttttttatttttttcgtcgatttgggtaggatgtaggtagttggttaagaaatgattttgggttttaggttaggagttaggttttcgagttcgttttttgtttgtttttttttatacgtgatttatcgcggatatcgattaagttatcgcgttttgttattgcgtttgtgttttcgttaggttattttatttatagattttgggagtttgattaatcgtagtttttggggttttttttgcgttcgatattaaattatgtttaggggaaagggagggtgtttgggatatagtggtgagtagaacggtttgggattttttattacgaaatgtaggttataggggaagatagtagatttatatataaagaaacgtagttttaaattggata

SEQ ID NO: 2158 - DNA, 2282 bp, Artificial Sequence
  chemically treated genomic DNA (Homo sapiens)
tatttagtttgagattgcgtttttttgtgtatggatttgttgtttttttttgtaatttgtatttcgtgataaaggattttaggtcgttttgtttattattgtattttagatatttttttttttttttagatatggtttggtgtcgggcgtagagaaagttttaggaattacgattgattaggtttttagaatttatagatggagtgatttgacgaggatataggcgtagtggtagagcgcgatgatttggtcgatgttcgcggtgagttacgtgtagagagaagtaggtaggaagcggattcgagggtttgatttttgatttgaagtttaggattattttttggttagttgtttgtattttgtttaaatcggcgagagaaatgggagaatgtggattttgggagatttcgtcgaaatgttgggttcgggggttagagaaatcggtagtgtaggaaaggttatatttttttttttatttatttcgttgtcgcgtaggattataatttttagtagtttttacgtcgtatacggtttttgttacgcggtttgcgttttcgtcgacggtttattgggggcgttgcggcgattttttcgtcgtttcgtagaaattttcgcggtttcgaggtcgtttgttttttgtttgttcgacgaggagatatggcggcggcgtcggtagcggttgggtttggagtcggtcgagggagacggtcggtagttatagtggcggtttggggcggatggggcggtcggtcgcggtttggtaatattttgttgtagttgcggtagggttagttgatcggtcggggtttggttcgggcggtgtaggtacgaggttggattaggaggggcggggcggggcggattaggcgggagttggcggggggtcggggaagaggtttttttaggtcgtcgttggacgggttaaagtttttttggttggtcggaaggtttttttgtgagttgttcggacgtttttagttgtagcggggtcgtgggaagtagttggtttgatgttttttgttaggggtcgagcggggttgggttgttgtggatattgatggcgtgtacgaattttgggtttagtttttggatttttttttttttgcgttacgtttatacgtttgggggattttgtcgtgtttgttttagtttttgtgggtttcgagtttatttcgtgtattgggcgtgggggagggggttattattgtagtttttaaatggttttcgagtattttataaatgttatttttttaggtttttttttgatatttttttttttttttttttaaagtaggtttttattgttattttgttatagtcgcgaattcgtttcgtttatattatttttttagtttataatttcgtatttttttgttgtttgtttttttttcgttcgttttttatattaggttgagttttagcgggtgtagagattatatttggtttgttagtgtagagcgttacggttaagagggattttggagttaggtttgggtttaaagttttgttttttttttttgtttgggtaggtgatttttttgtgttttagtttttttatttgtaagatgaagatgagaattagtaatttattttttaagattgttgtggagattaaagggggtaattgtgtaaagtattagtgtatttttggtgtatattaagggttgaaggtagttaatattaagtatttgatttataataggtgtttaatatatgattattgttatttttgagtgagcgaaggatattgttttagggtaaattaggttgaataggatttagtttattattttttttatttttttttatttcgaattttgttaatatttgtaaaatattagttttatttaaagatagtttttttataaaaagtttgaaggatatttaagaaattgataaagtggttggtgggagtgaggtgggaattgggttaaagggggagaaaatgggagtgagattttttatagtgtaattttatttaaatttaatttgaatattatttttttaaatgacgaaaaggatagaataaaataaaggttagggggtttgtgtgtatggaggattgtggacgaaaggagtagttgtgagtgagaaatgtttttttggttattatataattatagatgagtagttttttttttttttgtgtttttaagatttgatttaagattttgtaattttagtattttgggaggtcgaggtaggtagatcgtttgaatttaggaattcgagattagtttaggtaatacggtaaaattttgtgtttttaaaaatttagtcgg

SEQ ID NO: 2159 - DNA, 2452 bp, Artificial Sequence
  chemically treated genomic DNA (Homo sapiens)
aaaaatataaaaaaattagtcggttgtggtggtgggtgtttgtaattttagttatttgggaggttgaggcggagaattgtttgaatttgggaggtgaaggttgtagtgagttgagattgcgattatattattgtattttagtttgggcgatagagggagattttattttaaaaaaaaaaaaaaaaaaagagtttttagatattgttggtgttttagggattatattttagaattatttttgttttttgataggaagagatgaatagagggaaaagaagtggtgattgattttatttggattattgtaatgttttattgtggttttaggttttttttttatttcggttattgagtttttattaggagtaaattaatttttttaaagtttagttttaattatgtttttgtttaaagttttttggattttttgatattatttattattgttgtttattagaaatgtttgtagtgatgaaatgttttatatttgtatcgtttagtatggtaattattaattatatgtggttatgagttttatattttgttttattaaatttaaatttaaataattatatttggttagttgttagatagtgtagtgtatttggtttgttatttaaggttttgtttggtattagtttttttttatttttttagggatagttttaatttttagtattttaggttttaggttatatgtagcgttttttgattttattttgtaatttttagtattatggtttgtgttatgttttttttttagtttatattgtttttttgttttgtttttaatgtttaatttatatatgatttttttttcgaaattttttttgatatttgttgttttttaattttttttttttttgaattttttaatattttgttttttttttataatttttagtgttttttgttttatattgtagttggttggtgtgggtatttttttttattaaattgtgagtttttggaggatgtgattgttttttgtagagagtttttgttttttattgtaggtttttttaggtatatagaggagttcgataaattttataaatttttgtattggtatattggggatatagagatcggtattataatttttttgtttttaagttgtttataggtttttacgagagtttgatttatgtttagagaattattgaagttaatggttattttaggtagggagataaaagttatagagggtttagttggcgaggggagttcggtaggagttgtttaagtagaaggttgtgtttatatatatagacgatttttttgtttagtttggtttagtgtggggagatgggaatatttaggcgttattgtttggttgttttgtgaagttgcggattaattagtgatgtagcggttggtttagtcgtttggtttttgtagatggatggatgaagagaggattgaaaagatagtagagtagtgttagtttttggaagtgaagtgttggttgggtggagtgggtatttgggttgggaatgtgagtgtaaggaaatgtttgtgatttgatagtagatagtaggtgaaattttgttgggtttggtttggggggttatgaggtttttataatagtttttgttttaaatggaaaaattgttgaaaagaaaaaaaaaaaaaggaggttaggtgtagtgggttatgtttgttattttagtattgtgggaggttaaggtgagtagaatatttgagtttaggagtttgagattagtttaggtaatatggtaaaattttatttttataaaaaatataaaaattagtagtgtatggtggtgtatatttgtagttttagttatttagggggttgaggtaggaggattattttagttcggggaagttgaggttgtagtgaattatgattatattattgtattttagtatgggcgatagagtgagattttgttttaaaataataataatagtaataataaaatagaggaaaaaaagatagaaatagttttttggttttagattttaattttaagagtattttatattttgaaaatttttagtatatatttatttttgggataaaaatattaaaaaaaggaaattttattgatgttataatataaatatagaaaagtgtatagattataagtttatatatatttgtgtaattattttttagatatgaatagaatatgttagtatttttagaataaatttgtgtgaagtttaatgtgtgtaggattaatgatagaataaatataggttttggagttaggtatgtttggggttgaattttgggtttttgtatttattagtagtgtgattttggatgagtgatttaattttagtttttttttttgtaaaattaaggtggatttataatgtttgttttatagggaagtaggagatttaaaattgaaaatataggtaagttgttaggtatagtgttagtatataagtggggatttagatgttttttgtaatg

SEQ ID NO: 2160 - DNA, 2452 bp, Artificial Sequence
  chemically treated genomic DNA (Homo sapiens)
tattgtagagagtatttgagtttttatttatgtgttggtattgtgtttagtaatttgtttatatttttaattttaaattttttatttttttgtaaggtagatattatagatttattttgattttataggggaggaaattgaagttaaattatttatttaaggttatattgttagtaggtgtaggggtttaggatttaattttaggtatgtttgattttaaggtttgtgtttgttttattattaattttatatatattgggttttatataggtttattttggagatattgatatattttgtttatgtttggggggtagttatataagtatgtgtaaatttatgatttgtgtatttttttgtgtttatgttataatattaataaagttttttttttttaatgtttttgttttagagatgaatatatgttagagatttttaggatgtaaaatatttttaggattagagtttaaagttagaaagttgtttttattttttttttttttgttttgttgttgttgttattattgttttgagatagggttttattttgtcgtttatgttggagtgtagtggtgtgattatggtttattgtagttttaattttttcgggttgaggtaatttttttattttagttttttaagtagttgggattataggtgtatattattatgtattgttaatttttatattttttgtagagatagggttttgttatgttgtttaggttggttttaaatttttgagtttaagtgttttatttattttggttttttatagtgttgggataataggtatgatttattgtatttgattttttttttttttttttttttttaatagtttttttatttaaaatagggattgttatgaagattttataattttttaagttagatttagtagaattttatttgttgtttgttgttagattataaatatttttttgtatttatatttttagtttaggtgtttattttatttagttagtattttatttttagaagttggtattgttttgttgtttttttagttttttttttatttatttatttgtagggattagacggttagattagtcgttgtattattggttaattcgtaattttataaggtagttaggtagtgacgtttgaatgtttttatttttttatattaggttaggttgggtagagaagtcgtttgtgtatgtaaatatagttttttgtttaggtagtttttgtcggatttttttcgttaattgggttttttgtggtttttatttttttgtttaaaataattattggttttagtggttttttgggtatgaattagattttcgtagaagtttgtgagtagtttgaggatagggaagttatggtatcgatttttgtatttttagtgtgttagtataaaggtttgtgggatttgtcgaatttttttgtgtatttggagggatttatagtaggaagtaagagttttttatagaaaatagttatattttttaaaagtttatagtttagtaagagaaagtatttatattagttaattgtaatgtaaaatagaaagtattaaaggttgtaagaagaggatagagtgttggggagtttagaggagaaaaagattagagagtagtaggtgttaaaggaggtttcgaggaagaggttatatgtgggttgggtattaaaggtagggtagaaggataatgtagattgaggagagagtataatataagttatagtgttgggaattataaggtagaattaggaaacgttgtatatgatttggagtttgggatattgagggttgaggttatttttgaggagatagaaaggagttggtgttaagtagagttttgaatgataaattaagtgtattgtattgtttagtaattggttaaatgtgattatttaaatttaaatttaatggaataaaatgtaaaatttatagttatatgtggttagtggttattatattggacggtgtagatgtagaatattttattattatagatatttttagtggatagtaatggtggatagtgttagaggatttagagagttttgagtagaggtataattagagttgggttttaggaaaattaatttgtttttggtgaagatttagtgatcggagtgaaggagaagtttggaattatagtgggatattgtaataatttaggtgagattagttattattttttttttttttgtttatttttttttattaggaaatagggatgattttaaagtgtggtttttggaatattagtaatatttgggaattttttttttttttttttttttgagatggagtttttttttgtcgtttaggttggagtgtagtggtgtgatcgtaattttagtttattgtaatttttattttttaggtttaagtaatttttcgttttagttttttaagtagttgggattataggtatttattattataatcggttaatttttttgtattttt

SEQ ID NO: 2161 - DNA, 2498 bp, Artificial Sequence
  chemically treated genomic DNA (Homo sapiens)
cgggtttaatttttagttttttgggattgtttttttttttaaatagttatgggtgttttaaatagattttgggttagagtttgatgattttttgggatggataggggtttatggagatgggtgtttaggagttttgaagtaaagttttgtaatttatttttttttattagagtgagtagtaggaatcgggaggtaggggtgaggaatttagagtttcggttaaggttaatttaggtagtatttattggaagtagtttagagtattaagagggtaggagtaaaagatttttgttttggttcgttatttttttttttttttttattttttatttgttttttttttattatcggtttttgaagatttaaagagtcgattgaatttttagttgttaatatcgaattcggtttttgggaagatatttttttatttaacggatgaggagattgaggtttggtttggggaaaggtgttttttgatttagatagattttgtttttttatattataagtatttatagaatttaggttggagagtagatttcggggaaaatggggagatagagatatagttgagtaagatattaatattttaatgagggagaagtttatttggttagaagagttataaggaaaagttaaaatttaagtgttgagggtagatataaattagtagtatgttgtgagttttatagttaggggtattttgggtgttgtgttaggttattatttattgataagagtcggtaatattttagttttttttaaaatcgtgtttagttagcggtaggagagtttaggaagtttttagttttttagggagaggttaatacgtgtaagttgggttgtttttaaagttgttatggtatttggaagcgtgtagatggagttcggttggtatttagtaggtgtttatgtttattgaaaaagtaaaggtaaagtttgttgttcgggggaagttttagggtttttatatggttatagggaagttttgttttaggtgggtagttgttttttttttattgcgaatatggaaaggtattggttacgaggggttaatggggttgttgtgtgtataaggtttgttttagggagggtaaaagatattgttttgggatttaggaagttgtttttgaatcggtttttttacgatattattttttaggttgtgggatcgttaggttgggcggaagtggattttagttaaggggatgtttttagatgttatgtttttaaattggattcgtttagaaaggtaggtagagataggtttgcgttcgggaaagttttgggtaacgatttaggatggtatttaggttttttttgggtaggggatggttataggtttttttggcggcggtgtttattaatttcgttttaagaaggagagtttgggcgtggaggttttgggtagttgaaggtagagatttattttttttttggttatttatttttattttagtaacgttttttagaacgttttaaagtttttttaagttttcgtttttaggttagggttttgtagttagttttaaggttttttttaggagcgcgttttttaaataaagttgagagggggcggggggaatgagggagttttagatttattttagagtggtttttagagggtttgggttttttttttcggattgtttagtgggaaggagggtcggttggtgttttaggttcgcgggattgtgatagtcggcgatttttgcgatttttttttttattcgggcgtttttattttgagatagtcgtttttcgagcgtagtttttttagttttcgtattaagtcgttgggttcgtagtttagtattttttcggtgaggtcggagaaggtaagcgaggcgttgagcggtaagcggttgttgtttatcgacgacgcggttatcgacggttcgttcggggaggcgggcggtcgcgggggttgttgcgcggagggcgcgggttgggtcggttgtttcgtacggattttcgtcgggttttcggtcgcggattcggcgtcgttgtttagcgttagttttaggtttagtaggcgcgtttttttcgacgcgtagttcgatattttcgagttgttattcgtgaggttggggggcggcggtggcggtcgcggtttcgtattcgagcgcggacggtttttggtacggatttcggtgcggatttcggttattcgtatattcgtatcgcgcgtttcgggagttattgcgcgtttttttttgttcggtcgtgaggagaacgcggcgttgtaggcgattgttgagttcgggtttgggtcgcggcggtttttagttagcgattagtcggttacgtttttgggtcgggtcggcgacggcgcgcggtggttttttttttttttcggggtaggcgcgggtgtaggcgcgggttggggatcgtagtttcggatcgggggttcggtcgtcggcgtttttatcgcggtttttttcggttttagcgagttgcgcgtatggtttaggttcgttcggtttcgacgtttttgg

SEQ ID NO: 2162 - DNA, 2498 bp, Artificial Sequence
  chemically treated genomic DNA (Homo sapiens)
ttagggacgtcgaggtcgggcgggtttgggttatgcgcgtagttcgttgaggtcgagggaggtcgcgatggaggcgtcggcggtcgagttttcggttcggggttgcggtttttagttcgcgtttgtattcgcgtttgtttcggagaggaaaaagagttatcgcgcgtcgtcgtcggttcggtttaaagacgtggtcggttggtcgttggttaagggtcgtcgcggtttaggttcgggtttagtagtcgtttgtagcgtcgcgttttttttacggtcggataagaaggggcgcgtagtggttttcggggcgcgcggtgcgggtgtgcgggtggtcggggttcgtatcggggttcgtgttaagggtcgttcgcgttcgggtgcggggtcgcgatcgttatcgtcgttttttagttttacggatagtagttcggaggtgtcggattgcgcgtcggaggaggcgcgtttgttgggtttggagttggcgttgagtagcgacgtcgagttcgcggtcgggggttcggcgggggttcgtacggggtagtcggtttagttcgcgtttttcgcgtagtagttttcgcggtcgttcgttttttcggacgagtcgtcggtggtcgcgtcgtcggtgggtagtagtcgtttgtcgtttagcgtttcgtttgtttttttcgattttatcgaggagatgttggattgcgggtttagcggtttggtgcgggagttggaggagttgcgttcggagaacgattattttaaggtgggggcgttcgggtagaaagggaggtcgtaggggtcgtcggttgttatagtttcgcgggtttgaggtattagtcggtttttttttttattgaataattcggagaaaggggtttaagttttttggggattattttgaggtggatttggggtttttttatttttttcgtttttttttaattttatttgggaagcgcgtttttgaaaaagattttggaattggttatagggttttaatttgggagcggggatttgagaaagttttggagcgttttgggaggcgttgttgaggtgggggtgggtagttagggaagggatggatttttgtttttagttgtttagaatttttacgtttaggtttttttttttgggacgggattgatagatatcgtcgttagggaaatttgtggttattttttgtttaggaaaggtttgaatgttattttgagtcgttatttagggttttttcgggcgtaggtttgtttttgtttgtttttttgggcgggtttagtttgaaagtatgatatttgggaatatttttttggttggagtttattttcgtttagtttaacggttttatagtttggaggatgatgtcgtgggagaatcggtttagaggtagttttttaaattttaggatagtgttttttgttttttttggggtagattttgtgtatataatagttttattggtttttcgtggttagtgtttttttatgttcgtagtgagaggagggtaattgtttatttggaataggatttttttgtggttatgtggggattttagggtttttttcggatagtaggttttgtttttgtttttttagtggatatgagtatttattgggtgttagtcgggttttatttgtacgtttttaggtgttatggtagttttagggatagtttagtttgtacgtgttgatttttttttgggaggttggaagttttttgagtttttttgtcgttggttgggtacggttttggaggaggttgaaatgttgtcgatttttgttagtggatgatggtttggtataatatttagagtgtttttggttgtggagtttatagtatgttgttggtttatgtttgtttttagtatttaggttttaatttttttttgtggtttttttgattaaatgggttttttttttattagagtgttggtgttttgtttaattatgtttttgtttttttatttttttcgggatttgttttttagtttgagttttgtaaatgtttgtagtatggaaggataaggtttgtttgaattaagagatatttttttttaagttaggttttagtttttttattcgttaaatgggaggatgtttttttaagggtcgggttcggtgttggtaattgggagtttagtcggttttttgagtttttagaagtcggtggtaaggagagggtaagtggaaggtgaggaggaggagggaggtgacgagttaggataagggttttttgtttttgtttttttggtgttttgagttgtttttagtgagtgttgtttgaattggttttaatcgaaattttgagttttttatttttgtttttcggtttttgttatttattttggtgaagggggatgggttgtagagttttgttttagggtttttaggtatttatttttatgggtttttgtttattttaggaagttattaggttttgatttaaagtttgtttgaggtatttatgattgtttaaaggggaaaatagttttaggaggttgggggttgagttcg

SEQ ID NO: 2163 - DNA, 2500 bp, Artificial Sequence
  chemically treated genomic DNA (Homo sapiens)
tttttttttattgttatttttattattttggtggggatagaaatagagatatagttttttgtaaagttagatttgaggttggttgagatgtaggttgggtattttgtatattttgttggtgtgttaggttgtgtttttataagtttagattaaaaatggggatattaggagttgttatttgttttagaggtataatggtagtaagagatatttttgaaatagtattttgttttttttttgggagaatgaggagtttgttttttttatttttatgggaatttattatagtttttattatttttgtatttaggtatttttatttttttaaaaggttttgtatttttgattttttaggttttttatagtgggagttttagaatagagtaatttagtttttatgtaagttgtggatttttatttgttttaaaggaaagaaatatttttgtatgttttatatattaggtgttatagtatatttataggttttaggggttaggatgtggatatttttggtggggttacgattttggttattatatagttttattttttggttggtatgtaggattttttgagttttttaaatagtatggtgagtatggtatgattgtaaggagggtttttttttggtgtttttttggtggttcgtagagattataaagagggaaaagattttgttaatgttgttggatgtggttgaaaatgttttttttgttgagtttgagaagtgatagtatgttttgttggttggcgtggttttaggattttatttcgtaaatttgattatagatatttggagttttaaagagttagaaaaatttgtaaggttgaatgtagaagtttgaatgtttttattttgagtttttattgattataattatttttgaatagtaattattgtaggaatgaaagaaaatttggggttgattaaatgaagtagtgtaagattttgagtaggggtagatttggttagtagtgtaaaaaaaataaggttttgtgagagtttatattttttttttattttgttgtagtttataggtagttttgtttaatttttaacgtacgtttttatggtttttaggtaaattataggagatggtatcggtttttttaggagtgatttagtaatgtttaggttttaaggtagatttgtttatgttgttaggttgggttagtttggaggttgttttggtatgagtacgtaggtagatagatgttgacgtcgttttaaagaatcgtttttttaggtgttgagggcggtttttttgatgtttattttgtgttattgtttatttttataaggcgtttagttgttgcggtgatgatatttatattaataagtgttttatttatttgtcggttttagggaatgtttgttagttgcgtatggtagttaattttagggtatttttgagtttgatgtttttgtatttagagaattagtttttaaattttgtattaatatttgggtttgaaagattttttatttatttaggatttattttgaaagggggagttatagttaatgattttgatttttgttttaaaggttttatatgtttcgaagtgaagttttttgaaagttattttttgtgtttgagttttggttttgtagaaagggatgttgaaaaagagaagagtaaatagggttttgtaggttagattttatgtttaggtttatgagttgagtttatttttttatttttttagttaaaagcgtagggtggtgatgtttttagattttaaaattttgtagggaatgttttagaattttttgttttatgagaatttatttattttttatagttattttagtttttaattttttattgtttaggttttaattattgatattattttttatttttttttttttttttgatagggttttattttgtcgttttaggttagagtattgtggtgtgattatagttttttatagttttgattttttgggtttaagtgatttttttgttttagttttttaagtagttaggattataggtatggattattatgtttagtttatttaaaattattttgtaggattgggtgtagtggtttatgtttataattttagtattttgggaggttaagattagtagattatttgagattaggagattaagattagtttggttaatattgggaaattttatttttattaaatatataaaaattagttggttgtggtggtttatttttgtaattttagttatttgggaggttgaggtaggagaatcgtttgaatttaggaggcggtagagttgagatcgcgttattgtattttagtttgggcgatagagtgagattttattttaaaataaaaatttttttgtagagatagggtgttattgtgttgtttaggatggtttttaattcgtggttttaatttttgattttaagtgattttgtttttttggttttttaaagtgttaggtaagattataggtatgtttggtttttgattttttttttttttttttattttatagttaat

SEQ ID NO: 2164 - DNA, 2500 bp, Artificial Sequence
  chemically treated genomic DNA (Homo sapiens)
attgattatggaataagagagagaaagaggaattaagggttaggtatgtttgtaattttatttagtattttgagaagttaaggaagtaggattatttgaggttaggagttgaggttacgagttaaagattattttggataatatagtgatattttgtttttataaaagaatttttattttgagatggagttttattttgtcgtttaggttggagtgtagtggcgcgattttaattttgtcgttttttgggtttaagcgatttttttgttttagttttttaagtagttgggattataggggtgagttattatagttagttaatttttgtatgtttagtagagatggggttttttaatgttggttagattggttttgattttttgattttaggtgatttgttgattttggttttttaaagtgttggggttataggtatgagttattgtatttagttttataaaataattttaaatgaattgggtatggtggtttatgtttgtaattttagttatttgggaggttgaggtaggaggattatttgagtttaggagattaaagttgtggagaattgtgattatattatagtattttagtttagggcgatagagtaagattttgttaaaaaaagaaagaggaatgaaggataatgttaatgattggggtttgagtaatagaaggttagaaattgagataattataaaaaataaatgaatttttataaaatagagagttttggaatattttttgtagagttttggagtttgaaggtattattattttacgtttttggttgaagaaataaaagaatgaatttagtttatgagtttgggtatgaagtttggtttgtaaaattttgtttgttttttttttttttaatatttttttttgtaaaattagagtttaggtatagaggatgatttttaaagaattttatttcgggatatataaaatttttgaaataaaggttaaggttattggttatagtttttttttttagggtgggttttgggtgaatgaagaattttttaggtttagatgttggtatagagtttgagaattgattttttaaatgtaaaaatattaggtttagaagtattttgaggttggttgttatacgtagttggtaagtattttttgaaatcggtagatgaatagagtatttattgatataaatattattatcgtagtagttgggcgttttatgaaaataaataatgatataggatgagtattagaaaagtcgtttttagtatttggaggggcggttttttgaagcggcgttagtatttgtttgtttgcgtgtttatgttaaggtagtttttaagttagtttagtttggtaatatggataggtttgttttaggatttgagtattgttaggttatttttgagaggatcgatgttattttttgtggtttgtttgggaattataagagcgtacgttggggattgggtagggttatttgtaagttgtagtaaaataagaagagggtgtaagtttttatagggttttattttttttgtattgttggttaaatttgtttttgtttagaattttatattattttatttagttagttttaaatttttttttatttttgtagtggttgttgtttaaaggtaattatgattaatgagggtttaaaataaaggtatttaaatttttgtatttaattttatagatttttttaattttttaggattttaaatgtttgtggttagatttgcggggtaaaattttagaattacgttagttagtaaagtatgttgttattttttagatttagtagaaagaatatttttaattatatttaatagtattgataagattttttttttttttgtggtttttacggattattagaaagatattagaaagaagttttttttgtagttatgttatatttattatattgtttagagagtttaggagattttgtatgttagttaaagggtggggttgtgtggtagttagaatcgtggttttattagagatgtttatattttaatttttgagatttatgaatgtgttatggtatttggtgtatggagtatataaggatgttttttttttttaaaataaataagagtttataatttatataaaagttgagttgttttgttttggggtttttattgtggaaagtttgagagattagggatgtaaagttttttggaaaggtgagggtgtttgagtgtaaggataatgggggttgtgatggatttttatggaagtgagagaggtaagttttttatttttttaggagaaaagtagggtgttattttagagatgttttttgttgttattgtgtttttagggtaaatagtaatttttaatatttttatttttagtttgggtttgtgaaaatatagtttaatatattagtaaaatatgtaaaatatttaatttgtattttagttagttttaggtttgattttgtaaggggttgtgtttttgtttttgtttttattagaatggtaggggtaatagtaaaaaagaa

SEQ ID NO: 2165 - DNA, 2477 bp, Artificial Sequence
  chemically treated genomic DNA (Homo sapiens)
atggagttttttttttagtttttattcgaggattgataaagagaagttaggagagaaggaagttgatttagaagttgttgagaaggagggtattcgagaatagagaggttttgggagttagatttaggtaagagtttatggatttataaagggatatatatatatataatggaacgttgtttagtaagaaatgaataagttgtagatatagatatatataataatatgagtaaattttaaaaaaatttatgtaaaagaaaaataaaagaatgtatgatgattttatttatgtgaaaagtttaagaataagaaaaattgttttatggtgataaaagttagaagtatagtgatttgaggggtaggtattgatcgggatagagtttgagggaagtttttgggatgttagaatgttttttatatattgatttgggtaattaaataatagaaattaaaatagtgttattataagggagatgattgtttgaaagaaggtataagaaaaatttgggaggttataattatttttgtattttaattggggttatgtaaaatttattaaattgtgaattttaaatagaagtatttttatgtatataagtgatattttaaaagttaaaaaaaataaaaatatggatatgtgatttattggatgaagagaatgttattaattatttgaaagggaattttagaaaattgggagaaaatgagtttttatttttatattatttttttttattagtattattagatgtttgaatttttaatagttttttaaataagaggttgtttaggtatatattagttttttatttatgaggttttttatttttaatataattaatgtttttttaatagattttatattattatttgtgtaaagttaggagtaagtgtttaatatttgatagtattttttgtttataaagtttgtaattaaattaaggaggaggaagttttgtttttatggagttgagggttgagttgggagatgatattagtgttttttagttaggtattaaagcgttgcgaggataaggatgttaggagttatttatgagatttgggtagtagcggttttgagtttttaaggtttttttttaatatgtagatggtgaagtgatttttttttgtaattttgttatatttttaggtattaatttttagaataattttgttttttttttttttgttgtgagtatttgtaatagtttgattttttagaaatttttatagagagtaaaagtgttttaaatagttggagatggagttgtgcgtatgtattgtttgttttagatagaaattaaacgttttgagaaaaattaaacgttattaagacgtgaagtgagttttgatatgattaaggtgagtgtaatttagtttttaatattttatattatacgttttattttatttgattatttttttaattgtattttttatttattgattttttaggtttgtgggaatgtttttatttatttaattttagttattaatataaatatatttatatatagatagaaatacggttgtgttatttttatttttagatttttgtttgtgttattttttttaattagaatggttttttttttatttgttttttttgttttgttttgttttgttttgagatagagttttattttgttatttaggttggagtgtagtggtgtaatttcggtttattgaaatttttaatttttgggtttaagcgatttttttgttttagttttttaagtagttgggattataggtatttgttattacgtttagttaatttttgtatttttagtagagacgtggtttttttatgtttgttaggtaggttttaaattttttattttaggtgatttattttttttagttttttaaagggttgggattataggtttgagttattatgtttagtttttaattatttttaattaaattatgtttatttttttttttaaaattgttttatgacgatttattttcgtgtagtatagggttaggtatagagtagatgtttaatgttgattaaattttttacgatttatgcgtaatattgtttttatataataatggattgaggattaaaaaggattattttggggttagggtttaagttttttttgattttggtttattattagttagatgtgtgattttatttaatttttatggtttttaaatttattttattttgataatgaaagatttaagttataaaagtttttaaattttttttattaagggttatagggattttatgtgtattgaatgattattttaatagtgagtaatcggtagtagtttagtttttttatttttttttggtttgggtttatagtttttggatataatttaagtagatatagtattaaattttttagtaggtgttaattagaattagtttttgttggttgggaacggtgatttatttttgtaattttagtatattgggaggttaaggtaggaggattatttgaggttag

SEQ ID NO: 2166 - DNA, 2477 bp, Artificial Sequence
  chemically treated genomic DNA (Homo sapiens)
ttgattttaagtgatttttttgttttggttttttaatgtgttgggattataggaatgagttatcgtttttagttaataaagattaattttgattggtatttattggaggatttgatgttatatttatttaggttgtgtttaaggattgtgagtttaagttagggaagaatgagaaggttgggttattgtcgattgtttattgttagggtagttatttagtatatatagaatttttgtggtttttggtagagaaaatttagggatttttatgatttgaattttttattgttaaggtaaaataaatttgaggattatgaagattgagtagagttatatatttggttagtggtaagttaaggttaaggaaagtttgaattttggttttaaggtagttttttttgatttttagtttattattgtatgaaaatagtgttgcgtataaatcgtagaaagtttaattagtattgaatatttattttgtgtttagttttgtgttatacgaaagtaagtcgttatgaagtagttttgaaaagaaaaataggtatggtttagttaaaagtaattgaaggttgggtatggtggtttaagtttgtaattttagttttttgggaggttgaggagggtggattatttgagataaggagtttgagatttgtttggtaaatatggagaaattacgtttttattaaaagtataaaaattagttggacgtggtgataggtgtttgtaattttagttatttgggagattgaggtaggaaaatcgtttgaatttaagagttggaggttttagtgagtcgagattgtattattgtattttagtttgggtgatagggtgagattttgttttaaaataaaataaaataaaataaaaaaaataagtaaaaggaaagttattttagttgggaaaaatggtatagataaaagtttggaaatgagaatggtataatcgtgtttttgtttgtgtatgaatgtgtttgtgttggtggttagggttgggtgggtggaggtatttttatagatttggagggttagtgaatagaaaatgtagttaaaagggtgattaggtggggtgagacgtgtggtgtaaagtgttggaggttaggttatatttattttaattatattaaggtttattttacgttttagtaacgtttggttttttttaaaacgtttgatttttatttagagtagatagtatatgcgtatagttttatttttagttatttgaaatatttttattttttgtaggaatttttagggagttaaattgttataagtgtttatagtagggaaaagaaagatagaattgttttggagattgatgtttgaggatgtggtagaattataggaaggggttattttattatttatatgttgaaggagagttttggaagtttagggtcgttgttgtttaggttttatggatggtttttggtatttttgttttcgtagcgttttgatgtttggttggaaggtattgatgttattttttagtttagtttttagttttatgaaggtaagatttttttttttttaatttagttgtaaattttgtgagtagagggtgttgttagatgttaaatatttatttttggttttgtatagatgatggtgtggagtttgttaagagggtattggttgtgttagaagtgaaaagttttatggataagaaattggtgtgtgtttgaataattttttgtttgaaaaattgttaggaatttaagtatttgatggtgttgataagagggaatggtataggagtaaaggtttatttttttttaattttttgaggtttttttttaggtaattagtggtattttttttatttagtgagttatatatttatatttttgttttttttaatttttaaggtattatttatatgtataaaaatatttttgtttaaagtttatagtttaatgagttttatataattttagttaagatatagaaatggttataattttttaaattttttttatgtttttttttaggtagttattttttttatagtaatattattttgatttttgttatttaattatttaaattaatatatagagaatattttaatattttagaaattttttttaggttttgtttcggttagtatttgttttttaggttattatgtttttggtttttattattatagagtagttttttttgtttttgaattttttatataagtggggttattatgtatttttttattttttttttgtatgaatttttttgagatttatttatgttgttgtgtgtgtttgtgtttgtagtttgtttattttttgttgagtagcgttttattgtgtatatgtgtatttttttatggatttataagtttttatttaggtttggtttttagggtttttttattttcgaatgtttttttttttaatagtttttgagttagttttttttttttttgatttttttttgttaattttcgagtgaaggttggaaggggagttttat

SEQ ID NO: 2167 - DNA, 2439 bp, Artificial Sequence
  chemically treated genomic DNA (Homo sapiens)
ttttaaatagagatatgtttggtagagttaagaaggaatgtttatttttgtttggggaagttgtagaagtttttatagagaggatgatatttaatatgagttttgaaggatgattgcgagaagaaggtgaaggggtaggtatagaataaagaaaattatagaggtaaaagtattaaatgatgaaagatcgtgttgttttatgtttagaggtttggtaagttttttgttgtaagttttttgttgtaaagttgattagaatttaggtttttttttattgaaagttcgatgtttgggggtttaatagttgaaatatttgttttagggtttagaatttaaacgtggtggtaaagtattatttttgaaaagaaggaaaaatgtattgatttttaaaatttaaggtgaaaagggaatgtagatgtttatattttaatatattataaaagatttttggatatttattttttggtttatattttttttgtttttgtattgtagatatattttagtatatataggttgtatagaagataaagtattagttttaggatgaataaatgggaatattgatatttcgagaggtttttttagtatggaaatataatgatgtaattttatgtggaaataaaggtgttttatttttatttttatttattttaatacgttggtatatgtttgtttttaagtaattttttttttagatatggggtttaattatttgttttgtagatgacgtgtatattttgatatttgtatggaaataaggtaatttagttttagaaagttaggagggtggttaagattatagcgggaggatggagtaaatttttgggtttatgtttttttagacgaggggggtttatttttttttgaaatacgggtttatttatataagtaaatagattagaatatattataggaaggaatttttacggtatgcgttgttttttgttttgttttgtgaagataaaaggaggaagaaataaaagatttagagagtagagttggtatgaattatgaagttgttttatattaattatttttatcgtttttattttttgttgtttttttcgatataggttttgggttttttgttgggaaaaggtaggtcgaattggagttggttggggagtttattagtatttcgttagagtcgagggttgtttgttttttaggaggtattttgaattttttttttagttatttttttgtaattaatatgttgtttttgtagttgttttatttattgtttttgtagttatcggaggttataggtttttaagaagaattgttggggtttattaatatatatatttttattttataggaagtagtattttatggtttgtatattggttttttgggtttataatatagtagggtttagatttggggagaagtaggtacgagggatgtattgggagtagggaggaaggttttggttaggtgttttggtaatgtgggtaggaaaaggttttggtggtaatgggtgttgtatgaggaggttttatggttagtttaggtaaaggtttaggagttttaattgggaagtagattttgaagttatgttttttaatttagatttaggggttttgaaacgttgtgtttgagatgttttttttttattgatttttgtaatgtttgagttagtttgtagttgttatgtatatggttattagggattaggagaatttgagttttatatgtggtttggttggttttatttttttgggaggttattattatagttgagttataagattttgggattgggatttttatagatttttgggatagtaggttttggggagtgatattgattttaattttgtaggtgtagttttttagaagttagtttttttttgtaaaataaaggtatataaaggattatttttagtttttttaattattagtaggaatttaagagagagtttttttagttttgagagtttttaatagtattattttttttatttaaatttaataaagtaatgttgttttttaaggtttattgattataatttaatggagagttgaggttgttagatattaagatttagtattatagaagggtagagtatggtaggattttaggggaaaagaattagtataattttatataaaatggagtaataatatatttattttagaaaatttgttatgagaattatttagattatttttttaaagtattgtattatttagtttttttttagtgataaataatttcgaattttgatgtacgtagatatttgttttttgtttttagttagttttaggttgtgtttgaatttattttttatgttttttattttaggaattagtttgaaggagttgttgttgttaggggtaggtttttttagtgacggatggtagtaggtaatagagtaagtagggatatatgatattttttgaaattttttttgggaattggtatattat

SEQ ID NO: 2168 - DNA, 2439 bp, Artificial Sequence
  chemically treated genomic DNA (Homo sapiens)
atggtgtgttagtttttaggagagattttaggaggtattatgtgtttttgtttgttttgttgtttgttgttattcgttattggaagaatttgtttttggtagtaatagtttttttagattagtttttggaatgagaggtatagggaatagatttaaatatagtttggagttaattgagaataagaaataagtatttgcgtatattaagattcggggttgtttgttattaagaaaaagttaagtaatatagtgttttaaagagatgatttaggtaatttttatagtagattttttgaggtaggtgtattattattttattttgtatgaggttgtgttaattttttttttttgggattttgttatgttttgtttttttataatgttaagttttggtatttggtagttttagttttttattaggttgtggttagtgggttttgaagaatagtattgttttattggatttggataagaaggatgatgttattggagatttttagggttagagggatttttttttgggtttttgttggtgattggaagggttaagagtggttttttatatgtttttattttatagagaggaattggtttttggaaggttatatttgtagggttggagttaatgttattttttagaatttattgttttagaggtttatgaggattttagttttaggattttgtggtttagttgtagtgatgattttttagagggatggggttaattaggttatatgtagaatttaaatttttttggtttttagtggttatatgtatgatagttataagttggtttaggtattataggaattagtaagggaaaagtattttagatatagcgttttagggtttttaggtttgaattgggagatatggttttagggtttgttttttagttgagatttttgggtttttgtttgagttgattataggatttttttatgtaatatttattgttattaaggtttttttttgtttatattgttagagtatttggttaaggtttttttttttatttttagtatatttttcgtgtttgtttttttttagatttggattttgttgtgttatgagtttagaggattaatgtgtaaattatggaatgttgttttttgtgaagtgaagatgtgtatgttgataaattttaatagttttttttagaagtttgtagttttcgatggttgtaagggtagtggatggagtaattgtaaaagtagtatattgattgtaaggaagtaattgaagggagagtttaaaatgttttttggaaggtaggtagttttcggttttggcgaggtgttaatgagttttttagttagttttagttcgatttgtttttttttagtaaaagatttagggtttatgtcgagaagggtagtaggaagtgggggcgatggagatgattaatgtagagtagttttatggtttatattagttttgttttttaagttttttgtttttttttttttttatttttataaggtaaagtaaagagtagcgtatgtcgtgggaatttttttttgtaatgtgttttgatttgtttgtttgtataaatgagttcgtgttttagaagagagtgaatttttttcgtttaaagggatataaatttaaggatttgttttattttttcgttgtgattttggttatttttttggttttttaagattgagttattttgtttttatgtagatgttagaatgtatacgttatttgtagggtaggtggttaaattttatgtttagagagggagttgtttgaaagtaagtatgtgttagcgtattgaagtaagtgagggtggaagtaaagtatttttatttttatatgaggttgtattattgtgtttttatgttgagaaggtttttcgagatattagtgtttttatttatttattttaaaattggtattttgttttttatataatttgtgtatgttaaagtatgtttgtaatataaaaataaggaagatgtaggttaggagataagtatttagggattttttgtagtgtattaaaatatgaatatttgtattttttttttattttgaattttaaaaattagtatatttttttttttttttagagataatattttattattacgtttaagttttgggttttgaggtaaatattttagttgttgagtttttaagtatcggatttttaatgaaaggaaatttgagttttaattaattttgtagtaagaaatttgtaataagaaatttgttaaatttttaagtatgaaatagtacgattttttattatttgatgtttttatttttgtggttttttttgttttatgtttgtttttttatttttttttcgtagttattttttaaagtttatgttagatgttattttttttgtgaagatttttatagtttttttaagtagaaatgaatatttttttttggttttgttaaatatatttttatttaaaa

SEQ ID NO: 2169 - DNA, 2500 bp, Artificial Sequence
  chemically treated genomic DNA (Homo sapiens)
atttttttttaaaatttattttggaagaagagatgttttaggaaatataaatagattattgttttgtaattttaggaaaattaaagagaatttaagttttacgaaataagtaattaaagggtgagaaaatatgatagttgtttaagatcgggagtgtattagtttttcgataatatttttaggtttttttagggttgttttttgggtaattttttaggtattgtttttttattaatattagattcgttgtagtttttgaatatgtgacggtatagtatgtaaaaatgtatatattattagggttggaggatttttatttagttatcgttaatgataggataataaaaattaagtttacgtatttattaagtggtaaagttatagtttagattttaatttgattttatatgtataaagaggaaagaagagggatgaagataggatgttgggagggaaaaaggaggagaaaaaagggagagaaaatggaagatggaagtaatagttggggtgtagtaaaaaggggtattggattagttagaaaatttattatgaattaaatttgagtatatgtttttaatttttggggttatatgtttaataaatagaattgttgggttatatagttatttgatgtttaaattttgagaaattgttaattgttttttatattagttgtattatttggtatttttatcggtaatgtataaggttttaattttttagttttagtatttattatgttgtatgattttgaaaaagttattttatttatttgaattttattttttttttttttaaagagtaggggttagaattagttattttgtttttgtttatttatatattttttttttttatttaaattttgattttttattgtttatatttgtttttaagagttttttgatagtgtgaagtattgtaatgagtaagttttagttttgttttttagagttagaattattttaatttatatttttaagttatattaatgtatttttatttttatttatattttttagcgtatatttttttttttttgtttatttttttaatttttttgtaagtattattttgttttgtttgtcggttgttagttttttttttcgagtttttgcggagttgttagatttttgattatttttttatttttagtttataattgtttttttttggagtttagcgattgttaagtggtttttgtgaaattttattaggataatttttttgtttgtgtttttttttagttgggttgtttttagaaattttagttgtttttttatttataatcggtaaattataggttggtttttgagttatttaatatcgtatttatttataaatatgtttagatgagttttgaatttgtcgaattttgtagtttataagtaagagttaaatttattggagatttaatttatatgtttttttttgtagaaggtgttttttgtttatgcgggatttttattttttttataattttaggaatgatatttgttttttttttattttttttgtttttgtttatgtttattatttattttttttattagattgtgagatttatgagagtaaggagttggagtattttgtttaaagttgtatttttagtgtttggtatattataggtttttagtatatgtttgttgaatttatgaatacgtgttttttttttatagagttaattatggatttgtttatttgtttatttattagatttaaagttattttggggtagattgagatttatttgttatggtaatatttgttaaaaataaaattattttgatatttgttaaaatggtaaggaagatattatttaagattattgtaatggaggagagaaattaggtaaatataataaagatagttggggatttagagttaaggaatagagtgagtggatgaaaaattattaagaggagataagggtagggagatttttgttaaaataatttattagggtttttatcgaaggtaggttaggatgattagatagtgttattattcgaatgtttgtggaggttaaaattcgtatgttgaaacgttaatcgttaaggtgatggtattaagcgatgaggattttggggagatgaattaggttatgaaggaatgggattagtgtttttataaaagggattttagagagttgttttgttttttttattatatgaggatataattagaaggtgttattttttaatgaagagagattttacgagatatggaattttttagtattttgatttttaattttttagtttttataattgtgagtaataaatttttgttgttaagaattagtttatggtatttttttatagaagtttaattggattgatagatgttaaggggttgggggatttttagtaggttaatttagtagagtttttgttaaaattgggttagataggttatagataagatagttaaaattaaagtttagttgagaagggaatttagaggagtatgattaaaatttggttaaggggagagtttt

SEQ ID NO: 2170 - DNA, 2500 bp, Artificial Sequence
  chemically treated genomic DNA (Homo sapiens)
aagattttttttttgattaaattttagttatgtttttttgaattttttttttaattaggttttgattttggttattttgtttgtggtttgtttagtttagttttagtaagaattttgttaggttagtttattgaggattttttaattttttgatatttgttagtttagttgggtttttataaaaaagtattataaattaatttttagtaatagaaatttattgtttatagttgtagaggttgggaagttgaagattaaggtgttagaagattttatatttcgtgagatttttttttattaaaaaatgatattttttagttgtgtttttatgtgatggaagaggtaaggtagttttttggggttttttttataaggatattaattttatttttttatgatttaatttatttttttaaagtttttatcgtttaatattattattttggcggttagcgttttaatatacgagttttggtttttataaatattcggatgatagtattatttgattattttggtttgttttcggtaagaattttggtaagttgttttagtaagaatttttttatttttgtttttttttggtaattttttatttatttattttgttttttggttttaaatttttagttgtttttgttatatttgtttaattttttttttttattgtaataattttgaataatgttttttttattattttaataagtgttagagtaattttatttttaataagtgttattatggtaggtaaattttagtttgttttaaagtagttttgggtttaataggtagataggtaggtagatttatgattgattttatggaagaggaatacgtatttatgaatttaataaatatgtattgagggtttgtaatatgttaggtattgaggatatagttttggataagatattttagttttttgtttttatgaattttatagtttgatgagagagatagatgataaatataaatagaaatagaaaaagtaaaaagggggtaggtgttatttttgggattgtagagggaataggggtttcgtataaataggagatattttttgtaggagaagatatatgagttgaatttttagtgaatttaatttttgtttgtgggttataagattcgataggtttagagtttatttaagtatgtttgtgaataagtacgatgttggatgatttaggagttagtttatgatttgtcgattgtgagtaggaagatagttgaggtttttagaggtagtttagttgagaggagatatagatagggagattattttaataggattttataaagattatttagtagtcgttgagttttagggaaaaatagttatgagttgagggtggggaaatagttaagaatttggtaatttcgtagaagttcggagagaaaagttgatagtcgatagatagaataagatgatgtttgtaaaaaggttaaaagaatagataagagagaaaaaatgtacgttgagagatatggatggaaatggaagtgtattaatataatttggggatatggattaagataattttagttttaaggagtagagttaggatttatttattatagtattttatattgttaggaaatttttggaaatagatgtgggtagtggaaggttaggatttggatggaaagaaagaatgtgtgaataggtagaaataggatagttagttttaatttttattttttagagaaaaagaaagtgaggtttagataaataaaatgatttttttagagttatgtaatatagtgagtgttagagttaagagattagaattttgtatattgtcgatgggaatgttaaatggtgtagttaatgtggaaaatagttggtaattttttaaaatttaaatattaagtgattatgtgatttaataattttgtttgttgggtatgtagttttagaaattgaaggtatgtatttagatttgatttatggtaggttttttggttagtttagtgtttttttttattgtattttagttgttgtttttattttttattttttttttttttttttttttttttttttttttttaatattttatttttatttttttttttttttttttatatatgtagggttaggttggggtttaagttatagttttgttatttaataaatacgtgaatttggtttttattgttttgttattgacgatgattagatgagggttttttagttttaatagtatatgtatttttatatattgtgtcgttatatgtttaggaattgtagcggatttagtattgatgagaggatagtatttgggaggttgtttagaagataattttgggggaatttgggggtgttgtcgagaagttgatatattttcggttttgaataattgttatgtttttttattttttaattgtttgtttcgtagagtttaaattttttttaatttttttgggattataaagtagtgatttatttatgttttttggagtatttttttttttagggtgagttttaaaaaaaaat

SEQ ID NO: 2171 - DNA, 2473 bp, Artificial Sequence
  chemically treated genomic DNA (Homo sapiens)
tttaaattaaaggttgatacgtttttgttttatattttatttaatgttggtaatttaatgagggatattaggataaaatcgagaatgcgcggtttgtgtttgtgaatttttattatttggttttagttagttttttattttttatatttgttaagataaatttttttaaatttttttttttttggttagaagtgatttttatatttagtttcgattatggaaggttgttataggttattttttttgttgggtaagttttttttttttttaagtttatgtttaattgttatattttttttgaggattttttttagtttttttttttatttttattgttatatttaatagagcggagttgttttttttggtattttattgtcgatagtttatttttgagttatagtaataacggttatttgattttatttatttgttgatttgtttatttttttattagtttatgattttttttagggtaagatttatttttatttgatttatttttgtattttagattttagttaggtaaataatagggatttagtggagagagagatggataggtgggtaggtgaagatatagatgtacggttgaatatataaattggtaaagttttaaatgaattaataagtggatattttattgagagatttaaatgtagaagggtgttaggatataagaggaacggttgcgagttatgaaaatgggttttatggggtaaattaaaagtttattgaaggtaaatgtattataataagattggtattttttggagttttcgggttgattaattatttttatatgtattatttatttattttttataatgatttggtgaggtaatgagttattattagtttaatgtataaggaagttgaggtttgtggatattagttgaagttttatagttagcgaatggtaggttagggtattagggtttaggtttgtttgttttttttatttattttttgttattataagttttttgatttttagttttttgatttgttttagtgggatttttttgcgtttttgttttagttgtagaggatttattaggtatttagagagaaatgagtggtgttgtgaatattcgattgtgtttatgtggaatttatatatatagtttgtttgaaaatgattgataggatggaaattgataagttattattcgtttcgggtattagcgatgattggttaatatgaatattgtgttgattttcgttagatagaagaagatgttatttgtcgttaatggggtgttatacgtatatttgtttaaaggaaaatgtttttttggtgattgtttttaatttttattttattttatagttataaaaaagaaaagatttagtagaaaggatgaatttatttaggggtaggatggaaaggtattttttttatttatttttttttttttttattagaataattaaaatttagtgaaaatgttggtgtaagttagaagagggggatttgggttttaagagtagttaggtattttgggttttagattagagttttagaatttagtagttatgtttataaggtagttaaagtttagttagtattatcggtttttcggttagttatatttgtttttgtttaataatgatgatttgaacgtatatgtataaataataatagataatattattgagtattttattatgaattatggaatgtgttaggtaaagacgttattttacgtaagttataaaattaatttatggggtaggtgtagatttataaattttgatttaagaattttgaatttttaaaagttttgaaaattaaaatattttttcgtaagtttggtatagatttatttggtgttaagatttgagttaaagtgatatatattgattaatagttttttttattttttttttattattaatatttatattttttgttataaaaatattaatatgtttgatttaagggtgttattatagtttttgttgagggatgttattaataaatatggtatatttattatattgtttttttttaaaagttaaataaatttaaattcgagtatatttggttttaaggattgtagataagaaattgagaatttgttaaatttattatatggatgaggaaataggtttagaaaaggtaggaaatttttttgaggttatagagtttaaaagtagtagatgaaggtttatatttaggtagttttgttttagagttggttcggttaattagtgggttttgttatttttgataaatgtttttgttagttggttttagttttatttttttagcgtagtagtttagtttttgtttgtttttgagtaagaagtaagtatgtgtttttttagtcgaggtataaggtaatttttagggtattcggattataattataatgttttattaatataaattttaggatatagatttgtgttttaaattaagagttaaatataataataatattagttttaggtaattattagttaa

SEQ ID NO: 2172 - DNA, 2473 bp, Artificial Sequence
  chemically treated genomic DNA (Homo sapiens)
ttgattggtagttatttaagattgatgttattgttgtgtttgatttttgatttgaaatataggtttatattttgagatttatattaataaagtattgtaattatgattcggatattttggggattgttttgtatttcgattaagaaggtatatgtttattttttgtttaagaataaatagggattgaattgttgcgttgggaggatggggttgagattagttagtaggggtatttgttaaaggtagtaaagtttattgattaatcgggttagttttggagtaaggttgtttagatgtaaatttttatttgttgtttttgagttttgtaattttaggaaagttttttattttttttgagtttgtttttttatttatataatgggtttaataggtttttaattttttgtttgtagtttttggggttaaatgtgttcggatttagatttatttaatttttaaaggaaagtaatatagtaaatgtattatatttattaataatattttttagtagaggttgtggtagtatttttaaattaagtatgttgatatttttgtagtaaaaagtatgaatattaatagtaagaaggagatagaaaaaattattagttaatgtatattattttaatttaaattttagtattaaataagtttgtattaaatttacgaaaaaatgttttggtttttaaagtttttgaggatttagaatttttaaattagggtttgtggatttgtatttgttttataggttgattttatggtttacgtggagtaacgtttttatttagtatattttatagtttatagtaaagtgtttagtaatgttatttgttattatttgtatatgtacgtttaaattattattgttgagtagaggtaagtatagttggtcgagagatcggtggtattggttggattttggttattttgtgggtataattgttggattttgaggttttgatttgaagtttagagtatttggttgtttttagaatttaggttttttttttttgatttgtattagtatttttattgggttttggttgttttggtaaagaaagaaggaaataaatgagaagaatgtttttttattttatttttaggtggatttattttttttgttgaatttttttttttttatggttataaaatgaggtgaaaattgagaataattattaaaagagtatttttttttaggtaagtgtacgtgtgatattttattaacgataagtgatatttttttttatttagcggaaattaatataatatttatgttaattagttatcgttggtgttcgaagcggatgatgatttgttagtttttattttattagttatttttaggtaaattgtgtgtgtggattttatatggatatagtcgaatgtttataatattatttatttttttttaagtgtttgatgggttttttataattagagtagagacgtaggagggttttattggggtagattagagggttggagattagaaggtttgtgatgatagaaggtggatggaagaggtaggtagatttaggttttggtgttttggtttgttattcgttggttgtgagattttagttgatgtttataagttttagtttttttgtgtattgagttaatagtaatttattattttattaggttattgtgaggagtaaatgaatgatgtatatgaaagtgattgattagttcggaaattttaggaaatgttagttttgttatgatgtatttgtttttagtggatttttgatttgttttatggagtttatttttataattcgtagtcgttttttttatgttttggtatttttttgtatttaagttttttagtgaggtgtttatttattagtttatttggaattttgttagtttgtgtgtttaatcgtatatttgtgtttttatttatttatttatttatttttttttttattggatttttgttgtttgtttggttaagatttgggatataaagatgaattagataaggatgaattttgttttaaaggagattataggttaatggagaaatggataggttaatagatgagtggagttaggtggtcgttgttgttgtaatttaggagtgggttatcgataatgggatgttagaggagataatttcgttttgttaagtgtggtagtagaggtggagggaagagttaaaggaagtttttaaaaaggatatgatagttgaatatagatttgaaagggggaagggtttatttagtaaaaggaatagtttgtgatagttttttataatcggggttgaatgtggaggttatttttggttaggggagaggggatttgggggaatttgttttggtagatataagggatgggaggttagttggggttaggtggtaggaatttataagtatagatcgcgtattttcgattttattttgatgttttttattgggttgttagtattgagtgaagtgtagggtaagaacgtattagtttttggtttgag

SEQ ID NO: 2173 - DNA, 2408 bp, Artificial Sequence
  chemically treated genomic DNA (Homo sapiens)
gttgatttatataggatagggagtgggtttttggttttggttttgtttagtttaggatattttttttagttgagttagtttgggtcgggatagatagggttgttttacgtatattttaagatagttttaggttagggcgttgtttagatttgatgatttaggagtgtatttttggatttagttttgttttttaaatattttttatagatttattttgttgttagtattatgtagatatcgagaggtataatttttatttttatagattatttattttagtatttataattattatttagttattattttgtggagatatagttgattaggatagagttttaggtttatttttattaaatcgtttgttaaaagaaagtgttaaaggtttcgggtagttttatagtatattagttattttgtttttattttgtagttttatcgagtgggaataatgtatttttaagagtataggaaatatttggatgtttattattttttttttagtttttgggtttaggtttttgtttgtttagagaatagtagttttgagtaaagtttattattttattaattaatttaaatattaaagtgtttagtatttgttaggagagttggggttttttattaagtttaatatattatgtttttttcgttgaaagatatttttattttttttagacgttataattgtaggagttgggggtttgtttagaattatagaatgttaggatttaaggagtttttgttttttcgttttatataatttgaatttgagttcggaatagggtagggatttgtttaaggttatatagagcgttcgttatataatttaggatagaaagaggttaggtttttgtttcggatattttaggtagttttttatttagttgagattgttattgataaaggagggtgtttgagaaggaatatttgtttttaagataaggttattattattgtaggagaggtttaggaaagttgttttagagttatttttgtattttttttattgggtttttggggagaggtaggtggaatttgatttttatgtatttttttttatttttatagagggagaatgttggattttcggaagggagcggggttaggttataaggaaggtagtggttaggaattattttttttcggggagtggggagaatgttgaacgtttggtattcgtgggggtggaaagttagagaggttaagtgttgtttagagatgattttatgattcgggaattaggagttgtcgggttgttggtgttggaatttaagttttcgtatatagttcgtgtttgtggttttggtttggtagagtaggaggaaggttttttatggttgtttaagtgtttatatttaagggtagggtttttgtgtttttatttttattttttgtggtaaattttttaagaatttaagtgataggttttaattaagtatatagtttgtttaggtttttttaatagtttttttttgtagagatggaaataagggtttagaaaagtaaagttatttgtttaaggttatataagtaggaagtagttatattgggttagaatttaggttttattgatttggatatttaattataaatatataaatatacgtatgaatatatatgtatacggggttattagtttgttttaggttttaagggagttttgttaagtaggggggttaatttagtcgggagaaagaaagaatggtatattttggttagttgttgattaggttaaagtttttaataggggttgtagttttattaggagatttgttttaggttgagagatttttttttattttttattgtttttaggagttatggaaggttgtttatgtatttagttttttttttagtatgtgaaagtgttaagaggtattttaaaataatttatgggattagtatgtttattggttgttaggaattattttcgttttatattagagaaatgaaggttatgagcgaaagtggggcgtgaagattttgtagttaagttagtagtaaaattaaggttgaaattaagatttatttttagtttagttttttttgtgggtatttgtttatttttaattttttatttttatatttagtttttaaaaaagaaattagtttagtttgaagttatttcggggtttcgcggtacggtttggattcgattttattttaaagttttgaaaagatggagtttttaaaggttgtatttagatgagtttaggattttttttttatagtaagttaaggggttgggaagaaattttttttagtttttagtggtgataggaggatatagggaattaaatttttttttgagttttggaagttttttttttgttttgttttggttttttttttatttatgatttttgataagagggaaggtaattttaaagtggataagagttatt

SEQ ID NO: 2174 - DNA, 2408 bp, Artificial Sequence
  chemically treated genomic DNA (Homo sapiens)
aatggtttttatttattttggagttgtttttttttttgttagaggttatgggtggagaagggattaaaatagggtagagagggggtttttagagtttaaggagagatttaattttttgtgtttttttattattattgggagttggaagaagtttttttttagttttttgatttgttgtaggagggaaattttgggtttatttaaatgtagtttttgaagattttatttttttagagttttgaaataggatcgaatttaggtcgtgtcgcggagtttcggggtgattttagattagattagttttttttttggaaattgagtataaaaatgaagggttaaggatgaataggtgtttataaagagggttgaattgggaataaattttggttttagttttggttttgttgttgatttggttgtaagatttttacgttttattttcgtttatagtttttatttttttaatgtaaaacggaggtaatttttaatagttagtgggtatgttaattttatgggttgttttgaaatattttttagtatttttatatattgaaagagaggttggatgtataaataattttttatggtttttgggggtagtgaggggtgggaaaaggttttttagtttgagataagttttttgatggaattatagtttttgttgaggattttgatttggttaatagttggttaaagtgtattattttttttttttttcggttagattgatttttttatttaatagggtttttttggagtttggggtaggttggtgatttcgtgtatatatgtgtttatgcgtgtgtttatgtgtttgtggttaaatgtttaggttagtgaagtttgggttttggtttagtgtggttattttttgtttgtgtggttttggataagtgattttatttttttgagtttttgtttttatttttgtaaaaagggattattaaaaggatttagataggttgtgtgtttggttaaggtttgttatttgggtttttgggggatttgttataggagatggaggtaggagtatagggattttgtttttaggtataggtatttgggtagttatgaggagttttttttttgttttgttaaattaaagttataggtacgggttatgtgcgggggtttgaattttagtattagtagttcggtagtttttgattttcgagttatgaagttatttttgagtagtatttaatttttttggttttttatttttacgggtgttaagcgtttagtattttttttatttttcgggagagagtgatttttggttattgttttttttgtggtttgatttcgttttttttcgggaatttagtattttttttttgtgggggtggaagagggtgtatgagggttaggttttatttgtttttttttagaagtttagtggggagagtataggagtggttttgaagtagtttttttgggttttttttgtaatgataataattttattttagggatagatgtttttttttagatatttttttttgttaatggtagttttagttgagtgaaggattgtttggggtgttcgaaatagagatttgatttttttttattttgagttatgtagcgaacgttttgtgtgattttgggtaagtttttgttttgtttcgggtttagatttaagttgtgtgaaacgggaggataggagttttttgggttttggtattttgtgattttaagtagatttttagtttttgtagttatggcgtttggagaagatgggaatgttttttagcgggaggggtatggtgtattgaatttaatgaaaaattttaatttttttggtaaatattaggtattttagtgtttgaattaattagtagaataatgaattttgtttagagttgttgttttttgggtaaatagaagtttgagtttagaagttggaggaagggtgatgggtatttaaatgttttttgtgtttttgagggtatattgtttttattcggtggagttataggatgggagtagggtaattgatgtattgtagggttgttcgggatttttgatatttttttttggtaagcggtttggtgggagtggatttgagattttgttttgattagttgtgtttttatagggtagtggttgagtgatgattatgggtattggagtggatggtttgtgagggtagggattgtgtttttcggtgtttgtatggtgttggtagtagagtagatttgtgggagatgtttggaaggtaagattgaatttaggagtatatttttgagttattaggtttgggtagcgttttgatttgaggttgttttagggtgtgcgtgaggtagttttgtttgtttcggtttagattgatttagttgggaaaagtattttggattgggtaagattagaattaggagtttattttttgttttgtgtgaattagt

SEQ ID NO: 2175 - DNA, 2498 bp, Artificial Sequence
  chemically treated genomic DNA (Homo sapiens)
gttgtgtattaaggtagatttataagtgtgagttttgttattttttaattatatgagtttgggagtttattttatttttgaaatttttagtttttttttttgtgattagggttggtagtattttgtagggtgatgaggattaagaggaatgtatttgtgtgtgtaagggatttagtacgtgattaatgaatagtggttgtgattaatttttatttgttttttttttggttagtgggattagtgtttaaaggattagaggtttgggaaaatttgtagaggtagttttgttgttggaaggaagttagtttggggatagggagatggtgttttgtaaattgtaaaggaatataatttataataggttattattttgtttttgagtttagagattttttaataattaattaggtttttttagattgtgaaaaaaagatatagagatagttagagatttgtttaaggttatatagttttgattatttgttttaagtagatagaggtaaagattatttttatttttttcgaaggtgtaaatgatagtgattagaaatatttgaaattttatttggggatttgggtttttagggataaaataaataaataaaaatttagaaggtaaaaagaaattatatattaatttatggtttggtgttttggtgtttgaatggttaaattaggtttgggggtgggggtggagtgagggtttaaatgtcgtttttaaggtcgggttattttgaatataattatttaggagagagttaggtttggtattgtttgtaattagttttttattaagttttagggtagtttatttttatagtaagaattttaggattttagggtgttagttagaaatgggggaagggtttaggagtttttggatgtttttttgttaggagttgatttagtatttttgttattaattttttggatgatcgtggataatttttttttttgagttttagttttttaatttgtaaaagataggttttaaagagataagtttttttttgttttagtttagtaattaagttgggtattgtttcgattatcggtggagatagttaggagggggttggtttttttagggttttagagatagaggtgtattgaagttggagtttgtaatttaggtagtagattcgaaatttttgttggattcgagggttagggaggttttcgggatgtaaataaattttttgtgtttttagagtagagtagagagtttacgttgtagttttattttagttgattagattagttttgggtgttggttttttgtttttttttagttttttttatcgatttttaaggaagttattttttagattaggttagtttgttttatagacggtttcggtagggtttttttaaggtaaggagtatttttattttgggtagtcgggttagttatgtgttatatttgtttttacgtttagaggttagagtgatatcgttagttttcgtaggtttggttattgattgttgggttttattaagttattgtttttatatatattagtttttttttgttttttttttttattattttaggtgttatttgattagtagttttttttattgtgttagagaaaattggagtagtcgagttttcgggtttggaggatagggggaggggtgagatgtagtttgaaggggtgggggtcgttgaataggaaggtttgggttgaaggtgggggttgggggaagtaggaggtaagaataaggttgggaagtgggggagggaggaaggatggttgtagaaaggttaaagttagaaagaattgttgagattagagtgattttttggggagtattgtagttttttgaaaaggataaaaaggtttaaattttaataattgtaatttttagtttatatttttaatatatgtatagatattatttttttaaagttaaattttggtcgggttaagaattttcgtttaggtgttaataaagttagaattttataagtttgttaaatagcgatgatgatttttgagtgttataggtgttttatagaggatattggagtttatattaataaagtgacgtattaattgtgtgtgtttttgggtgagtagtagagttaggacgggggttggagttttttgtatttttttttttagttatttagtttttagtagatgggattagagaggttttagtgagatgtaagaatgtgtttaaggttattattgtgttagttaatgataaataagtttaagaagttaggtttatttttttaaggttaaatgagattttaattgttgatatatgtgtttttttttttttttttttagggtattatgtagtgaaaatatacgagaaattggttttttagaatattgtattttttttgtttattaatattttattttttaaagtgttatttgtaattatttagtttttttaagggtagaaattttgtttttttagtataggagggtgattttaggttttggatagtgtttagagtggtttgatatttttggtaa

SEQ ID NO: 2176 - DNA, 2498 bp, Artificial Sequence
  chemically treated genomic DNA (Homo sapiens)
ttgttaagggtattagattattttggatattgtttaggatttggggttatttttttgtgttggaggggtagagtttttatttttaaggaggttgagtgattgtaaatagtattttgaggggtggggtgttggtggatagaaaaggtatagtgttttgaaaagttagtttttcgtatgtttttattgtatggtgttttagagagggaggagagagaatatatatgttaatagttggggttttatttaattttagaagaataagtttgattttttgggtttgtttgttattaattaatatagtggtgattttgggtatatttttgtattttattggggtttttttggttttatttgttgaaggttgggtgattgaaaaagagggtatagaaaattttagttttcgttttagttttgttgtttatttagggatatatatagttaatacgttattttgttgatgtgaattttagtgttttttataaaatatttgtggtatttaaaggttattatcgttgtttggtaaatttgtaaagttttggttttattagtatttagacgagggtttttaattcggttagagtttggttttggggaggtggtgtttgtgtatatgttgaaaatgtaaattaagagttatagttattggggtttagatttttttattttttttagggggttgtagtattttttaaaaggttattttgattttagtagttttttttggttttgatttttttatagttatttttttttttttttttattttttagttttgtttttgttttttgttttttttaatttttatttttagtttagatttttttatttagcggtttttatttttttaggttgtattttatttttttttttgttttttaggttcgggagttcggttgttttagttttttttggtatagtagaagaggttgttggttaggtgatatttggggtaatggaaaggggaggtagggagaggttggtatgtgtggaaatagtgatttggtgaagtttagtagttagtggttaggtttgcggggattggcggtgttattttagtttttgggcgtgggggtagatgtggtatatggttggttcggttatttagagtggggatattttttgttttggagaagttttgtcggagtcgtttgtgggatagattgatttggtttggaggatggtttttttgggggtcggtgagggaggttgggaagaggtaggaagttagtatttagggttgatttaattagttgagataaggttgtagcgtgggttttttattttgttttgagaatataggaggtttgtttatatttcgagagtttttttagttttcggatttagtagggatttcggatttgttgtttagattataagttttaattttaatgtatttttgtttttgaggttttgagggagttagtttttttttggttgtttttatcggtaatcggagtaatgtttagtttggttattgggttgggatagagggaggtttgtttttttgagatttgttttttatagattggaaaattgaggtttagagaagggaattgtttacgattatttagggagttagtaataagggtgttgggttagtttttggtagggagatatttagaggtttttgaattttttttttatttttagttggtattttaggattttggagtttttgttgtgggaatgggttgttttgaggtttggtgaaaagttggttgtaggtagtgttaggtttggtttttttttgagtgattgtgtttagagtaattcgattttgaaggcgatatttgaatttttattttatttttatttttagatttggtttaattatttaggtattagagtattagattatggattggtgtgtagtttttttttattttttagatttttatttatttattttgtttttggggatttaggtttttaagtagaattttaggtgtttttggttattgttatttgtattttcggggaaaataaaaatggtttttatttttgtttgtttaggataggtggttaaagttgtgtgattttgggtaggtttttgattatttttgtattttttttttatagtttgaagggatttgattggttgttgaaaagtttttgggtttagaagtaaaatgataatttattatagattatatttttttatagtttgtaaagtattatttttttgtttttaggttagtttttttttagtaatagaattgtttttgtaagtttttttaggtttttgattttttgagtattgattttattggttaggaggaaggtaggtaggggttaattatagttattatttattgattacgtgttgggttttttgtatatataaatgtattttttttaatttttattattttgtaaggtgttattagttttagttataaaagaggaaattgaggattttagagatgaaataaatttttaagtttatatagttaggaagtggtagaatttatatttgtgaatttgttttgatgtataat

SEQ ID NO: 2177 - DNA, 2452 bp, Artificial Sequence
  chemically treated genomic DNA (Homo sapiens)
tgaatatgtgtgtgtgtgtgagtgtacgtgagtgtgagtttgtaagttttttgagggttaagtatttggttgtttattttatttttttagtatttagtacggggtatagtattaaatatattgaataaatgaataataaaatatataatagttattagatttttttagttgttttttaggatttttggaggatttagttatttttaaattttaggtatagatggatagtcgttgggaatttgaaatattttaggtatagttttagattttttattgttgttttattgatgttttattttgtgtattagagtttatttttttttcgtcgtgtagatgggtaaattgaggtttagagagagtttaaattttatttaaagttatataggtaatgagagacggttttaaagtttgatattatatttagaattttttttattatattaagtgtggttagttttggaggagaaattttttttaagttttattttttgattataaataatatgaaaaatataagagcgatgtttttttattttagggggttgaaaaatgggatttatgaagttattaattatttttttttaattaaattaaaattaaatgtgagtataggtacgttttttttattaaagataattaaacggatagtgcggttacgtaaataaaatgagtttaggatttaaacggaaagtaaattaaataaaaagttttttcgggatgaggggtttgtttacgattgtgttattcgtaaattaggagtttattaattttttttaaatattagtaatttaattaaatttgtttttttttttattttaattttgtcgtatatttaaaatagattttattatttataggagttggttatgagtgttgattttataattttatttttttttaaaaaattaaaaattttataaaatttatatttagttgatagaggtttcgggggaaattatagttcggaaaacggattagttagagtatttagattttatggaaatgttgggaggttgttttgagggtgggtgtcgtgagaaggttcggggagaggtgggttagggttgttaatgggggtagggtcgcggaaggagttgtttgtgtggggttttggcgataatcgcggggtttagcggtttttgtgggtgttgataggagtttggcggtgagtgatggaggaggcggttgtaaaataggttatcgtcgggcgttcggggtttattttgcggatggtgttgttgttaagttatttttagaattcgataaggacggatgtttcgagcggttttttggggtggggggaattaggaagtagtgaattaattgaaatcgtggtgaagttttttttttttgaagagtgagagagcgtggtatgagagtgtgtgtttgtatttatatgtgtttatataagtattcgtatatacgagggatttagttggaaaggggataggtggtttttaaaagtttaagtttatatttttagggttggggggtggggtgggttaatgataatttttttttttatttagtggtaagaaattatattgttaggttgttaaaaagattttttgggatttggggcgggagtttatagttagatggtatatttaagatggtggaattatttataatagtgagatttataaggtgagatttaataatataaaagtgaatatttattgagtacgtgttaggatttagagagtattttaggtttttgataaatgttaatttattgattttttaacgttagattttgagttaggttttagtaatagttttatttaatagataaggaaattgaggtatagagagggtaaaaaagttggttttttgtattcgtgggttttgtattagtgaatgtagttaatttaggattaaaaatatttagaaataaaattgggtttgtattgaatgtgtatagacgttttttttgttattttttaaataatatagtataataattatttgtatagtatttatattgtattaggtattattaatattttagagatgatttaaagtatatgggaggatgtgtataggttatcggtaaatgttatgttattttatattgggttttggtatttatgggaggttttggaattaattttttatcgagagatattgagggataattgtaatgtgtttaaagttaggaagattataagtagtcgagttgggatttgagtttacgtagtatagttttaggtggttttttaattatatataatgttattttttttaagaaagtgtatattgggtaaatatttgttaagagatggaaattttttttttttttttggatggagtgtttttttggaggtggttttgagagtaagagagtagggtaggggttttgggtgaaggtgatagagaaggagggtgataagttataatagtagtggtaatgtggggattggttgttgggggaaatagaaagggttttggg

SEQ ID NO: 2178 - DNA, 2452 bp, Artificial Sequence
  chemically treated genomic DNA (Homo sapiens)
tttagggttttttttgttttttttagtaattagtttttatattgttattgttgttgtgatttgttattttttttttttattatttttatttagagtttttgttttgtttttttatttttaaggttatttttagaaaaatattttatttagggagggagaagaagtttttattttttagtaaatatttgtttaatgtatatttttttaagagaggtggtattgtgtgtggttaaagggttatttggagttgtattgcgtgggtttaaattttagttcggttgtttatgatttttttgattttgggtatattatagttgttttttagtatttttcgatgggggattggttttaggattttttatggatattaaaatttaatataaaatagtataatatttgtcgataatttatgtatatttttttatatattttaaattatttttagagtattgataatatttaatatagtgtaaatattatgtaagtagttgttatattatattgtttggagaatgataagaaaaacgtttgtatatatttagtatagatttaattttgtttttgaatgtttttgattttgggttggttgtatttattgatgtagaatttacggatatagagggttaatttttttattttttttgtgttttagtttttttatttgttaagtgaggttattattgggatttagtttaaagtttggcgttggggagttagtgagttagtatttgttaagaatttagaatattttttgggttttggtacgtgtttagtaagtatttatttttatgttgttaagttttattttgtaagttttattattatggatagttttattattttgagtgtattatttaattgtgaattttcgttttaaattttaaaaagtttttttggtaatttaatagtatagttttttattattaagtgggggggaaggttgttattagtttattttattttttaattttaggaatatgagtttgggtttttaaaagttatttgttttttttttagttgagtttttcgtatgtacgagtgtttgtgtgggtatatatgaatgtaaatatatatttttatattacgtttttttattttttaggaagaaaggattttattacggttttagttaatttattgttttttggttttttttattttagggagtcgttcggagtattcgtttttgtcgaattttaaaggtagtttagtaatagtattattcgtagagtgaatttcgggcgttcgacggtaatttattttataatcgttttttttattatttatcgttaggtttttgttagtatttataggaatcgttgggtttcgcggttgtcgttaaggttttatataaatagtttttttcgcggttttgtttttattggtaattttggtttattttttttcgaatttttttacgatatttatttttaaagtaattttttagtatttttataaaatttgggtattttgattaattcgtttttcgaattataatttttttcgaggtttttgttagttggatgtggattttgtaggatttttaattttttaaaaaaagatagaattatggggttagtatttatgattaatttttgtaggtggtgagatttattttagatatacggtaggattaaagtggggaggagagtagatttaattaagttgttaatatttaaagaaaattgatgaatttttggtttacgagtagtatagtcgtgaatagattttttatttcggggaggttttttatttgatttgtttttcgtttaaattttggatttattttatttgcgtagtcgtattgttcgtttaattgtttttaataaggaaaacgtatttatgtttatatttaattttgatttaattaggaggaagtaattaatggttttataaattttattttttagttttttgggatgagaaaatatcgtttttgtgttttttatgttgtttatgattaagggatggggtttgagggggattttttttttagggttggttatatttgatgtggtagaaagaattttgaatgtggtgttaggttttggggtcgttttttattatttgtgtgattttaggtggggtttagattttttttgggttttagtttgtttatttatacgacggggagagagtaagttttgatgtataagatgagatattaatgagatagtagtaaaaggtttagaattgtgtttggagtgttttaggtttttagcgattgtttatttgtatttgggatttaagagtggttgaattttttagaaattttagaagataattgggggagtttgatgattgttgtatattttattatttatttatttaatatgtttggtgttgtgtttcgtgttgggtgttggggagatggaataaatagttagatgtttggtttttaaggagtttgtaagtttatatttacgtgtatttatatatatatatatattta

SEQ ID NO: 2179 - DNA, 2489 bp, Artificial Sequence
  chemically treated genomic DNA (Homo sapiens)
atttttttttttttagttatgtataatatatttatataaaaattttatattttaatgggattttataaatatatatatggtattatattgggtgtattatttttttttttttttaaatagagttttgttttgttatttaggttggagtgtagtggcgttattttagtttattgtaatttttattttttgggtttaagcgattttttttttttagttttttaagtagttgggattataggtgtatgttattatgtttggttaattttttgtatttttaatagagatagggttttattatgttggttaggttggtttttaatttttgattttaagttatttgtttattttggttttttaaagtgttgggattatagatgtaagttatcgcgtttagtcggatgtatgattttttaatttgcgttttttatattttaggatgttttggaattatttttatgtgttagtataaaaatttatttttttggtttgggacgtggtttacgtttgtaattttcgtattttgggagttcgaggtaggggggttatttgaggtcgggagtttaagatcggtttgattaagatggagaaatttcgtttttattaaaaatataaaattagttaggcgtggtggtgtatgtttgtaattttagttatttagaaggttgaggtaggagaattgtttgaatttgggaggaagaggttgtagtgagtcgagattgtattattatattttagtttgggtaataagagtaaaatattgttttaaaaaaaaaaaaaaaaaaaaaatttattttttttttttgtattgttgggtaggattttattgaatggatatattatattttatttagttacgattttattaagggaattttaggtgttttttagttttttattaggatgatggatatttttatataaggttttttgtaggtgttattttgggttagaaagtaaaaatttttcgagacggggattgtattaggtttcggtttttagttttattgtattttatttgtgttaaggttacgggaatttttttatcgtttttgttagtagatgttatttagtatttattttaagatatttatattttgattcggaagagattagaagtattttgtagttcgtgtggataagttttttttttgatttatagtttttttattttcgtatttaggagagggatggtagcgttgagggtcgtgggatttttttttttggaggtttttttattttcgtggtttttgcgcggtttagttttttttcgagttggtttaaggggtaatttgatttaggttagttggtggagtatgaggtagcgtttagttgagcgttacggtattttattaagttcgaaatgtgatcgttattgttgttatattttagcgtttttaataatttttttataaatgagaaaaatagagtttttttaaatgttttttttttgatattaaggaaagcgtatggaattttgtttagaggtttgagttcgggtgattttaggagtggttttagagtttgaggaaaggtttggggggcggagggggtgtttttttagttttaggtaaagtagtgagttgggggttatttgttgttttttttgcgtttgggtttgtaaagttagcggttgtcgtttaaattttattttttttaatatgttaggattgtttattttaggttatttatttatatggttatggtttagaggttttagatttatatgtttagtggggttaaggatttaggtaacgtaaattgaagtaagtttcgtagagatggtgggaaattgtaaatggatgttttggttgaaggaggtagttgaaaatttggagagagaataagaataagaagagaaagggaagaggaggtagagagaaaagagagaggatattttttaagtttatatattgtttattgttttaaaaaaatttaaatatgtaatgagttaagtaggtatgtttttaggttagtttgtaggtttttttttaattgaatttattaatatagtagataagttgtcggtttggtttttttatttttttagagtagtattgtttagtagagatttttgcgatgataaaatatttgtagcgtttattgtaataattattggttatatgtagtttttgagtatttgaagtaggattaaagaattgaatttttaatgttatttaattttattgaattttaatataattataattagttataggtaattaattgttattatattagataatatggttttagatttttttaatgtggagggtattatcgtgtttgattattgtaaaaaagattatttttttttggggagagggggtagattatatttgagattattaagtattaattagagttttgggtaaatggaaagaaaggaaattcgaaatattgagtagtaaaagtttaggtgtaattagatgtttgttggtttaagagtggttatttagtgtttttttatttttttattttttagtgagttt

SEQ ID NO: 2180 - DNA, 2489 bp, Artificial Sequence
  chemically treated genomic DNA (Homo sapiens)
aaatttattgggaagtgggggagtggaaggatattgagtgattatttttgagttagtagatatttggttatatttaagtttttattgtttagtatttcgaattttttttttttttatttatttaggattttgattaatgtttggtggttttaggtataatttattttttttttttaagaaggagtgattttttttgtagtagttaagtacgatgatattttttatattgaaagaatttagagttatgttgtttaatatggtagtaattagttgtttgtggttagttatagttatattgaaatttagtaaagttaaataatattaaaggtttagttttttagttttattttaagtgtttaagagttatatgtagttagtggttattgtagtgaacgttgtagatattttattatcgtagaaatttttattggatagtgttgttttagaggggtgagggagttaggtcggtagtttgtttattgtgttgataagtttagttagggaagagtttgtaaattggtttggagatatatttatttagtttattgtatgtttaaatttttttgaagtaatgggtaatatgtaaatttgggggatgtttttttttttttttttttgtttttttttttttttttttttttgtttttgttttttttttagatttttagttattttttttagttagggtatttatttatagttttttattatttttacggggtttgttttagtttacgttatttggatttttgattttattaggtatgtgagtttgagatttttgagttatggttatataaatggatggtttagaatgagtaattttgatatgttaaggaaaatgggatttaaacggtaatcgttgattttatagatttaggcgtagaggaaatagtagatagtttttagtttattgttttgtttgaaattggaaaaatatttttttcgttttttaggtttttttttaagttttggagttatttttggggttattcgggtttaggtttttgggtagggttttatgcgttttttttgatgttagaggaaaggtatttggggaggttttgttttttttatttgtaaggggattgttgggggcgttaaagtgtgataatagtagcgattatatttcggatttaataaaatatcgtgacgtttagttagacgttattttatattttattagttgatttggattaagttattttttgagttagttcggaggggagttggatcgcgtagaggttacgaggatgggggagtttttagggaagagaattttacgatttttagcgttgttattttttttttaggtacgagggtgaggggattgtaagttagaggggagatttgtttatacgaattgtagggtgtttttggtttttttcgggttaaagtatgagtattttggggtgggtgttgaatggtatttgttggtagagacggtggaagggttttcgtggttttgatataggtgaagtgtagtggggttgaggatcgggatttggtgtaattttcgtttcgagggatttttattttttgatttagagtaatatttgtaaagagttttgtgtaaaaatgtttattattttggtgagaaattggaaaatatttaaagtttttttgatgaggtcgtagttaaataaaatgtggtatatttatttagtggaattttatttagtagtgtagaaaaaggaggtggattttttttttttttttttttttgagatagtgttttgtttttgttgtttaggttggagtgtaatggtgtagtttcggtttattgtaattttttttttttaggtttaagtaatttttttgttttagttttttgagtagttgggattataggtatgtattattacgtttggttaattttgtatttttagtagagacggggtttttttattttggttaggtcggttttgaattttcgattttagatgatttttttgtttcggatttttaaagtgcggggattataggcgtgagttacgttttaagttaaggaggtgaatttttatgttagtatatggaaatggttttaagatattttggagtgtgaaaaacgtaggttaaagaattatatattcggttgggcgcggtggtttatatttgtaattttagtattttgggaggttaaggtgggtagatagtttgaggttaggagttggagattagtttggttaatatagtgaaattttgtttttattaaaaatataaaaagttagttaggtatggtggtatatatttgtaattttagttatttgggaggttgagaaaggaggatcgtttgagtttaggaggtggaggttatagtgagttgagatggcgttattgtattttagtttgggtgatagagtaagattttgtttaaaaaaaaaaaagagtgatatatttagtatgatgttatgtatatatttataaaattttattaaaatatgagatttttatatggatatattgtatataattggaaaaagaaagat

SEQ ID NO: 2181 - DNA, 2458 bp, Artificial Sequence
  chemically treated genomic DNA (Homo sapiens)
gtgtgtgtaaagtaatatggaaaaatgcggaggtgggaaagatagagatagagagatagaagagatagagagatataagagatagagagatagagagatgttggtttgaggttttggggatttatttttatttgaaattattttttttttttttttttgagatggagttttattttgttttttaggttggagtgtagtggtatgattttagtttattgtaatttttgttttttgagtttaagcgattttttcgttttagtttttcgagtagttgggattataggtgtttaatattacgtttagttaattttttaatttttagtagagattaggttttattatgttggttaggttggttttgaatttttgatttgaggtgatttgttcgttttagttttttaaagtgttagaattataggcgtgagttatcgtgtttagtttaatgttttaatttttagtagagatggggtgttattatgttgtttacgttggtttggaatttttgggtttaagtgattttttcgttttggttttttaaggtgttgggaatatacgtatgagttattatgtttattatatttttattgtattttattaatatgtttacgtatgtttagatatataaatattttttattgtgttattatcgtttataggatttagtatggttatatgttgtaggggggtttgtagtttaggagtaataggttacgttatagagtttaggtgtgtagtaggttatgttatttaggcgtgtaatgtattttatgatgttcgtataatgatagaattatttaacgatacgttttttagtatgtatttttattgttacgtgatatacgattgtatattgtttggaattggtatatagtaagtgtttattaagggttatatttttattatttattaatgggttcgttttttgttatagttaattttttgttgttaatatttggtttaatggagtttttttgtttttttggagaggattattagttttttatattttttttgtattttgtttcgtggtttagtaggtcggttattttttttgtaggtagttttacggtggaggttttacgcggttgtttttttatttgtttgagttaagtgtttttggggaacgattcggagtttgatgggaggaggagatttttttgtttttttttttagttttaaatttaattgaaattgttttgtaataattgtatttgtggtttgtgaaagttgtgtttcgtggcgattagggattgagattagttggtgaaaaatttggtataggggtatatacggtattattggggatattaagtaagttacggataatgggggagatagagggtttttgtaattagaaattattgggaatttcggttatttttttttgttgtagatatgttttcgttatgtcgggtcggcgtaggaatacgttgttttttttagtattagttttttttttttttagtaatataggtggtaatgtggtagagtgtttaaagcgtttttgtagttagattgtttgggtttgaattttggatttgttattttttagttgtgggattataaaggattttgttttttgtggttgttggtaatgaaacgatagtgtatttttatttattgttatgtacgtggatgaattgataggtatgcgaagggtgaaataggatttgatttgttttaggggttttttaagaggtagttagtaggatagaaagtattcgttgttttcggaggatttttttttttttacgacgggttatttggttggaaatattaatagggtttttttaaggatattagtaattttcggtatatgtttattttatattatttttatttatatattatattaaaggtaatcgataaatagttttttaagagtttaaatgttttagagttgattcgttgaattatgtaatattattttattaaatatttatttattttgatttggtaatttgtttttatattttggaattagtatataaatatatttacgtatttgtataaatatataatatatatatatatatatatgtatgaatatatatatataagtataaatatattatatatatatatatgaatatataatatatatatatatacgagtgaatatatgatatataaaaatatatatatgtattaatatatggtatatatacgtatatgtatagatatataatatttatatatatataatgtatgaatatataggtatatatgtatatatatacgatgtaggaaaatatagtaaaagtatatatatatatatatacgaatatataatatatatatatatataggatataaaattttaaaaaagatagaaatgtattttgtttttttatttgttttttttttatagttaatttttaattggatttttgttttcgtagtttttttagagtttagatttttttaaatggttagagggtttttttgagtttaagag

SEQ ID NO: 2182 - DNA, 2458 bp, Artificial Sequence
  chemically treated genomic DNA (Homo sapiens)
tttttggatttagaagggttttttggttatttggggaagtttgggttttgggaaggttgcggaggtagaagtttagttggaagttggttgtgagaaggaaataggtgaagaagtaagatgtatttttgttttttttgggattttatattttgtgtatatgtgtatgttgtgtattcgtgtatgtgtgtatatgtgtttttattgtatttttttgtatcgtgtatatgtatatatgtatttgtatatttatgtattgtgtatatgtgaatgttgtatatttatgtatgtgcgtatgtgtgttatatattaatgtatatgtgtatttttatatgttatgtatttattcgtgtgtatatgtgtgttgtatatttatgtatgtatatgtagtgtatttgtgtttgtgtatatgtatttatgtatgtgtgtatatgtatgtgttgtatatttatgtaggtgcgtagatgtgtttgtgtgttggttttaaaatatgaggataaattgttaaattaaagtgaataaatatttaatgaaatggtgttgtatgatttagcgagttagttttggaatatttggatttttagagagttgtttgtcgattatttttaatgtagtgtgtgggtggaaatggtgtgggatgaatatgtatcgaaagttgttgatgtttttaaagaagttttgttggtatttttagttagatggttcgtcgtgggggagagaaagtttttcgaaagtagcgggtgttttttgttttgttggttgttttttgggaggtttttaggatagattaggttttgttttatttttcgtatgtttgttagtttatttacgtgtatagtagtgggtgggggtgtattgtcgttttattgttaataattataggggataaagttttttgtggttttatagttaggaggtggtagatttaggatttaaatttagatagtttgattgtagagacgttttgggtattttgttatattattatttgtgttattgggaaaagggagaattgatgttgggaggaatagcgtgtttttacgtcggttcggtatggcggggatatgtttgtagtagggagaggtggtcgaggtttttagtggtttttggttgtaggagttttttgttttttttattgttcgtggtttgtttagtatttttagtgatgtcgtgtgtgtttttgtgttaggttttttattagttaattttagtttttggtcgttacgagatatagtttttatagattataaatgtaattattataaggtaattttagttagatttggggttgggagagaaaatagaagggttttttttttttattaggtttcgaatcgttttttaggagtatttaatttagataaatggggaagtagtcgcgtggagtttttatcgtagagttgtttgtaggggaagtggtcgatttgttgggttacgaagtagggtgtaggaaggatatggggagttagtgattttttttaagggggtagggggattttattaaattagatgttaatagtaagaagttggttataataggggacgggtttattggtggataatgaaaatataatttttagtaggtatttgttatgtgttagttttaagtaatgtatagtcgtgtgttacgtaataatggggatatatgttgagaaacgtgtcgttaggtgattttgttattgtgcgaatattatggagtgtattatacgtttggatggtatagtttattatatatttaggttttgtggcgtgatttattatttttaggttataaatttttttatagtatgtgattatattgaattttgtaggcggtggtaatataatgggaagtatttgtgtatttaaatatacgtgaatatgttaatagagtatagtaaaaatatggtgggtatggtggtttatgcgtgtatttttagtattttgggaggttaaggcgggaggattatttgagtttaggagttttagattagcgtgagtaatatagtgatattttatttttattaaaaattaaaatattaggttgggtacggtggtttacgtttgtaattttggtattttgggaggttgaggcgggtagattattttaggttaggagtttaaggttagtttggttaatatggtgaaatttggtttttattaaaaattaaaaaattagttgggcgtggtgttggatatttgtagttttagttattcgagaggttgaggcgggagaatcgtttgaatttaggaggtagaggttgtagtgagttgagattatgttattgtattttagtttgggagatagagtgagattttattttaaaaaaaaaaaaaaaaagtggttttaggtaagagtggatttttagggttttaaattagtatttttttatttttttattttttgtatttttttattttttttgtttttttgtttttattttttttattttcgtatttttttatattgttttatatatat

SEQ ID NO: 2183 - DNA, 2422 bp, Artificial Sequence
  chemically treated genomic DNA (Homo sapiens)
ttatcggaaagagaagttttagtattttaatggagtttcgtttttagtataggtaaggataggttttaggtttagagttgttagttcgagtttaataatttagtttatttttgtggtatttatttttaattttgtgtttaatttaaggtgattaattttatatagtttgttagaattatttaggttttaaaattgaaagtttataggtgaatggaggtaagggtggttggttatttttgttttaatttatgggtattagatattggttttttattaatggtagtttttttttaaaataaatatttgaatttaaaaaggggtcggacgtagtggtttacgtttgtaattttagtattttgggaggtcgaggcgggtagattatttgaggttaggggtttgagattagtttggttaatatggcgaaattttatttttattaaaaatataaaaattagtcgggcgtggtggtgtacgtttgtaatttcggttattcgggaagttgaggtaggagaatcgtttgaatttgggaggcggaggttgtagtgaattaagatcgtgtaattgtagtttagtttgggcgatagagtaagatttcgtattaaaataataatagtaaaaataaaataaaataattttaaaaatttaaaaagagagttatttgagggaaaatattaagaaattaatagtatttttggtgaaaagaaatggtaaaaatattgtgaatattgtgttatgtgagtgagtgatggtgttgagaaatgtataatgtttgtaagtttggaaatttaagtttagtttttgggttggtggtttattggtcgtttgattttaaataggttgtttgtttttttcgagtttttatattattttaagtttataaggttaattatttttagaggtggggagaggttagagggtaggtaggttttgttgtgggtaggtaggttttgtttatttttatttttttaagggtgaggttttaaggtatgagttgtttttagtgtaaaagttggtattaatagtagtaatttataaatttttggagaggttcggtattttttatttagtgattgttgagtttgattgatggggttatgtcggtaaattagttattatttagtagagatattttttagagatgttaattgtttagtgtttatgcgtttttatttttttttggtataggcggttggttgtcgattttttgttattattgtttgataatagtgtttgatttgtttatatagattagggtttttgtatgtatgttgttagtatttaattattagttagtacggcgtatgaagtacggtttattaatgtttttgaggggagtaaataggtgttggtagaaatttattttcgtggataaatttgtggatacgtgtatttttatacgtgtttatttagtttttaagtataggaatgagttagtgttacgtgtgtatatgtattttgtgaattatttatacgtcggttaagaagtagttttagatatatacgtataggatggagtatatgtatgtatataataggtaatgttatatggggttgtgttaggattatattatagaatatttgtaaggcgttttgaatagcgttcggtatgtggttaattattttttagtaaattagattttttattatttttttttagtgtttttttatttattgaggtataatttatatataataaaatgtataagttttaagtgtttagtgtagtgttttttgataaatagatatatttgtgtatttattaatttagttaaggtttagaatatttttattatttaggaagttttttcgggtttttttttagttaatatttttaaaagtaattattgttttgattttttttgttatagttgaattttgtttgtttttgagttttatataaatggaattatatggtgtgttttttttggtaatgtttattgtggatgtttagatgtgtgtatagttatttatatttatatatatgtgtatggatatttagttagatttatttagaaatggggatttttgagttgtaaattttttggttttagtttgtagtttagttaagtttttttgggtttagaggattaaaggagatggggagagtttttgatgttgggtttagttatcgtggggggttttttttatattttttttagttttttttattgagtgattttagataagaattgaaaatttgtttttttttgtgaaatgaaatgaataataataatatatagtttataatttttttgtattgagtatttattatgtagtaggtattgttttaaggattgcgtaagttcgagtttattttgtttttttagtaattttataatttaggtattattattatttgttttatgggaaaggaatttgaggtatagagaggtttagtagtttgtttgaggttatataggaa

SEQ ID NO: 2184 - DNA, 2422 bp, Artificial Sequence
  chemically treated genomic DNA (Homo sapiens)
tttttgtgtgattttagataagttgttgggtttttttgtgttttaggttttttttttataagataggtaatgatgatatttggattatagggttgttgggaggatagagtggattcgaatttgcgtagtttttagaatagtgtttattgtataataagtgtttaatataggggagttatgagttgtatgttattattatttattttattttataggagaaaatagatttttagtttttgtttgaggttatttagtaagggaagttgaagaaaatgtggaaggagttttttacggtggttggatttagtattaggggttttttttattttttttagttttttgaatttagagaggtttagttgaattgtaagttgaggttaagggatttatagtttagaaatttttatttttgaatgagtttgattgagtatttatgtatatgtgtgtaagtgtgagtggttgtgtatatatttgagtatttataataggtattgttaagaaggatatattatatgattttatttatatgaggtttaagaataagtaaaatttaattataataagagaaattagaatagtgattgtttttggaggtattgattggaagggaattcgagagaattttttggatgatggaaatattttggattttaattgagttggtgggtatataagtgtatttatttattaaaaggtattgtattaaatatttaaaatttgtgtattttattatgtgtaagttatattttaataaataaaggagtattgggaaaaaataataagagatttaatttattgaggagtaattaattatatgtcgggcgttgtttaagacgttttataggtgttttgtaatgtaattttaatataattttatgtagtattgtttgttatgtatatgtatgtattttattttgtgcgtatgtgtttgaggttgttttttagtcggcgtatgagtagtttatagaatgtatatgtatacgtgatattgatttatttttatatttgggggttaagtgggtacgtatgagggtgtacgtgtttatagatttgtttacgggaatagatttttgttagtatttgtttgttttttttaagagtattaatgaatcgtgttttatgcgtcgtgttggttggtagttagatgttaatagtatgtatgtaggggttttggtttgtgtagataaattaagtattgttattagataataatggtaggggatcgatagttagtcgtttgtgttagggaggggtggggacgtatgagtattgggtaattagtatttttaaagggtgtttttgttgaatggtggttaatttgtcgatatggttttattagttaaatttagtagttattgagtggggaatgtcgggtttttttaaagatttgtgagttgttgttgttggtgttagtttttgtattgggagtaatttatattttaagattttatttttaagaggataagggtgaatagagtttgtttgtttataatagagtttgtttgttttttgatttttttttatttttgaggatggttggttttgtgagtttgggatgatgtggaggttcggagagggtaagtaatttgtttagagttaaacggttagtgggttattaatttaggaattgagtttgggtttttagatttgtaggtattgtatattttttaatattattatttatttatatgatatagtatttataatatttttgttatttttttttattaaaggtattattagttttttggtatttttttttaagtgattttttttttaaatttttaaaattattttgttttatttttattattattattttgatgcggagttttgttttgtcgtttaggttggattgtagttgtacgattttggtttattgtaattttcgttttttaggtttaagcgatttttttgttttagtttttcgaatagtcgggattataggcgtgtattattacgttcggttaatttttgtatttttagtagagatggggtttcgttatgttggttaggttggttttaaatttttggttttaaatgatttgttcgtttcggttttttaaagtgttgggattataggcgtgagttattgcgttcggtttttttttaaatttaaatgtttattttaaaaggaagttgttattaatggaaaattagtatttgatatttataagttgaagtaggggtgattaattatttttgtttttatttatttgtgaatttttagttttaaaatttagatggttttggtaaattgtatggagttaattattttaaattgaatatagggttaaaaatgaatattataaaaataaattaggttattaaattcgaattggtagttttgagtttggagtttgtttttatttgtgttgaaggcggagttttattagaatgttggagttttttttttcggtag

SEQ ID NO: 2185 - DNA, 2465 bp, Artificial Sequence
  chemically treated genomic DNA (Homo sapiens)
ttttgttaatagggtttttaaagaaattatgggatgttcggttgaatttgaattttagataaataataaattttttaagtataagtatattttttaattattagtagtttggtatatattattttaggtttttttttgtgaagatatgtatttttttttgagacggagtttcgttttgttgtttaggttagagtgtagtggtgtaattttggtttattgtagttttcgttttttaggtttaagcgatttttttgttttagtttcggagtagttgtgattataggtatacgttattatgttcggttaatttttgtattttgagtagagacggggttttgttatgttggttaggttggttttaaatttttgattttaggtgattcgttcgttttatatattttttttggtatggtttgtatttgatatcgtttgtagtttgtttttttttttcggggtattatcggggttattgtgtttattagagtaggttgtgaggttgtggattttatttggattaggatttttgtttcgttgtttgttaattgtgtgattttgagtaggttattttatttttttgagttttcgtgtttttatttgtataacgtggaggatacgggtagttttgttattttttgtatttgttgattttgttttttttgaaagttgtatagaatggagaggtcgtggtggttttaattagtttttcgtgatgggcgttaggattgttgtttgtttattgtttttttaaaggaggtagtggaagggggtcgagtaggaatcgggtatataattttaagatttagtttgttttaaaaaaaaaaaaaaaatgaagggtgtttgtttttttggaaattatttgttaatttttaggatatcgttttttttttaggcgaaggaggtggaggagattatcgagggtatgttttttaggttggaagagttttgtagtttggttgatttggtgagtggttgtttggaaggcgtgggtttaggtttaggttagattttaggtttttgttggagttttttgcggaagttattttggtggtgagttagtaattaggaggaatggggtagcggttagcgttgagaggaaagttacgtgtaaatatttttttttttttttttttttcgtttttttttttttatttaattttaagtgttttttgaggcggttattttgatttcgtttttttttcgagatggtttttatttcgtagaggagttaggagtggattataaggtggtattttcgggtatcgatgtagggagtcgtttagcggggacgttagattatatttaattttttttagttttgtatcgttttttgtgtaaatatggagatagttaggaaatggttttaggtttgcgaggtttaggaggagttttttgtttaggttatagttcgtggtggagttgggtatcgagtttttttttgaatttttttgttttttttgtttttattttttattttgtttggttggtttaaatttattagtttggttgaggaggaagatggaagataatggtttagaagataaagttttttacgttagagtttttagaaatcgtttttagaggttgggtgtagtggtttatatttgtaattttagtattttgggaggttaaagcgggtagattatttgaggttaggagtttaagattagtttgattaatatggtgaaattttgtttttattaaaaatataaaaattagtcgggtgtggtggtaggcgtttgtaattttagttatttaggaggttgaggtaggagaattgtttgaattcggaaggtggaggttgtagtgagttgagattgcgttattgtattttagtttgggtgatagattaagattgtgttttaaaaaaaaaagaaaagaaaaagaaattgtttttagattttagtgtttttaggattgttgttagttaggtgtggagtttttaggagtgttgatagaattttttagaagtttttaagtttattagaggtaaattagtaatttgggtttgaggtgtttgtttggaggtttaaagggtagagttttatattgtgattaggttttgtgtttttttagagtggaggaagtttggttatttgggtttagtggtgtgcgtttatgtttttgagaagtatcgtgttcggattttgagagtgtttgtgagaatttaagggagtaatagtaatagtagttttagatgtttattgaacgtttttttttgtgttcggtataaagttattttagatagtaggtattgagttatttttatttatttagcggatttcggtttagtttttagggttatagtagaaattttaagaggatttatatggtttttttttttgagttaatttttacgtttagatgtgggtttaggtgggagttaggtaataagataggtttttaatagtttggattgttttttttttattattacgtattggattttttttttttttttttgtttt

SEQ ID NO: 2186 - DNA, 2465 bp, Artificial Sequence
  chemically treated genomic DNA (Homo sapiens)
aagatagaaagagaaagaaagagtttaatgcgtggtggtaaagaaaggataatttaggttgttaaaagtttgttttgttatttagtttttatttggatttatatttgaacgtaaaaattgatttaagagaagaaattatataggtttttttgggatttttgttgtgattttagaggttgggtcgaggttcgttgaataggtagggatgatttagtgtttgttgtttagggtggttttgtgtcgggtataaagaaaggcgtttaatgaatatttggggttgttgttattgttatttttttgggtttttataaatatttttagggttcggatacggtgttttttagggatataaacgtatattattgggtttaggtggttaggttttttttattttggggagatatagggtttggttataatatggagttttattttttgggtttttaggtagatattttaagtttaggttattggtttgtttttaataagtttgggagtttttagaaaattttattagtatttttgggggttttatatttggttggtagtaattttaggaatattgggatttagaagtaatttttttttttttttttttttttttgagatataattttgatttattatttaggttggagtgtagtggcgtaattttagtttattgtaatttttatttttcgggtttaagtaatttttttgttttagttttttgagtagttaagattataggcgtttgttattatattcggttaatttttgtatttttggtagaggtagggttttattatgttggttaggttggttttgaatttttgattttaagtgatttgttcgttttggttttttaaagtgttgggattataggtgtgagttattgtatttagtttttagaggcgatttttagagattttggcgtgggaggttttgttttttgggttattgttttttatttttttttttagttaggttagtagatttgggttaattagatagagtaggaggtaaaagtagagagaatagaaggatttaggaaggaattcgatgtttaattttattacgggttgtggtttgggtaagaggttttttttaggtttcgtaggtttgaagttattttttggttgtttttatgtttgtataggggacggtgtagagttgaggaaagttaaatatagtttagcgttttcgttgaacggttttttgtatcggtgttcgagagtgttattttgtggtttatttttggtttttttgcggaataaaaattatttcgagggaaggacgagattaagatggtcgttttaggaagtatttggggttgagtgagagagagagagcgagagagagagagaggagggagtgtttgtacgtggttttttttttagcgttggtcgttgttttattttttttggttgttaatttattattaaaatggttttcgtagaaaattttagtaagggtttgaagtttggtttgggtttaaatttacgttttttaggtagttatttattaggttagttaggttgtaaaatttttttagtttgaggagtatgttttcgatggttttttttatttttttcgtttgaaaaagagacgatattttggagattagtaagtggtttttagggagataaatattttttattttttttttttttttaaagtaaattaagttttaggattatgtgttcggtttttgttcgatttttttttattgttttttttgaaagagtaataaataggtagtagttttggcgtttattacggaggattggttaaagttattacggtttttttattttatgtagtttttaaaagagataagattaataaatataggaaataataaagttattcgtattttttacgttgtatagatgaggatacggaggtttagagaggtggggtaatttgtttaagattatatagttaataaatagcggggtaaggattttaatttagatggagtttataattttatagtttgttttaataaatatagtggtttcggtgatatttcggagaggaaaagtaagttgtagacggtgttagatataaattatattaaaaaaaatgtgtgaggcgggcggattatttgaggttaggagtttgagattagtttgattaatatggtagaatttcgtttttatttaaaatataaaaattagtcgggtatggtggcgtgtgtttgtagttatagttatttcgaggttgaggtaggagaatcgtttgaatttaggaggcggaggttgtagtgagttaagattgtattattgtattttagtttgggtaatagagcgagatttcgttttaaaaaaaagtatatgtttttatagagaaaggtttggaatgatatgtgttagattgttaatagttaagagatgtgtttatatttaaaaaatttgttgtttatttgaaatttaaatttaatcgggtattttatagtttttttggaaattttattaataggg

SEQ ID NO: 2187 - DNA, 2474 bp, Artificial Sequence
  chemically treated genomic DNA (Homo sapiens)
gataggagaggaatttatttcgttaagaaggattttttttttagataagaaattaatatggttttgttttttgaattttgtgtgaagttaattaggtttttagagtgtaggtagaagggtagttgatgttttttgagtatttattatgtgtttgatatttttagttttttgatttttttttattgttaatatattattaattttattttagagatgggaaaattgagttttaaggtatatagtgtgaggttaatttaggttttaggtcgagtttgttgggtgatttaaaatttagtttttgaagtgggaattatataaaggtttttggtattaggaataatttttgatggtggaagtgtttagatataatgagtgttttaattaaaaatttatttttttgtggttttttttaaatggatgtaaacggaatgaattgtaggatttttggatttaaaagtttgttttttaatgtaggggattaagtttaggtaaatatttagatttttgaaaacgagattattttttttatttttacggtagtttcggagttgtaatttggatcgtatttttggagagtagtttcgtgttttagtaaagttgtgggtaagtgatgggttttagttcggggggttattgatattagggatatgagttatagagggtaaaggttcggagagttttagttatgttttagttttgtttggagtttgatattttttagagggaagttttatttagagatttttatattaggtttattgttttagagaatattacgtcgggtataattaaatttagggagagaaataggtgggaagagtaggtgtttgttttaagatggtttcgattgttttagggtataaatttacggaaaaatatttaatttagaaaaaaaaaaattattttaagtatatgtatttatatttattaaataaagtttaaaatataatttttggggatttttaagtaataaaatgatttatgttaggatatgatgatttagtgggaaagagggaattttattatttacgcgttttttttaaaaaattaatttgttttttggataggtgatgggagtttttgttattagatcgttttaagaaaatcgtttagtaaaataaaataaaaaattttttttaaataatttaagttttaaagttgagtaatttgatgtaggttagtttttaatttacgttttcgtaggatatatagagttagggagttagttggttaagtttgggggtttgaattaagaaggatttattagtcgaaaaattttaaaattttgtgttatgtgaaggaattttttaaaatattggattttatttaggcgtagcgagtcgtttaaagttatggtaatttttttttcgttgttatattatttttatttttgtgtttttagatttttttttgttttgtaatgttttgttgggattttcgatttcgtttgaggttttgtggttaagggttagggtttttattgaagttaggaatagtttggattttttagcgtgaattttgtttgaagggttatatattttttaaattttagagaatatttaaatggttttttagtaattattgagaatgataaataggaaagattttgattgttttgtttggtttttttgttttttttgatatgattagaaaaaattattcgagttgacgataaatgttgttttgggattttatttttgttattagttgtgggttgatttggggtgtatgatttgatatttgtgagttttagttattttatttgtaaaatggggataatgttgttcgttttttagggttggagtgataattaaaagagatgtatttatttaataatataaatgagtatttgttatgtgtcggggattattttggatgttgaggatatagtagtaaacgttgagattttgttgttaaggaattaagagtttagtatgagagattaggtgataaatgaatagatagataaggtaggtgattttaatagcgttaagtgtttttaagaaaatagagtcgggtagtggtatagaaggtgataaggtgtttgggaagcgggataattttagaatgacggttaaggaggatttcgtggaggaagtgatttttgagttgagattgggaggaataggaggtcgtaggtttgaaaagaaatggtggaggaggtcggacgtagtggttcgcgtttgtaattttaatattttgggaggttaaggtaggtagattacgaggttaggagattgagattattttggttaatatggtgaaatttcgtttttattaaataaattataaaaaattagttaggcgtcgtggtaggtgtttatagttttagttatttaggaggttggggtaggagaatggcgtgaatttgggaggcggagtttgtagtgagtcgagatcgcgtattcgcgttacgttattttagtttgggcgatagagtaaaatttcgttttaaaaaaaaagaaaagaaaaga

SEQ ID NO: 2188 - DNA, 2474 bp, Artificial Sequence
  chemically treated genomic DNA (Homo sapiens)
tttttttttttttttttttttgagacggagttttgttttgtcgtttaggttggagtggcgtggcgcgagtgcgcgatttcggtttattgtaagtttcgttttttaggtttacgttatttttttgttttagttttttgagtagttgggattataggtatttgttacgacgtttggttaattttttgtagtttgtttagtagagacggggttttattatgttagttaggatggttttaattttttgatttcgtaatttgtttgttttggttttttaaagtgttgggattataggcgcgagttattgcgttcggttttttttattatttttttttaagtttgcggttttttattttttttagttttagtttaaaggttattttttttacggggttttttttgatcgttattttgaagttgtttcgttttttagatattttgttattttttgtgttattgttcggttttgtttttttgggggtatttagcgttgttgaaattatttattttgtttgtttgtttatttattatttggttttttatgttggatttttagttttttgatagtagagttttagcgtttgttgttgtatttttagtatttagagtggttttcggtatatagtaggtgtttatttgtgttgttgaatgaatgtattttttttagttgttattttagttttgagaagcgggtagtattatttttattttatagatgaggtaattgaggtttatagatgttaagttatgtattttaggttagtttataattggtgatagaggtggaattttaaggtagtatttgtcgttaattcgagtaattttttttagttatgttagagaggatagagaaattaaatagaataattagggttttttttatttattatttttagtaattgttgaaaagttatttggatgttttttgaaatttaaaaaatgtgtaattttttaggtaaagtttacgttgggaagtttaggttgtttttgattttagtgggaattttggtttttggttatagggttttaggcggagtcgggggttttagtaaaatattgtaaaataggaaaaaatttaaggatataaaaataaaagtgatgtggtagcgggaaaggggttgttatggttttgagcgattcgttgcgtttgggtgggatttaatgttttggaaggtttttttatatgatatagagttttggaatttttcggttggtaaattttttttaatttaggtttttaggtttggttaattagttttttggttttgtgtgttttgcgggggcgtaggttggaaattggtttgtattagattatttagttttgaaatttaaattgtttgaagagaattttttgttttgttttgttggacgatttttttggaacggtttgatggtagaggtttttattatttgtttagaggataaattgattttttagaaaggacgcgtgggtggtggaatttttttttttttattgagttattatattttgatatgagttattttattatttggaggtttttaaaggttgtattttgagttttgtttaataaatataaatgtatatgtttaaaataatttttttttttttaaattaagtattttttcgtgaatttgtgttttggaataatcggaattattttagagtagatatttgttttttttatttgtttttttttttgggtttggttgtattcggcgtgatgttttttgaaataatagatttggtatgggagtttttagatggggtttttttttgggaaatgttagattttagatagggttggggtatgattaaggtttttcggatttttgttttttgtgatttatgtttttggtgttagtggtttttcgggttggagtttattatttatttatagttttgttgggatacgaagttgttttttaaagatgcgatttagattgtaatttcgaagttgtcgtggagatagagaaaatggtttcgtttttagggatttaaatatttgtttaaatttggttttttgtattgaagaataggtttttaagtttaagaattttgtagtttatttcgtttgtatttatttgaaggaggttatagagaaatgagtttttagttagaatatttattgtgtttaagtatttttattattagaaattgtttttggtattaaaggtttttgtgtaatttttattttaaaggttggattttgaattatttagtagattcggtttgaagtttggattggttttatattatgtattttgggatttagtttttttatttttgagatggggttggtggtgtattagtaatagaaggagattaaggaattgaaagtattaggtatatagtaggtgtttagaaaatattagttgtttttttatttgtattttgggagtttggttgattttatatagggtttagagggtagagttatgttggttttttgtttgggagaagagttttttttggcgaggtgaattttttttttgtt

SEQ ID NO: 2189 - DNA, 2463 bp, Artificial Sequence
  chemically treated genomic DNA (Homo sapiens)
tttgtttaattaatttttttgtgattttaattattttttcgtttgttttttttagtagattgggtattttttgaaagtaagaattgattttatttttttttttatttagagtatatagtttatatttagtatttgttgattgaatgggtattgttgtttattttggttgtcgcgatagttttggaaggttttaggtagggtggtaggggttagaatttattttatttttcgtagtttaatggggttttgtagagggttttaagtgatgttgtaaagttttatattgagaaatgttatttttattttggttttgagaggggataggggtttggttataagttgggattagtatttaggttattaataagttttaataagttttttaaagtttaatttttattaaattaggtatttttcgaggttttgtttttgtttaaggtaagcgtagtaatgtgtttgttttacgattttaataatttcgggtttaaagttaaggtgtatttgggttaattatttttttttttttcgtagtaagaaaaataataatttattaaaagataaatgtaaaaagaagatgtacgtgagaacgagtttacgtggatgtgtaagtatttgttttagagatatagttacggggttgttttagggttagtgtatgaatttaatatgattttatttttgtataagatttttttgtattttttattttaatattatttggttgaaattttcggtttagttttagattatttttgtttaatttttgtaaataaggttatatttgggtatttatggtttattttacgtttttttttatgatagacgttcgtttgagtttagtttttgtagttatcgttttttattaaagtagattttttttttttttttgtttacggaggagtgagggggaattgttgagaggaggggtagattggttagggagggggcgattgagaataggaagaagatggggtgagatttgagaggtacgttttggatataataaataagtttgttgttttgtttagaaagggattcgggatttttaattttattagagttttaaaagtattagtttaaagttaaagttagatatacgtaaagttgtagttttcgggggaatttagagtttaaaaataatattttttttgatttaaaaattataagggaatatttacggtatattttttgattaaaaaaggaaagtgaaaaataaggtttttttttttttttttttaattattataaaattaatttgtgtttattttattaagttacgatttttgttggttttaagcgagtttaatttatgttggttatagatacgaggggtcgggaagtttgggtatgttttagtgaattgaatcggttttttttgaatggttgttattttttttttttgttttttttagtataggaaagttattaaggagtcgtttacgttagtatatttattatttagatttttagggtattgtttatttgagaggttagatatagcggggtttattaaagttttaaagtagtagtaataattttttaatcgttgtttttgagatagatgaagtatttattatgtgataggtattgtgtttgggattggggatgaagtaacgatgaaggagatgaaagatgaatgtgtggtaggggggtggatgagtaggtgggtgaaggggttggaagggaggaggaaaggaagagagaatatatattaggttatggaaaaaaagaaataaatagaggttaggtatggtggtttacgtttgtaattttagtattttgggaggtcgaggtaggtagattatttgaggttagattattggttaatatggcgaaattttatttttattaaaaatataaaaattagttaggtatggtggtatgtatttgtagttttagttgtttaggaggttgaggtatgagaattgtttgaatttagggggtggagtttgtagtgagttaagattgagttattgtattttagtttaggtaatagagtgagattttattttaaaataaatatttaagtagaaagatagatgatggtaggagagaaaggggatttattttggtaggagaattaggggaagttgttttgaggaggtgataattgagttgatagttgaatgaagtagagaaagtagttatgtggatagttgggaggagtgaaaggtacgtgtaaaggttttgaggtaggagtttatttggagtgtttgaggaatagtatagaggttattagtaggtgggaatggagtgagggagtgagtgagtgaggaagagaggtaggtagggatcgggtgatacggtttggtttacggtgaggagtataaggttattttgtatttatatttcgggaggggagatataggagggtttagaatgggggtggtgtagattaaggtatattttgaatagattttttggtagttgtgtggggagtagatgaatgaagggtgtaagtgg

SEQ ID NO: 2190 - DNA, 2463 bp, Artificial Sequence
  chemically treated genomic DNA (Homo sapiens)
ttatttgtattttttatttatttgttttttatatagttgttagaggatttgtttagagtgtattttggtttatattatttttattttgagtttttttgtgttttttttttcggagtatagatgtagagtagttttgtgttttttatcgtggattaggtcgtgttattcggtttttgtttgttttttttttttatttatttatttttttattttatttttatttgttaatggtttttgtgttattttttaaatattttaggtaggtttttgttttagggtttttgtacgtgttttttattttttttagttatttatatggttattttttttgttttatttagttgttagtttaattgttatttttttaaagtagttttttttgatttttttattaaaatagatttttttttttttttgttattatttgtttttttatttaggtgtttgttttgagatgaagttttattttgttgtttaggttggaatgtagtggtttaattttggtttattgtaagttttattttttgggtttaaataatttttatgttttagttttttgagtagttgggattataggtgtatgttattatgtttggttaatttttgtatttttagtaaggatggggtttcgttatgttggttagtgatttggttttaagtgatttgtttgtttcggttttttaaagtgttgggattataggcgtgagttattatgtttggtttttgtttgtttttttttttttatagtttgatatatgtttttttttttttttttttttttttttaatttttttatttatttatttatttatttttttgttatatatttattttttattttttttatcgttgttttatttttagttttaagtatagtgtttgttatatagtaggtattttatttattttaagaatagcggttgagaggttgttgttgttgttttgaggttttggtgagtttcgttgtgtttggttttttagatgaatagtgttttgggagtttgggtgatggatgtgttggcgtaggcggttttttggtggtttttttgtgttaaaggaagtagaggaaggaaatgataattatttagaaaggatcggtttagtttattaggatatgtttaagtttttcggtttttcgtgtttgtggttaatatgaattgggttcgtttgaggttaatagaagtcgtgatttgatggaataggtataagttagttttatgatgattaagaaggaaaaaaagaaaattttattttttattttttttttttaattaagaagtatgtcgtgggtgtttttttgtggtttttgagttaaagagagtattgtttttgagttttgagttttttcgggggttgtagttttgcgtgtatttaattttaattttgaattaatgtttttagggttttggtgggattgggggtttcgggtttttttttgaataaggtagtaggtttgtttattgtgtttaaagcgtgttttttagattttattttattttttttttgtttttaatcgttttttttttggttaatttgtttttttttttagtagtttttttttattttttcgtgagtaaaggagggggaaggatttgttttggtggaaggcggtggttgtagaggttgggtttaggcgaacgtttattatggggggaggcgtggaataagttatgagtatttaaatgtggttttgtttgtagggattgaataagggtggtttggggttggatcgggggttttagttaagtaatattggggtgaaaaatgtagaaaagttttgtgtaaaaatgggattatattaagtttatgtattggttttaaagtaatttcgtgattatgtttttagagtaagtgtttatatatttacgtggattcgtttttacgtgtattttttttttgtatttattttttggtggattgttattttttttgttgcgggagggagaagaatgattggtttaagtgtattttgattttggattcgaagttgttgaagtcgtgaggtagatatattgttgcgtttgttttgggtagagatagagtttcggagggtgtttggtttggtagaagttagattttgggaagtttgttgggatttgttagtaatttgggtgttagttttagtttgtaattaagtttttgtttttttttagggttaggatgggagtgatattttttagtgtggggttttgtagtattatttgaagttttttgtagaattttattaagttgcggagaatggagtggattttagtttttgttattttgtttggggttttttagggttgtcgcggtagttaggataggtagtaatgtttatttagttaatagatgttgaatgtgagttgtgtattttggatagagggagaaatgagattaatttttgtttttagggagtgtttagtttgttgggagaaatagacgggaaaataattgaggttataaggggattggttgaataaa

SEQ ID NO: 2191 - DNA, 2493 bp, Artificial Sequence
  chemically treated genomic DNA (Homo sapiens)
tgaagttattttttttcgttttttggtttttagaggtttttaaatatgttgaatttatatagggttttgttgttgtagtttaattttagttgcgggagttttgggtagttttgtatttgttttaataaaaagtggggaagttgtgtagttttgttaatgaatgttttgggtttgttatttttttgaaggaaaagataatttgtattttgattattttttagaaaggattgggaagaaatattttaataatgtaattttttaaatgaaatattttattttgaaattaatttttaatttaaagttgtaaaggtattatagagagtttcggtatatttttttattgagttttagttttttaagtagtaaaattattaaataattatagatgttaaaattggggaaaagatttagttttagattttatttatttttaaataagtttggtgtatttatttaaattttattgatttttgaaagagggaggcgtatatatatttatattttggggattatttttttgatatttaaaataatatgggtagtttaattttagtattttaagattaagtatttaaaaattgaaatttggattaatatattaacgtaaatttttatttggttaatataataaaaataagagttattatttgttttatatttattaggtgatagtttttgcgtatgggtgatatgatttttatttttttagaatttgttgaggaagagatttttttgtagtttttataaaatgaggatataaatgtagagatgttaagtaatttgtttaaggttatatagttaatgtgttgttatagtggaaatagatatataggtttaggttgtgtttaaagagaattattgtggatgtcgttttaattttttttgttaagttatatttattgttgttatcgagaattttcgttatacggtagtgaagtttttaattttttattttatatattatttagaattagttgtaaagtgttaggagatttggttaggtagttttaagtattagcgagggttggaagtttttattgtgaagttttttatagaaagtcgcggttggtagttttcgtttttgtatgggaataaattaatattggtattttaaatataggaaaggaaggaaattggaaatatagtttatatttggttagttttttgaaatattgtattatgttatcgatattaattaatgaaaagtagggttgtgtgagaggttttggtttggaaatgtattaatatacgtttaatatgtttgtataggaatcggattatatgtattttggttttaaaataataaagtaattattttaaagttggtgttttcggagttgttattaatttaatttattttacgcggattagtataggttttgcgcggttttttataatgtttttcgatataaatgttgaaaaggcggtattgtatatgtttgtttgagtttcgtataagtaagtgttaaattttatgtattttaatatttttttaaattataaatattttattttggagcggaaaaaaatatatagtagtagttttagtattttttggtattgttattttagtttgagtttgagtaattttttttttgtcggggaagtttaaatgaattatttgttttatattaagaaatattaagttatattttttgttaattattatttgttagatgttatttgttgtaaaattcggaatttaattttagtttgaatatatagttaatattaaacggtttattaatagtcgcggtcgtatatgggattatttgtagtgaataaacgttttttttttataaattgttttagggattggaaagaaaagtatgtgaagttttggaataaataaagtatcgtgttttgagttgtttagtatatgatttttgtatgttgtgagaataggtttaaaatgatttaagagtaagtgtttatttcgtaattttgtaagaatgttttcgagaaaggattttagatgatgtaggtaaattttattgtttttgatttgtaatagaaagaattagttcgttttttgaaggattagtatttttagttattgtttttatatatatgtttatttgtatttggaatttagggtttaagtaatagatattacgggtgtttttttttcgtttttggtgacgttatttttttagtttaattttacgttgatttgggatttattaagttggagtaatttgagtgtgtaaagttaaatgtgttattatttttattataaattaatagtttttatgtaaatattggtagttttttattttatgaaggcgagagaaggtaaaatggtatcggcgtatttgatttaaattaattaaaagtagagggttgtgtaatttaatatattgattttattagtgggatttaaattttttataataagtgtatatagttgtagtgtttttttattattacgttgtaaaggttaattcgtatattttttttgataataatatgataggttttatatatttttgt

SEQ ID NO: 2192 - DNA, 2493 bp, Artificial Sequence
  chemically treated genomic DNA (Homo sapiens)
gtagggatgtgtgggatttgttatgttattgttagaaggaatgtgcggattagtttttatagcgtagtggtgggagagtattgtagttgtgtatatttattataaaagatttaagttttattggtaaaattaatatattgaattgtataattttttgtttttaattagtttaaattaaatgcgtcggtgttattttgttttttttcgtttttatggggtgaggaattattaatatttatatagaaattgttaatttgtggtgaaaatgataatatatttagttttatatatttaaattgttttaatttgatggattttagattaacgtggagttgagttgaggagatgacgttattaggagcggggaggagatattcgtgatgtttgttgtttggattttggattttagatgtaggtggatatgtgtgtagaggtagtgattggggatgttggttttttaagaagcgagttggttttttttattgtaggttaaaaataatgagatttatttatattatttaaaattttttttcggaagtatttttataaaattgcgaagtgggtatttgtttttgggttattttgagtttgtttttatagtatgtaagggttatgtattgggtagtttaaggtacggtgttttatttattttagagttttatatgtttttttttttaatttttgaaatagtttatagaggaagggcgtttgtttattgtaaatgattttatgtacgatcgcggttattagtgagtcgtttggtattagttgtgtgtttaagttgggattgaatttcgggttttgtagtaaatggtatttgataaataataattgataaaaaatgtgatttggtattttttaatatggaatagatagtttatttaagttttttcggtaaaaaaaaaattgtttaaatttaaattgaaatagtaatgttagggaatattaggattgttgttgtgtattttttttcgttttaaagtagagtgtttatgatttggggggatattagagtgtatgaagtttgatatttatttatgcgaaatttaggtaagtatgtgtaatatcgtttttttaatatttgtgtcggaaggtattgtggggagtcgcgtaaagtttgtgttgattcgcgtggagtggattgaattaatgataatttcgagagtattagttttagggtaattgttttattgttttggagttagggtgtatataattcggtttttgtgtaaatatgttgaacgtgtgttaatgtatttttaaattagagttttttatataattttgttttttattaattgatgtcggtagtatggtatagtattttaaagggttggttaagtataaattgtgtttttaatttttttttttttttgtgtttggaatgttaatgttaatttgtttttatgtaggagcgggggttgttaatcgcggttttttataaagggttttatagtgaaggtttttagttttcgttgatgtttggggttgtttggttaagttttttgatattttgtagttaattttgggtgatatatggggtgggggattgggggttttattgtcgtgtaacggaagttttcggtgatagtagtgggtgtgatttggtaagggagattggaacggtatttatagtgattttttttagatatagtttaaatttatgtgtttgtttttattatgatagtatattagttgtgtgattttgggtaagttatttaatatttttgtatttgtgtttttattttataaaggttataagagaattttttttttaatagattttaaagaaatagaaattatattatttatgcgtagaggttgttatttagtaggtgtaaaataaatggtagtttttgtttttattgtgttggttagatgaagatttacgttggtatattagtttaaattttagtttttaagtatttaattttaaaatattgagattaaattgtttatgttattttaaatgttaagaaaatggtttttagagtgtgaatatgtgtgcgttttttttttttagagattaatggaatttgaatgaatgtattaaatttatttgaggatgaatagagtttaaggttgaattttttttttaattttagtatttatggttatttaatgattttattatttgggaaattggaatttagtgagagggtatatcggaattttttgtagtgtttttgtaattttgaattaaaaattaattttaaaataaaatgttttatttaaaaaattgtattattgaagtatttttttttaattttttttggaagatggttaaagtataaattgtttttttttttaagggagtgataagtttaaagtatttattaatagaattgtataatttttttattttttattggagtaggtgtaaggttgtttaaggttttcgtagttggggttaggttgtaataataaagttttgtgtggatttagtatgtttagaagtttttagagattagaggacgaaagagaatggtttta

SEQ ID NO: 2193 - DNA, 2396 bp, Artificial Sequence
  chemically treated genomic DNA (Homo sapiens)
cgggtgggggtcggggagttaggggtttagttgggaggggggtagggtgatttttttttatttcgtagttttcgttttagaagggaattcggaagtttgttttttttttgatttgaatatgtagcgggtttggaagttaattgaattttttaagtttattgggttgtgtagttgtttaagaaggaggggggttttgagaatcgtttttattatttattgtagagtttgaaggagttaaagtgggattattttttggttgttggtaggacgatgtttatttggtttttgtatcggtttttgttgggcgggtgatgggtgattggggggttcgggagattttttatttttatagtttgttagttttttattgcggtaataatgatttagtcgttatggtaatgaggttaattaatgtatttatttggtagaattaaaatttcggacgtatttaattagttttgatatttttatttttaagaagttaatttttggtgttttatttgtttaggtatgtaggtatgttataaaataaaatattgttataaaaggaggagttgtaagaagaaatgggggaagttgtggggaggagttgggaggggggggtttttgtttattttttagagagaagaaaatttggaatgttattttttttttttcgatgatggtataaaattagtatagttaagtaaatgtgttataaatataaagatgttgttaggaggtaaagtgtttttatttaaggagaggaagaatggttgaggggttttagaaagggggttgggtggttaaacggttggagggggtgtcgtttgtaatttttttaagtattgtaattagagggaaaagttatttttttcgagaacgtgtatttgtagaacgtttagatagttataaagaggataattaaaaaaagaaaaaagttgtaagtcgtagttatttttttcgttagggtatttattcggttgtaatttttagttaattgttcgagtaggtgaaaaattataaaagtaagaaaagttagtgtgggttaggaggaggtcggggagtttgggtcgaaaatagtttatgagtaagtgttttgaaatttcgttttaaataagtcggtaaatgaatttaattttgttagatttttttttttttacgtagattaaatatttcgttggcgtgttgtttagatatagataataaaggattttttatagcgtatagagacgcgttgataaagtagttatttaaagatgtagtattgttttttcggtttaaaacgatttgttagatggatttaaatgaaaatgttaagttatcggtttggtttggggtttgttggtggattggttggggggagggggttggttgttttagagaattagaaattattatttgtgattgggttgttttttaggtcgtttttaaaataggattgtacgtggtcgtttagtaaataattttggttttttttgttttgggaaggcgtttgttaagatgtttttaatatttagtagtagtaattttgttgtagtattgtttatttaaagggggcgtgtggtaaaaaaaggttatatgaaaatgtatgggggagaatttgtttttatttgtttcgggtggattagaattaagaggagaggaatttggttttatttttaattttgtattttagttttttttatataaagggttattataaaatgagttattttttttttttaggaaagaaagatagggttggaggtgggttggttgtaagggtgtggttcggggatatatttagggtgatatttaaatattttttaaattggggagtgggtttttatgtagttaaggttttaagggaggaagaatagtatttaggagtttttagagttttaatataagtcgtgcgttgattttttttttaggttatatttcggggtagtcggataggggtggtttttttaaatgggggaattagtttttttttttgggattgttagtttttaatttagagaaagatttgttgtttgttagatgtttagtgagggtttatttattttagcgatttttttttgatggggtgtcggttaagcggttattttttttttatgtttgttttgtttatggtagtttttatatgagattggtttgtttttttttttttgttttttttttttgtttttttttttttttttttttttttttaaatgttgtaaagtttagacgttggaattagataaagtttatttttattatttttaggttgtgtggtttaagggaagttatttttttgagttttagtttattttgttgtgaaatggggttttaattatttgttttaaagagttgttgtgaggattaaatgtttttgtgtattaaatttattaattagttattaatacggtatttatcggttttttttaata

SEQ ID NO: 2194 - DNA, 2396 bp, Artificial Sequence
  chemically treated genomic DNA (Homo sapiens)
tgttgaaagaggtcggtggatgtcgtgttagtggttggttagtgggtttaatgtataagggtatttaatttttataatagttttttaggataggtggttgagattttattttatagtagggtaaattgaggtttagggaggtgattttttttggattatatagtttgaaggtggtggagatgggttttgtttggttttagcgtttgggttttataatatttgagagagaaaaaggaaggaagggaggataggaaggaaagatagaggaaggagagtagattagttttatatagaagttgttatgagtagggtaggtatggaaaggaagtgatcgtttggtcggtattttattagagaaaggtcgttggagtgaatgagtttttattgggtatttggtaggtagtaggtttttttttagattggaagttgatagttttaggggaagaaattagtttttttatttaggagaattatttttgttcggttgtttcggagtgtaatttgaaggagaggttagcgtacggtttgtgttgaggttttgggagtttttggatgttgtttttttttttttggaattttggttgtatggaggtttattttttagtttagagggtgtttgggtgttattttgagtgtgttttcgggttatatttttgtagttagtttatttttaattttgttttttttttttgggaagggagggtgatttattttatagtgattttttgtatgagaagggttaaaatgtaaagttggaggtgagattagatttttttttttttggttttggtttattcggagtaggtggaaataagtttttttttatgtatttttatgtaatttttttttgttatacgttttttttaagtgaatagtgttataataaaattgttgttattaggtgttagagatattttagtaggcgtttttttagaataagaagagttagaattatttgttgggcggttacgtatagttttattttaagagcgatttggagggtagtttaattatagatgatggtttttagttttttggagtagttagttttttttttttagttagtttattagtagattttaaattagatcgataatttagtatttttatttaagtttatttgataaatcgttttaggtcgagaaagtaatattgtatttttaaatggttattttgttagcgcgtttttgtgcgttgtaaaaagttttttgttatttgtgtttagatagtacgttagcggaatatttggtttgcgtgaggggagagagatttgataaggttgaatttatttatcggtttatttaaagcgggattttaaaatatttgtttataaattgttttcggtttagatttttcggtttttttttagtttatattggttttttttgtttttataattttttatttgttcgggtagttagttggaggttgtagtcgggtgggtattttggcgaggagagtgattgcggtttgtagtttttttttttttttaattgttttttttatgattgtttagacgttttgtagatgtacgttttcgggggaaatggtttttttttttggttatagtatttgggagggttgtagacggtattttttttaatcgtttgattatttagttttttttttaaaattttttagttattttttttttttttaaatgaaggtattttgttttttggtagtatttttgtgtttataatatatttatttgattgtgttaattttatattattatcgaaaaaggaaaagtgatattttaggtttttttttttttgaggggtgggtagagattttttttttttagtttttttttataattttttttatttttttttatagtttttttttttgtggtaatgttttgttttgtggtatgtttatatgtttagataaataaaatattagaggttggttttttaaggatgaaaatattagggttagttgaatgcgttcgaggttttagttttgttaaatagatgtattaattaattttattgttatagcgattaggttattgttatcgtagtgaaaaattggtaagttatgggggtggagggtttttcgggttttttaattatttattattcgtttaataggaatcggtgtagaggttaaataggtatcgttttgttagtaattagaaagtggttttattttggtttttttagattttgtagtgggtggtgggggcggtttttagagttttttttttttttaggtagttatatagtttagtggatttgggaaatttagttgatttttaggttcgttatatgtttaggttaggagggaagtaggttttcgagtttttttttggagcgagggttgcggggtggagagaagttattttgttttttttttagttagatttttaatttttcgatttttattcg

SEQ ID NO: 2195 - DNA, 2500 bp, Artificial Sequence
  chemically treated genomic DNA (Homo sapiens)
ggttttttgttcgtggggattttgttaggttgtttagagtagttttttagtgttatttttttttttattttttttttttttggggtttagtcgtttttagttttagtgttgttttttttaagttggatgtaatttagtttttgttttttatttgttattttatttgtgtagttaatattttatgtacgttttttatagtgtagaaggaaaatataattttaatttgattttatttagtgatgttaaatattgtatgtgaatatttttatttagaagtttatttaatgtagatttattaaaaagtaggagttttaaatgtttgtattgtgtaagtatttttagtatattgttatataggtgtttaagagtgttttaagagatatttggaaaattggttggggattgtttttgttggtttgggaatgtattattatttttttttagtttatataaaggggtgaagttttgatgtttggaaatttgttttttaaagtgtttttaggaattgataatatttggataatgaggggtgtttgtattttttttgatttaaattgttggtagagggggatatttttgtatgattgggtaaggttaaatatagaattaaattaggaagaatagggtttgatatgatgaatttttgtttcgttttgttattgataagagatagaataaatgtttttaaagaattttgtattatgaacgtttgatggtaattttgttttagggttttgttgttcgttgttaggtagtaggtatattatttagggtcgtggggaaggcgttttgtagttatattgtagtaggaggttggttatatttacgggttttattaagttaggatgtagagttcggttcgttttatggtataggttcgggttgttcggagtttataatgaattagagttatagttgattatttttaaggttggcgtttacgttgggtgtttgagaagacgatgaatttgtagtgtcgaagtgttgtttggttttttaggaattagttgtagttgggattttttgtagtttttttcgtagtaagttggggtagttatgagttttgtttgtttaacgtggggttaggcgggtatgtttgttgtgtttggtagttttgatatttttagattttgttggaagatgttcgtggtttgaaagtttattttgtagtcgttttattttgggatgtagtttttgtattggtaggattaacgtaaatagaatttgtttggtttatttttcgtcgggttttaataggtttgtaacgttattgtttgttagggagagttattcggtgatattgttaattaaaattatgattttgggggtaagaaaaaattttaaaacgttgaagttattttttttaatagaaattttattttgaaggtgtttacggaggttaggttgattagaaaaatttataagttataaataagtttaaatagttttatttaatttatttaattcggtgtttggagtttttatggggagaggtgtttggtattaatatagggtgggggtggttatttttatttttagtttttgggttttagagttgagaggagggagagaattgaatttttttggaagaatgtggaattgttgagtagatgttttggaatttgttgatttaggtatttgggagtatagtttgatcggttatttttgcgttaagttatttatagtttaatggttatttttaattggaaatttattttaaagtggtggtagtgacgggggagtggttgtatttgtaatttattattttatatagagaattttttttttttatttttttttggttaaagttgttgttttgaacgtgggtgggttttggagtttaagattgagttggttgtttggagaaaaattggagggatttgaaaaggttcgagggagggtgttttttgagttgggggtggtagaaaatattttaaatgtgtaggtttaagttttttgtagtgaagggaataggattttggtttcggtagatttaatttagtttttgggtttttgggttaatttgtgaaattatttttttttttaggattgggagagaacggttttaaataagtgtaatttaatttttttgattgtggttttttttaatgaaaaattaaaatttatttttttttttgttagttttttattgaaagttataagaaatgaggttggggtggagggtttggagttgttatggaagtatgatgtttagaatttattatgggatggatggttattggtgttacggattgtggtgtagatattgttttttgtgttaggatgtggtttggttttgtatttttttgtttttgaagttgtgtttgtttgtgatttgggagtggtacgaatttatagaatttagtttattttgtaggaagtgggagagtttttcgggtattttggtgttgaggaagtatagtttaaagaggaaatttttttgaaatttatatagatttttttttagaatgttttggaaggaagtataattttaagagga

SEQ ID NO: 2196 - DNA, 2500 bp, Artificial Sequence
  chemically treated genomic DNA (Homo sapiens)
tttttttgaagttgtgtttttttttagaatattttggaaggaggtttgtgtggattttaaggaaattttttttttaagttgtgtttttttagtattagagtattcggggagtttttttattttttgtagggtgggttgggttttgtgggttcgtgttatttttagattataggtaggtatagttttaaaggtaaaggggtgtaggattaggttatattttggtataggagataatgtttatattatagttcgtgatattaatgattatttattttatagtgggttttaggtattatgtttttatagtaattttaggttttttattttagttttattttttgtgatttttaatgggaaattagtaggagagagaataaattttggttttttattaaagaggattataattaagggaattaaattgtatttatttaaggtcgtttttttttagttttgaggggagaggtaattttataaattagtttaagaatttagagattgagttaggtttgtcgaagttagagttttattttttttattgtagaaggtttgggtttgtatatttaagatgttttttgttatttttaatttagaggatattttttttcgggtttttttaaatttttttaatttttttttaagtagttagtttagttttgggttttaagatttatttacgtttaaagtagtaattttggttagaaaaaaatgaaagaagggaattttttgtgtgaaataatggattatagatatagttattttttcgttattgttattattttaaaatgaatttttaattgaaaatagttattggattatagatagtttggcgtagagatggtcggttaggttgtatttttagatgtttgggttagtaaattttaaagtatttatttagtagttttatatttttttaagaaagtttagttttttttttttttttagttttgggatttaggggttagagatgagggtggttatttttattttgtgttgatgttaggtatttttttttatgaggattttaggtatcgagttaagtaaattaaataaaattatttgagtttatttatggtttgtgggtttttttggttagtttgattttcgtgagtatttttaaaataagatttttattagggaagatgattttagcgttttaaaatttttttttgtttttagagttatggttttaattaatagtattatcgagtggttttttttggtagatagtggcgttgtaggtttgttgaggttcggcgaggaatgagttaagtagattttgtttgcgttaattttgttagtgtagaagttgtattttagggtagagcgattataaaatgagtttttaggttacgagtattttttagtagaatttgggggtgttaaggttgttagatatagtaggtatgttcgtttgattttacgttggataggtagggtttatggttattttagtttgttgcggggaaggttgtagagaattttagttgtagttggtttttgagaggttaggtagtatttcggtattgtagatttatcgtttttttaggtatttagcgtgagcgttagttttgaaaataattagttgtggttttaatttattataagtttcgagtagttcgagtttgtgttatgagacgggtcgagttttgtattttggtttggtggagttcgtagatatgattagttttttgttgtagtgtggttgtaagacgttttttttacggttttgggtagtgtatttgttgtttgatagcgagtagtaaagttttgagataggattgttattaagcgtttatggtgtagggttttttgggggtatttattttgttttttgttaatggtaaggcgaggtagggatttattatgttagattttgttttttttgatttgattttgtgtttgattttgtttaattatataaaaatatttttttttattagtagtttaggttaaggaaagtatagatattttttattatttaaatattgttaatttttggaaatattttggagagtaaatttttagatattagggttttatttttttatgtgaattgggaaaaaataataatatatttttaggttaataaaaataatttttaattaattttttaaatattttttaagatatttttaaatatttatatagtaatgtgttaaggatgtttgtataatgtaaatatttaggatttttgttttttgatgagtttatattggatgaatttttggatggggatgtttatatgtagtatttaatattattgaatggagttagattagaattatgttttttttttatattgtaagggacgtgtataaaatgttaattgtataaatgaggtaataggtaaaagatagaagttaggttatatttagtttgggaggggtaatattggagttagaaacggttagattttaaggaaagggagggtggggaggagagtgatattgaggagttgttttgaataatttggtaggatttttacgggtagagagtt

SEQ ID NO: 2197 - DNA, 2495 bp, Artificial Sequence
  chemically treated genomic DNA (Homo sapiens)
ggttttgtcgggtattaattagtcgtttgtgtgtggttttgttttttgttattttgttttgacgttttttttttgtcgatattattttgttttgatttttgtgcgttttaagtgaattttgaaatttggtagcgttagttattcgattttattttttttaaaattgttttggtttttttaggttatttgtatttttttatgaattttagaatttatttgttatgtaaaaaaaaaaaatttgttagaattttgattgggattgttaaaattatttttaaaaattattgaagttgattttgaaatgtagtatgtaagggtttgggtgtgtaatttgtacgtgagttttagtgtataaaagaaagtgagagttagtaagtcgggttagaggggataaaggagagagtggtggcgtatgtgtttaggttttcgtcggtttttgagagtttttttttttttagagtgattatagggtgggtaggaggttttttaggatttttggagggtgtgtttttttattaataatgataaagggtgtgatgtagattttttaattttattatatgtgaaaagagtgtttattgttgaaaggattaaataagataagacgttgagtagttgagttgtaaatgtttgtggattgaagtttaaagttagtttatatagatttatttatttgtttattttttgtcgtggttttttgtgttttagttattattatcgttttatggcgtatggttgacgtgttgttttgtaaagggttaggcgttattttttagtatgtattattttttattggtttcgtttttggggtttatgatatatattatttggttatttttattttggagtattataggttaaattagttagtaattcgtggaattaatttacgagtggtgtttatttttggataatggtttagtggaggggttggtttgtagtttatatttattatggttttgttgaatggtgttcgttagattttgtataatcgaatttagtttagttttatgaaggttttgtataagttagtttttttttttcgttatttgatggaataatagatttataggagaatttatttgtaattttaagtttcgagttaaagacgttttaagggatgaacgtgggtgatttgtggaatattgcgatgtatttatgagatagattgtacgtttatcgcggcgtttaaagaaattagatcgggttgtattagaggcggtgttgtaattcggttgttttttgggaaagaatgtaagtttttagtgtgcgaagtatgaggggttgtagaggaaattgttttggtggttttggttttgggagtaagtatttgtttttcgtttatttaagtatattagcgagttttataaatatttaagtggtttacgagatgttttatttttaggtttcgttttatttttttcgttgttatatagaggttattagaaattacggttttttgggtttgatagttaggtagataggattaggttaggttgtagttgttaatttttgcgttggtaatttttagattttttgtataatgttatcgtttagttatttttttttgggttgtttgtttttatggggtttttgtaattaaaaaaaataataatttatttttattttttttttttaatatgttttattaataattgtgtaaatttgtttattttttaggattttattatgatgtaaagtagataaaataattaatttgttttttttttttttggtatatgggtgttttgtagtttttattttttttaattttcgttttacgtttacgagtatgaagttgaattaatttatgttttgttgaagtcggattgtgagattgtgtaggtagacgtggttttttttttgagtttgtaaagtagtagaatttatgataatgggtttcgtagtaatagggattgattgcgttatgttgtttttgtttatttttatagcgtttaggagtttgtatgttattattgggattattttatagaaaatagaggtttttaggggtaacgtaatttgttttaggataggtagttataaggtagagaaaggagggttggatttgtatttgtgaaattatagttttggggtatggtttttgagatttatagttggggttgaagatttttaggggggttttgttgggtttattgttttttagagtggtttagttcggttgtagggtgttgtttttagtttggtgtattgcggtcggaggaggtggaggatggaaagtaagatttaaagatagggagtgtaaggggatagtgatatttgaggatttcgaggaggaagtaggagaattattcggaatggttagtttgggtcgagtttgggttaatatttgggttgagtttagtttatagagcggttttcgggtttttgtatttgtaggaggttagagttgtttttatttttaaatgttagatgaggtgttagtatttggataggagacgttttgtagttagtttatagatatgagggtgtcg

SEQ ID NO: 2198 - DNA, 2495 bp, Artificial Sequence
  chemically treated genomic DNA (Homo sapiens)
cgatatttttatgtttgtgagttgattgtaggacgttttttgtttaggtgttggtattttatttaatatttgaaggtaaaagtagttttggttttttgtaggtgtaaggattcgggagtcgttttgtgggttgggtttaatttaggtgttggtttaggttcggtttaggttggttatttcggatgatttttttatttttttttcggagtttttaagtattattgtttttttgtattttttgtttttgaattttattttttattttttatttttttcggtcgtagtgtattaagttggaagtagtattttgtagtcgggttggattattttggagagtagtgagtttagtagagtttttttagggatttttagttttagttatgagttttagaagttatgttttagggttgtggttttataggtgtaggtttaatttttttttttttgttttgtggttgtttgttttggggtaggttacgttgtttttgggagtttttgttttttgtaaaatggttttagtaatggtatgtaaatttttgagcgttgtaaggatggatagagatagtatggcgtagttagtttttgttattacggaatttattgttatgaattttgttgttttgtaggtttagaagaaaagttacgtttgtttatataattttataattcggttttagtaaagtatgagttaatttaattttatattcgtgaacgtgaagcgggggttggaaggaatgaaggttgtaggatatttatgtattaagaaaaagaaagataaattggttgttttatttattttatattatgatggagttttaaaaagtaaataaatttatatagttattaataagatatattaaaagaaaggagtgagaataagttgttgttttttttaattgtaggggttttatgaaggtaggtagtttagggaggaatgattggacggtgatattgtgtagggggtttggaagttgttagcgtaggggttagtagttgtagtttggtttggttttgtttgtttggttgttaaatttagaagatcgtggtttttggtggtttttgtgtgatagcggaggaggtggggcgaggtttggaagtgaagtatttcgtgagttatttaagtgtttatgaagttcgttaatgtgtttaaatgaacgagaagtaggtatttgtttttaggattagagttattaaagtaattttttttgtagttttttatatttcgtatattggaagtttgtatttttttttagaggatagtcggattatagtatcgtttttaatgtaattcgatttggtttttttgagcgtcgcggtgaacgtgtaatttattttataaatgtatcgtagtgttttataaattatttacgtttattttttgagacgtttttaattcggggtttagagttgtaaatgaatttttttatggatttattattttattaaatagcggagagaggggattagtttgtgtagagtttttatagagttgggttaaattcgattatgtaaagtttaacgagtattatttagtaaaattatggtgggtgtgagttgtaggttagtttttttattgggttattatttaggggtaaatattattcgtgggttagttttacgagttattggttgatttgatttgtgatattttaaggtggaagtaattaaataatatgtattatgagttttaagaacgaagttagtggagagtggtatatgttagagggtaacgtttggttttttgtaggatagtacgttagttatgcgttatgggacgatggtggtggttgggatataggaggttacggtaggaaatgggtaggtgggtgggtttatgtaagttggttttagattttaatttataagtatttgtagtttaattatttagcgttttattttatttaatttttttagtaataaatattttttttatatgtagtaaggttaaggagtttatattatattttttattattattaataaagggatatattttttagggattttagggaattttttatttattttgtggttattttagggaaaggaaagtttttagggatcgacgggagtttgggtatatgcgttattatttttttttttattttttttagttcggtttgttggtttttatttttttttgtgtattagaatttacgtataagttgtatatttaaatttttgtatgttgtattttagagttaattttagtgatttttgagagtgattttgataattttagttaaaattttagtaggttttttttttttatatgataagtggattttaaaatttataggaaaatgtaaatgatttagaagagttaaagtaattttggaaggagtaaagtcgaatggttgacgttattagattttaagatttatttgaaacgtataggaattaagatagggtggtgtcgatagaaggaaggcgttagagtagggtgataggaggtagggttatatatagacggttgattgatattcgataaaatt

SEQ ID NO: 2199 - DNA, 2500 bp, Artificial Sequence
  chemically treated genomic DNA (Homo sapiens)
ttgtcgcgtttgtgatatttcgtttggatagtggtagtaggttttttattggtttttagtttttattgatattgatttttattatagaagttagagtatgttttgaaatcgtttaggtttttttttatagttttgtttagagtaatagtttttttagatttatagagttttattttattttttttatttttattttttattgtttgtttttttttaggttttttagttttattggtttttttgtaggtttttaagtataataggtttgagggttattgcgttgattgttttttttgtttggaattggtatggttggtttttttattttttttaagtatttgtttaatgttatttttttagtgaggtttattttgattattttatttgtaattgtaatttttttatttttataattttttattttttttatttttttttgtttttttatgttatttattattttttaatatatttattatggtgtatagtattaattgaataaaatttagtaggggagataggtaataaataagaaaataaaagtatgagtataggaaagtttattttagtagtgagtgttttgatggaaataatattttagggatgggatagagattgtagggtaggttgttttataatggttttagaggagattattgagtagagatttaaatttgtgtttagaggcgttttgaggagtggagttgcggttgggggtgggaaggaaggttattttaggttgtaggaattgtaagggtaaaggttttgaggcgggagttaggtttatgggtagatgtttgaggatattttcggtttttagggttttttagaagttttagttttttgggtttggttgtgtatttttgcgatttttatcgtaggtttttttttttatttattagtgtagagtttgggggttgtcggtgggttttaggttagggaagtagaaatgggtaatttttagaggtagaaattagtcgatttcggtggttcggtgggtggttaataaagtttggttggttttcgcgggttgtgtaggagtttattttagggaggtatttagagatatttttggtttggttttgtcgggaaagtgggtcgagtagggagagggggattagagaggaagagatggatagagtttttcggacggtgggttgggttcgaggttcgcggatcgttcgaggggggtttttgggttcgaggtcgttcgtatcgattagtgttgtggttcgggtagtttatcgttttttcgggttttagtttttcgttttggtagatttcgaggcggtttcggagatttcgggtttggcgaatattgggcggggaggggcgttaattttagtttttcgggcggggtttttcggttttcgcggttacgttgtagtttaggcggaggcgcgggatttcgagttgggatcgtttttttgggtttcggtgcgatcggcggcgggaggtgagagtgggttcggcgggtttcgggaggaggtggttttagggaaggtgtggtcgcggggaagtggcggcgaatagtttcgacgcgaggacggggaaattaaggcggtagttagggagattttgatcgaggtgatttttgtttagggcgataatcgggttggggtttttcgtagtggttattggttcggcggtttcgtatttttagttcgttttttttttaataaaagaatttaggaagacggtggggcgggcgggaggttcggtgtgcggtggtttggtttttttattggtggagaggagggagcgtttttttttagacgcgggggaggggaggggttatggttttacgggttgtttattttttttttgtgttttagtgttgggtttaggatttttagtgaggttatttttttggtaaatatttgtgattttttttttttttttgggttttttttattggaatggcgtttttttttatttaggggtttggtttgtttttttttataatttttagtattatcggtttttatgttattttttattttattaattatttttttattaatttattagtatttattttgtttgtttatagtgtgtttttttttgtgggaatgtaggttttaggagggcgggagatttcgatttgtttattgatgtatttttattaatttaatagattttttttgagggtttttttgagttttgtacggtgttgggtattggggtttttttgggaatttagttgagttttattttagatattttggggttgggaatagtgttgtaaatatatatgatatcgtcgtgggatgaaggaaataaattagaaatgggggggtttattggttaggtgattttaggttaggttattttggtggttagggttattttagatgatatggtgattatggaaggttttttagattaggtgattttagttaaagttaggaagtgttagaagggaaaagttaggaattatgagggtatgtgtagttttgatttggatttaggtagggagttggggtttgaagagtaaagg

SEQ ID NO: 2200 - DNA, 2500 bp, Artificial Sequence
  chemically treated genomic DNA (Homo sapiens)
tttttattttttagattttagttttttgtttgagtttaggttagagttatatatgtttttatggtttttagttttttttttttagtattttttggttttaattgaagttatttaatttgggaggttttttatgattattatattatttaaggtggttttgattattaaggtggtttgatttaaggttatttgattagtagatttttttatttttggtttgttttttttattttacgacgatgttatatgtgtttatagtattgtttttagttttagaatgtttagggtggggtttagttaagtttttaggagaattttaatatttagtatcgtgtagggtttagagaggtttttaggagggatttgttgaattaatggggatatattagtggataaatcgaagtttttcgtttttttggagtttatatttttatagggggaaatatattgtaggtaaataaaataaatattaataaattaatgaaagaataattagtgaaataagagataatataaggatcggtaatgttaagggttatggagaaaaataagttaggtttttggatggggagagacgttattttagtagggggggtttaggaagggggaagagattatagatgtttgttagaggagtggttttattgggggttttgggtttagtattggggtatagggagggggtgggtagttcgtggggttatgattttttttttttttcgcgtttggggaagggcgtttttttttttttattagtaggggggttaggttatcgtatatcgggtttttcgttcgttttatcgtttttttggatttttttgttggaggagaggcgggttgggggtgcgggatcgtcgggttagtggttattgcggggagttttaattcggttgtcgttttaaatagaggttatttcggttagggtttttttggttgtcgttttggttttttcgttttcgcgtcggggttgttcgtcgttattttttcgcggttatattttttttggggttattttttttcggagttcgtcgggtttatttttatttttcgtcgtcgatcgtatcgaagtttaagagggcgattttagttcgagatttcgcgttttcgtttgggttgtaacgtggtcgcgggagtcgggagatttcgttcgggaggttggagttaacgttttttttcgtttagtattcgttaggttcgggattttcgaggtcgtttcgaggtttgttagggcgggaaattgaggttcgagagggcggtgaattgttcgagttatagtattggtcggtgcgggcggtttcgaatttagaggtttttttcggacggttcgcgggtttcggatttagtttatcgttcggaaaattttgtttatttttttttttttggtttttttttttttgttcggtttattttttcggtagagttaaattagggatgtttttgggtatttttttagggtgggtttttatatagttcgcgagggttagttaagttttgttggttatttatcgggttatcggggtcggttgatttttgtttttggaaattatttatttttgtttttttggtttgaaatttatcggtagtttttaggttttgtattagtgggtggaggaggaggtttgcggtgaaggtcgtaggaatgtataattaaatttaagagattggaatttttggaaggttttggaagtcggaggtgtttttaaatatttgtttatgaatttggttttcgttttagagtttttgtttttgtagtttttgtagtttagaatggtttttttttttatttttaatcgtagttttattttttaggacgtttttggatatagatttgagtttttgtttagtggttttttttgggattattgtaaagtaatttgttttgtagtttttgttttatttttggggtgttatttttattagagtatttattgttagagtaaatttttttatgtttatgtttttatttttttgtttattgtttgttttttttattaaattttatttagttaatattgtatattataataaatgtgttagaagataataagtggtatggaaaaatagaggagggtaagggagatgggaaattgtgggagtagggaggttgtaattgtaaatagagtggttagggtaggttttattgagaaagtaatattggataaatatttgaaggaaatgagggagttagttatgttaattttaggtagagggaatagttagcgtagtggtttttaggtttgttgtgtttgaggatttgtaagaaggttagtgaggttgggaggtttggggaggggtagatagtaggaggtgggggtagaaggggtgggatggggttttgtaaatttgggagggttgttattttagatagggttgtgaggagggatttgagcgattttaaggtatattttggtttttgtggtgagaattaatgttagtggaggttggagattagtgaggagtttgttgttattatttaggcgagatgttataaacgcggtaa

SEQ ID NO: 2201 - DNA, 2433 bp, Artificial Sequence
  chemically treated genomic DNA (Homo sapiens)
atttttagtttagaagggttttgattttagaattgggacgtaagggtggggagttcgagtttttattagtatttcgtttttgtatattttttgttcgttttttagtcgttataatttcgttttgtagtaggtttttttattaatatcggattttcgacggggaaggggttagttcggcggttttagaggttattgggttagaatacgtgtttcggattttacgtgcgcggaaaatgaattcgtattcgcgacgcggtcggcgggggcggatggtagcgagggtcggatagcgaatttttatttcgcggaggagtcggggtcggagttcgtacgtgggtttgcgacggtttcgttttttgggggcgtttttttagggattttagtttcggttggtgggttttgtaggttcgggttcgatcgcgttcgttaggtcgttcggaggtttcggcgagttcggcggaggcggcggttttttttcgttcgacggttacgttcgcgcggattggtcgtttttcgacggcggggcggggcgggacgggtcggggtagagttcgcggttaggtgaggcgtttcgtttttcggcggttttaggtgcggttgtgggatttcggatcgcggcggggtcggggttagggtcggggtcggggtcggggcgttatggtcgagttttagttgaattgtttggacgaggcgtacgtgaacgagaaggtgatcgaggcgtaggtcgttttttattattgcgagcggcggcgggtcgcgttggaggcgttgttgggcggcggcgagtaggtttatcgcgagcggtttaaggaggagtagttgcgggattttttttttagttcggagcgttaggttttgcgggtcgtttggagtttttacgaggacgtcgttttcgtcgttaacgttcggggtaagagtaaggttaaggttaaggttttcgcgtcggcgtcggttgagttcggcgagtttttggtttattggttcgatcgtttcgatatcgaggtgttttttttggatttgggttggacggatattggtttttatcgcggcgtgagtcgggttacgttttttatttattcgtttaaggacgagaaggcgtcgtattttaagtaggtggttaggtagatgatttaataggtttagaaggtaggttttcgttttcgtttttatatcgttgggatttcggttttagttttttggatcgggttttattttttaggtagggttcggggtaggtcgttttgagtattttttggaaaatgggttttaattcgtttttattttttggggttgtagtgaggtttgtagagcgaatggttgggaacgtgtttggtaaattataaggtgttggatagatgttagtcgtcggtattttagcgtttagaggtattggttttgttttgtatttttgaaatttttttgtttagtttttttttttagggaagattgggggtcgaggttttgtggttaaaatgtattatttaaaggttttgatgataatttacgtgttgtttagaatatatttcgagtcgtttttttatgtgatcgttaaaataattttagggagtgggtggcggtgattttttcggttttatttttgttatgttgttttttggattatttttttttttttatagttaaagttgagttggcgtttttatagttatagttttttttgggtcgggtattaggttttagttgtttggaatgaatgggggacggggtatattgaggatttattgtgtgtttggttttgtgttgggcgttttggtatagtaggttatttgattcggtagtttaggaaagggtttttatttagtatatgtgttttgtttgagagttggaaggaggggttgtttttagggtggttggtgaggttagtttattgtggaataggtggaagattttaatttttatgtttttgggtgggagttttgggtagtttttagattaaatgtaggatgttttattatatttgaatttttaataaataatatataattttttagtattagtttattttaaatatgatatgagacgtattgatattgaaaaatttttcgttgtgtatttgaaatttaaattgaatgggaacgttttgtatttttatttgttaattttggttgttttatattgagatttgttaagaaatagtagtagtttttggtgtttaatttagaataatataataggagtggtttgggtttattatttaaattttatttagtgagtgaggttggagttttggtttttttcgaggttgaagaggtttgaggagggaaaatagagttagaaagattagtgtttaggtttatttttttggaaggggtgatttaggtagttggggtgatttagatagttggttatattggttattagaaggaagggttaattttttattgcgtatatttttattttttttttttataattt

SEQ ID NO: 2202 - DNA, 2433 bp, Artificial Sequence
  chemically treated genomic DNA (Homo sapiens)
gaattatagagagggagggtagaaatgtgcgtagtggaaagttaatttttttttttggtagttaatgtagttaattatttagattattttaattatttaaattattttttttaggaagatgagtttgagtattggtttttttagttttattttttttttttaggtttttttagtttcgaggggaattaggattttaattttatttattgagtggaatttgagtggtgaatttaagttatttttgttgtattattttgaattgggtattaaaagttgttgttgttttttaataaattttagtgtagggtagttagagttagtaaataaaagtataaaacgtttttatttaatttgaattttagatatataacgaagaattttttagtattagtacgttttatgttatgtttgggataagttgatattaaaaagttatgtgttgtttattgaaagtttaaatgtagtggggtattttatatttgatttggaagttgtttaggatttttatttaaaggtataaagattaaagttttttatttgttttatagtggattggttttattagttattttggaaatagtttttttttttaatttttaagtaggatatatatgttaagtaggagtttttttttgagttgtcgagttaggtgatttgttgtgttaaggcgtttagtatagggttaggtatatagtaggtttttaatatatttcgttttttatttattttaggtagttggggtttagtattcggtttaggagaggttgtgattgtgagggcgttagtttagttttgattatgggaggagaggggtggtttaaggagtagtatggtagaggtgggatcgggaaggttatcgttatttattttttgaagttgttttgacgattatatgagaaagcggttcgggatatgttttgggtagtacgtaggttattattaagatttttgagtggtgtattttaattatagggtttcggtttttagttttttttggggaggaaggttggatagggaagttttagaagtatagagtagagttagtgtttttgaacgttggaatatcgacggttgatatttgtttagtattttgtaatttgttaaatacgtttttagttattcgttttataggttttattgtagttttaggaagtaggggcgggttggggtttattttttagagggtgtttagggcggtttgtttcgggttttgtttgggaggtggggttcggtttaggggattggggtcgaggttttagcggtgtgggggcgaaggcgggggtttattttttgggtttgttggattatttgtttgattatttgtttgaggtgcggcgttttttcgtttttgggcgggtgggtgaagagcgtgattcggtttacgtcgcggtagaaattagtgttcgtttagtttaggtttagaggaggtatttcggtgtcggaacggtcgggttagtaggttagggattcgtcggatttagtcggcgtcggcgcgggggttttggttttggttttgtttttgtttcgggcgttggcggcggggacggcgttttcgtaggggttttaggcggttcgtagggtttggcgtttcgggttggagaggaagtttcgtagttgtttttttttgagtcgttcgcggtaggtttgttcgtcgtcgtttagtagcgtttttagcgcggttcgtcgtcgttcgtagtagtagaaggcggtttgcgtttcggttattttttcgtttacgtgcgtttcgtttaggtagtttagttgggattcggttatggcgtttcggtttcggtttcggttttggtttcggtttcgtcgcggttcgaggttttatagtcgtatttggagtcgtcgaggggcggggcgttttatttggtcgcgagttttgtttcggttcgtttcgtttcgtttcgtcgtcggggagcggttaattcgcgcgggcgtggtcgtcgggcggggaggggtcgtcgttttcgtcgggttcgtcgggattttcgggcggtttggcggacgcggtcgggttcgggtttgtagggtttattagtcggggttagagtttttgaggggacgtttttagggggcggggtcgtcgtagatttacgtgcgggtttcggtttcgattttttcgcggggtaaaggttcgttgttcggttttcgttgttattcgttttcgtcggtcgcgtcgcgggtacgagtttatttttcgcgtacgtggagttcggagtacgtgttttggtttagtggtttttggggtcgtcgagttgatttttttttcgtcgagggttcggtgttggtgggggggtttgttgtaggacgggattgtgacggttgaggagcgggtagggggtgtgtaaaagcgaaatgttaatgagagttcgagttttttatttttgcgttttagttttgagattagagtttttttgggttgggagt

SEQ ID NO: 2203 - DNA, 2339 bp, Artificial Sequence
  chemically treated genomic DNA (Homo sapiens)
ataggtgaataaaaaaattaaatagtgtggggaaaaaatagatttgtatataaatttttatagtagcgttatttataatttttaaagtataaatagtttaagtgttcgtacgttgatgaatggataagtaaattgtggaagttttatgtaacgtagtgtcgtttagttacggggagacgtgaagttttgatatttgatatagttaacgcgttgtaaattattgtattaggtgtgggaagttaggtataagaggatcggtacggtatgattttatttataggaaatgtttagaacgggtagttttatatatttaaagttaattagtgttgttaggggttgggggaagaggaaggaggagggattgttgatgggaacgggtgttttttggaggtgattgaaagattttaaaattgattgtgatgatggttatatagttttgagaatgtattaaaaattagtgaattgtgtgttttagatgggtgaattttttcgtgttaatgatattttagtaaggttggaaggatatagatttggttagcgaggagggtttgggttttgttaaagtgggtagagtttgtggggtttattggtttagttttagtttttttgtgtagttttggggtttggttttttttgtcgtattttataagttgttttttttttttagtcggggttttaggtttgtttttttttgggttgagtattatttttgttagaggaaggttaaagtatttggattttaatattttaaggatttttgtaggtttttttcgggatttattttttagtgagcgttgtcgtgcgtatttttgggtttgagggttgggtattttttaggtatgtaaggggtttttcgtgtagggttgtgagtaacgtgggggtagtcggtcgtagtttttagtttcggggtttgttggtatttttattagtttttagtttgggtattttatttaaggaattcggtttttagagttcggggtattgattaatatttatataggtagtagagagttgttgaattttgaacgcgaggtagggaagaaagttgaagtatttgttatttataaattaaaatgaatttattttttttttaaggatagtcgttgtaataggtcgtagttaataggttttatggtgtgatttttgcgtaggaagttattgtttatatcgggtgtggaagtatttgtaatttttaggggatttgttgttttatagaattcgacggaaagttcgaggaaggtcgagtttcgggggttataggtcggatgtcggagttgttttatgggtggtgttcgagggagttttgggaggagtcgttagtttaggtagtgggtggagacgggttttgttttttgtttttattagtttcgtttagttttcgggttatttattatagtttcgttagagtaggtagacgtgtagatgttaaggtagacgtgtagatgttaagtcgtatttgtttattaaatttacgttttcgttataacgtagttgtcgagtaaatgttttttatggattaaaaatataagtagagatggtcgggcgcggtggtttacgtttgtaattttagtattttgggaggtcgaggcgggcgggttacgaggttaggagatcgagattattttggttaatacggtgaaatttcgtttttattaaaaatattaaaaaattagttaggcgtggtgggggcgtttgtagttttagttattcgggaggttgaggtaggagaatggcgtgaattcgggaggcggaggttgtagtgagttaagattatattattgtattttagtttgggcgacggagcgagatttcgttttaaaaaaaaaaaaaaaaaaaaaaaaatatatatatatatatatatatatatatgtagagatatgaatgtcgatttttatgatgtttatttatttatgaaattaatggtttatttgttagaaatttagtttttgggttgatattaaatttaattgttggttttttttgttgaatggaggggttgggagaagtcgtttttagttggtagttttagatttgtgtttatttggtaggtttttatttaggtggggataggttattaggcgggagttattggggtattgttggggtttaggatatttgtaggatgagtgaaggaggaggagagggaggaagatagagaggattatttcggttattttgattttgttttttggttatgtttgggtttttagaggtaggagttggggggttgtagggttgggggttataacgattttttagttgttgttattttttttggtaatgaattttaaagtttttatttttttatcgcgggtgttagatataggtttggtgtaggt

SEQ ID NO: 2204 - DNA, 2339 bp, Artificial Sequence
  chemically treated genomic DNA (Homo sapiens)
atttgtattaggtttgtgtttggtattcgcggtggggaggtgggggttttggggtttattgttagggagggtgatagtagttggagagtcgttgtggtttttagttttgtagttttttagtttttgtttttgagaatttaggtatggttaggaggtaaggttagagtggtcgaggtggttttttttgttttttttttttttttttttttttatttattttgtaagtgttttgagttttagtagtgttttagtgattttcgtttggtggtttgtttttatttgggtgggggtttgttaggtagatataggtttgaggttgttagttggaggcggttttttttagtttttttatttagtaggaaaagttaatagttgggtttggtgttaatttagggattgaatttttggtaggtaagttattggttttatgaataaataagtattataagaatcggtatttatgtttttatatatatatatatatatatatatatatatttttttttttttttttttttttttgaggcggagtttcgtttcgtcgtttaggttggagtgtagtggtgtgattttggtttattgtaattttcgtttttcgggtttacgttatttttttgttttagtttttcgagtagttgggattataggcgtttttattacgtttggttaattttttggtatttttagtagagacggggttttatcgtgttagttaggatggtttcgattttttgatttcgtgattcgttcgtttcggttttttaaagtgttgggattataggcgtgagttatcgcgttcggttatttttgtttatatttttaatttatggagagtatttattcgataattacgttgtagcgaggacgtgagtttagtgagtaagtgcggtttggtatttgtacgtttgttttggtatttgtacgtttgtttgttttggcggggttgtggtgggtgattcgggagttgggcggagttggtgaaggtagaaggtagagttcgtttttatttattgtttgggttgacggttttttttagggttttttcgggtattatttatggagtagtttcggtattcggtttgtgattttcgaagttcggtttttttcgagtttttcgtcgggttttgtggagtagtaggttttttgggggttataaatgtttttatattcggtgtgagtagtggttttttgcgtagaaattatattatgggatttgttggttgcggtttattatagcggttgtttttagaggaagagtaaatttattttgatttatagatagtagatgttttaatttttttttttgtttcgcgtttagggtttagtagttttttgttgtttgtgtgaatattaattagtgtttcggattttgggagtcgggttttttgggtggggtgtttaggttgggggttggtggggatgttagtaggtttcggggttggagattgcggtcggttgtttttacgttgtttatagttttgtacggagagttttttgtatatttgggagatgtttagtttttaggtttaggggtgcgtacggtagcgtttattgagaagtggatttcggaagaggtttgtaagggtttttggggtgttggggtttaggtgttttgatttttttttggtaaaggtgatgtttagtttagagaggagtaggtttggggtttcggttggggagagggggtagtttgtggggtgcggtagaagaagttaggttttagggttgtatagagaggttggggttgagttaatggattttatagattttgtttattttagtaaggtttaggtttttttcgttgattaggtttgtgtttttttagttttattgagatattattggtacgagaaaatttatttatttaaggtatataatttattggtttttagtatatttttagagttgtgtaattattattatagttaattttggaattttttaattatttttaaaggatattcgtttttattagtagtttttttttttttttttttttttagtttttggtaatattgattggttttgagtgtgtggagttgttcgttttggatattttttgtgagtggaattatatcgtatcggtttttttgtatttgattttttatatttggtgtaatggtttatagcgcgttggttgtattaggtgttagagttttacgttttttcgtggttgaacgatattgcgttgtatggggtttttatagtttgtttgtttatttattagcgtacgagtatttgggttgtttatattttggggattgtgaatagcgttgttgtgaagatttatgtataagtttgttttttttttatattgtttaatttttttatttatttgt

SEQ ID NO: 2205 - DNA, 2444 bp, Artificial Sequence
  chemically treated genomic DNA (Homo sapiens)
atttttatttgaaaaagttttgattagtttattttttcgaattaattagaagatataaagtagagtttatttttttggaaatgggttttttatttttttttttttttttttttttttagtttggaaattttttttttttatttttgtttgttttaggttttattggttatgatcgttttttattgttgggttttagtttttttttttttttataaattttttttttttttagatgaaaagattaatattgaaaaggtaagttgatgtgtttcggtttgtatagagttttggaagtagagttgggatttgaattttgggtttttgattttttgtttagggttttttattttggtagagtaggagattaattttttttttttttttttttttaaatgaagtttttatatatagttatttatatatgtataagtagtttttaaggttagagaagttaattttaaattttagagttgtggaggttttatagattatatggagttttagttagtgattaaatttgaggtaatagtatttggaggtttagttttagtattgaggggagttggagggaaaaattaagttaagagtaaaattttttcgttttgaaaataatagtggtataatataatatttttggattgtgggaaataaaatggagagggatatgattagaaggaaatttttagaattttattaattttacgttttttaaattggtataattggtgataattttagagttatttgttatcgtattaaagtttgatagagaaggatgatttataggagtagttttgttgtgtttgaggattgtttgatatttgaaatgagtttcggattagtttttggttgaagtttatttaggtttttttcgcgaaggttaagttattagagttaattattatttttgttttattttgtttaaatatcgtcgtcggggttgataattgtatttagtgaatatttgtattggaattcggagtatttatttttttttatttgtagtttgaggaattttgattttttggtgatttttagaagtttttggacgtagttgttcgtgaggcggatttgttcgtcgtcggtttcggggttggacgatacgttcggagttttagggaggtcgcgaggagtttgtttttcggttaggaagtgatcgttgtttgcgtcgcggtttttaaggataatttttgggcggtaattatttttttttatttaggagattaatttttttgttgaggttttatttaaggttgtagtatttatttattgaggtttttaagaaatttgtttgttttaggaaattttttattgagatttgtttcgtattgttatttggtggtaagatataaaaatatattttttacggtgggattagattgcgcgtttgtttcgtttttatttcgtttttttttcggtggtggggtagagggatggtggaaagggaattaagagttagtttttagaagtgtaggtatttgggattgagattggagtggggttatatttttttttttgtttttagtattagttatagttttgttattgtgtttttagttttttttttttttgtagatattggttatttgtgaaattaattgtattttttttttgtattgttttttaggatatttggaattagcgtatagtttattgttagtaattggatagaatcgtatggtaggaatttagaagaggagtttaatttttgagtttatatttttttttttgggttttatttttttattttattttatatttagttttttgatgatgtttaggatatttttttagttattttaatttttttttttgtaagggataggagggataaagtaaggttatatatttagaaagagtttgtttattttttgtaagttttagtttttttttttataaagtgggtataagaatttttgttttggagggttttgtgtgtgttttaggagatgttggattaatattagtgtttattttattttttatttttttattttttaggttttttgttagttatgtgatgtaggttaggatgtaaaggagattaatagtatagattattttttttttagtgttatttgtgttttgtaggtttagtgggtgtttttattagagttttgtattttgagtttagtttttatttgttttttggaagatgttggttttagaattttttgttttttttttgtaggtattgtggtatttatagttgatttgtagagagtttagatgtattttataaataaggaatgtattgttttgtaggacggttgtggcgtggttgtgtgggggtgggtaggttggagtagataggaattacgagaggtagggaggattgtataggggttgttgattaggtggaagatgatgggagttttagaaggtgtcgtgggatagggttagggagagggttttatgcggttaggatttggatgtagattgtt

SEQ ID NO: 2206 - DNA, 2444 bp, Artificial Sequence
  chemically treated genomic DNA (Homo sapiens)
aataatttgtatttagattttggtcgtatagagttttttttttgattttgttttacgatattttttgaggtttttattattttttatttggttagtaatttttgtatagttttttttgtttttcgtggtttttgtttattttagtttgtttatttttatatagttacgttatagtcgttttgtagaatagtatattttttatttatgagatgtatttgggttttttgtaaattagttgtgaatgttataatgtttgtaggagggaggtagagaattttggagttaatattttttagaaggtaggtagggattgggtttagggtataaggttttagtaggggtatttattgggtttgtagagtataaatggtattggggaaaaagtgatttgtgttgttgattttttttgtattttagtttgtattatataattggtagagagtttggaggatggggaggtgggaaatagggtggatattaatattaatttagtattttttgaaatatatataaaattttttaaggtagggatttttgtgtttattttataggggaggaaattgagatttgtagaaggtaggtaagttttttttgaatgtataattttgttttgttttttttgttttttataaagaggagagttaaggtggttggaaggatgttttgaatattattagaaaattaaatataaaataaggtaggaaaatgaggtttaggggaaggaatgtggatttagagattaagttttttttttaaatttttgttatgcgattttatttagttgttaatagtgaattgtacgttggttttaggtgttttggaagataatgtaaagagggaatataattagttttataagtggttaatgtttgtaaagaggaaagaaattagaggtatagtgatagagttatggttggtattgaaaatagagaaggaggtgtagttttattttaattttaattttagatatttatatttttgggaattagtttttggttttttttttattatttttttattttattatcggggagagggcggggtgggggcggagtaggcgcgtaatttgattttatcgtggagggtgtgtttttatattttattattaggtggtagtgcggggtaggttttagtaggaggttttttaggataggtaggttttttaggaattttagtgagtgagtgttatagttttaggtggaattttaataaagaaattgattttttgggtggaggaagatggttgtcgtttaggggttgtttttaagggtcgcgacgtagatagcggttattttttggtcgaggggtaggtttttcgcggtttttttgggatttcgggcgtgtcgtttagtttcgaggtcggcgacgggtagattcgttttacggatagttgcgtttagaggtttttggaaattattaaaggattagaattttttaggttgtaggtggagggaggtagatgtttcggattttagtatagatgtttattggatatagttattaatttcgacgacggtatttgaatagggtggggtaagagtggtggttgattttgatagtttagttttcgcgaaaggggtttaggtggattttagttaagaattgattcgaagtttattttaagtgttaaataatttttaagtatagtaaggttgtttttgtgggttatttttttttgttaaattttgatgcgatgataggtgattttgagattgttattagttgtattaatttgaggaacgtggaattagtagaattttagaagtttttttttaattatgtttttttttattttattttttatagtttaggagtattgtgttatgttattattatttttagaacgggaagattttatttttggtttaatttttttttttaattttttttagtgttaaggttgagtttttagatgttgttattttagatttaattattagttgaaattttatataatttgtagagtttttatagttttaaaatttggaattaatttttttggttttaagagttgtttgtatatatgtggatagttatgtataaaagttttatttaaaaaaaaagaaagagaagaaattgattttttgttttgttagaatgaagagttttggatagagaattaggagtttagaatttaaattttagttttgtttttagggttttgtgtaaatcggagtatattaatttgtttttttagtgttggtttttttatttgagaaagggggagatttatggagggaggaggagattgagatttagtaatggaggacgattatggttaatgaagtttgggataggtagaagtggagagaaagaatttttaaattagaggagaaaaaaaaaaagagggggtaaagggtttatttttaggaaggtgagttttgttttgtgttttttggttggttcgggggagtaaattagttaggatttttttaaatggaaat

SEQ ID NO: 2207 - DNA, 2414 bp, Artificial Sequence
  chemically treated genomic DNA (Homo sapiens)
ttagttttattttggttatttgtaggattttgagtcgtagaggattaatttagtcggcgtgtagggggcgtggtttgtgttttattgtaggtattttttttgtttttttcgtagtattgatgataggtcggttgtgttgggtatcgagaatgtatcggttttgttttcgtagggtttatagattagggagggaggaagattataaataaatgaagtgagtaaggtatcgtgtatgtattttattagtgtttatagagtttatgttttgagttaggtattagtttagtaaataaatatcgttaacgtgttttagatatttgttttattttttagttttaatttttgttatttatgaagttttataataggtttagggggtggtttttttgtaattttattttataggagaggaaatagaggtttagagaggttaagttttttgttatgttgttaggtagtgacggagtttgtatttataatcggtatgttgttttttgttggatgttaggggggtttttaggggttgaagtttatgtggtttttgttttttggagtttaggttagtggggtttggaagaagaggggtagggtttttttatttgttatagtgaattttaggtgggtgagattagggaaggttttttggaggaggtgatgtttgagtcgggatttgaaggttaggaaggaattaattaggtttagagggagagagaatttattttttttatttatgttatttattttttgatattttttttaggaagttttttttgtttttttttagacggagtttttatattatagttgtattatttttgtttgtgttcgagtttttattagattgtggaatttttaaaaggtagtgtagggggttggtttttttgtgtttttagtattatttagtttcgggtacgggaattagaggttgagggacggtaggttgtgtgggttgaggtgggagggcggtatagtcgaggggttcgtttgttatattggttttaggtgtatagggtgagatatttaggaattttgttgtttaggagaattttaggttaatgatttgtcggtttttgattagtttttgatgttgttttgtgttaggtagcgcgttaggtagatgattttttttttgattttaggagaggttggagtaagcgtgtttttagttaggacgtgtaaatggtatgtagtggaggaagttagggagtatgaattgttgggatttagttgtttgttttggaagagggtattttttttttttgtttatgttaattttatttttagtttgtatttagaattttatcgttgtttatcggttgggtagatagaggttgttttgtttggttgttaatacgaaatggtattttgttcgaggtgttttttttttttcgtttttttttgtttttaaatttagagtaaaggtagtatgagttacgatttatcgatacggtgagggataagtatgtttcgttagggaggggttttgtgcggtttgaatcggggattgtagtaaacgatcgcgtagcggggatttaagtttttgatggtgttagaaaaatataataataatagaaataaatattaaatttataaaagtttagtgtagaaggtttagagtttaagagcgtttatgtacgtaggtcggttagttgggggattttgggtaagatatttttgaggataaagatatttttttttaattttagtttttttatttgtaaaatggataggataatatttatatttattttataggattattgtgttgataaataagtgagtattatatgtttagtatttattaaggtttagatgtaataaatggtaagtcgtattgttattatttagatgtttatgaaagtttttgtgtttgttattagttaattatggtgatttgaaatgagttttggaaatttaggatggtaaggaatgggtttagtttgtgttttggtgtattattaagatttttataaatggtatgggaaaattatttttgaagatttatgattataagttagtttttaaataagtttatagggataattgatatttttagttttgtgtgtaaaaattttaggttgagaatttagatgaaaatggttttttttagattttttataaataaatgtaaatttttttggagtaattaaggtgatattttaattataggagtattttatagttgagagttattaaatatacgaggaaatagggtattatgagtaagaattagtataaattttatttagttgaattagatttatagagtttttagatagtagaattattagatgaggaatgtaaaataagtttgtttattataattaaagatataaaaaagaggagagtttaaaatatgagttgggaataagagattttaaaaatggattaggtatggtggtttacgttagtaa

SEQ ID NO: 2208 - DNA, 2414 bp, Artificial Sequence
  chemically treated genomic DNA (Homo sapiens)
ttattggcgtgagttattatgtttggtttatttttagaattttttgtttttaatttatattttgaattttttttttttttgtgtttttaattgtagtaaatagatttattttatattttttatttgataattttgttatttggggattttgtggatttgatttagttaggtgaggtttgtgttggtttttatttatggtgttttgttttttcgtgtgtttagtgatttttagttgtaagatgtttttgtggttggaatgttattttaattgttttagggggatttgtatttgtttgtgagaagtttagagaaagttatttttatttaaatttttagtttgaggtttttgtatatagaattggaagtgttaattgtttttatgaatttgtttgagggttggtttgtggttataaatttttaggggtaatttttttatgttatttatgaaagttttggtaatatattagggtataaattagatttattttttgttattttaggtttttaaggtttattttaggttattatggttagttggtgatagatatagaggtttttatgagtatttgaatgatggtagtacggtttattatttattgtatttgaattttagtgggtgttgggtatatgatatttatttatttgttagtataataattttatgaagtaggtataagtattattttgtttattttatagatgaagaaattgaagttaaaaagggatatttttatttttaaggatattttgtttaagattttttagttggtcggtttgcgtatatgggcgtttttggattttgggttttttgtattgagtttttgtgggtttggtgtttatttttgttattgttatatttttttggtattattaggggtttgagttttcgttgcgcgatcgtttgttgtagttttcggtttagatcgtataaagtttttttttggcggagtatgtttgttttttatcgtgtcgatgagtcgtgatttatgttatttttgttttgaatttagaggtagggaaaggcgagggaggaggaatatttcgagtaaaatgttatttcgtgttggtagttaggtaaggtagtttttgtttgtttaatcgatagatagcggtggagttttgggtataagttaaggataaagttaatatgggtaggggggaaaaatgtttttttttagaatagatagttgggttttagtaatttatgttttttggttttttttattgtatgttatttgtacgttttggttggagatacgtttattttagttttttttggggttaaagagggggttatttgtttggcgcgttgtttgatatagagtaatattaggggttaattaggggtcggtaggttattggtttaaaatttttttgagtagtagggtttttgagtgttttattttgtgtatttggagttagtgtgataaacgggtttttcggttatgtcgtttttttattttagtttatatagtttgtcgttttttagtttttgattttcgtgttcggggttgggtggtgttggggatatagaggagttagttttttgtattgttttttgggagttttatagtttggtgggaattcgggtatagatagagatagtgtagttgtagtgtgggagtttcgtttggaagagggtaaggagggttttttggagggggtgttaaagaataggtagtatgagtagaaggagtagattttttttttttttgaatttggttaatttttttttgatttttagatttcggtttaaatattattttttttaggaagttttttttgattttatttatttggaatttattgtaatagatggaagggttttgtttttttttttttaggttttattagtttgagttttaggaggtagggattatatgagttttagtttttggagatttttttagtatttagtaggaggtagtatatcgattatgggtgtaggtttcgttattgtttaatagtatggtaaggagtttagtttttttgggtttttgtttttttttttgtaagatggggttataagagggttattttttaggtttattgtgagattttatgggtaatagaggttgaggttggaggataaggtaagtgtttgaaatacgttagcgatgtttatttattagattagtgtttggtttagagtatgggttttgtagatattggtagaatatatgtacggtgttttgtttattttatttatttatgatttttttttttttttggtttgtgggttttgcgagagtagggtcggtgtattttcggtgtttagtatagtcggtttgttattagtgttgcgggagggataggaggggtatttgtagtgaggtataggttacgttttttgtacgtcgattgggttaattttttacggtttagggttttgtaggtgattaaggtggagttgg

SEQ ID NO: 2209 - DNA, 3544 bp, Artificial Sequence
  chemically treated genomic DNA (Homo sapiens)
tttagtaattttttttatatgtttttttattaggtttaagatgaaagtttttgttttagcgttttttttttttttttttttattttttttttttttatttacgaagattttagggttttgcgagggtcggagttttttatgtatttttatattaagatagttgttaggatttgtttaataggaagtttttttttattagagtttagttttattttagggaatttatttttttttcggaaaaaggaaaattgaagttagatgttttttgggatcgttatttgaggtgggcgtggttattaggacgtttagagagtttagcgcggtgaggaaagcgacgaatttaggagttttggtttgggtttagttattttttattatttatttgatttttattaagttttttgatttttttaggttttagtttcgatattaataagatgaattaatagttgggtatggttcgcgtttgtaattttagtattttgggaggtcgacgtgggtgtatttgtttgagtttaggagttttagattagtttgggtaatatggtaaaattttatttcgttaggcgcggtggtttacgtttgtaattttagtattttgggatgttaaggtgggtggattatttgaggtcgtgagttcgaaattagtttggttaatatggtgaaattttattttttttaaaaatataaaaattagttgagtgcggtggtgtatatttgtaattttagttattcgggaggttgaggtaggagaattatttgaattcgggaggcggaggttataatgcgttaagattacgttattttattttagtttgggtaatatagaatgttttaaaaataataaataaataaatataagaattatttgttttgggaagtgtagttttttttagtttatttaggttaggagtaaagttagtttattaatttttgttagcgtttttttttttagaaattttttttttaataaaagatgagattttttttttttttttaaaaggatgatttgtgttttgtgttttgtttgtttgttttgtttataaaattgatgaaagttttattgtaaggtaaagttaatgttttttttttattttttaagaatttagaaatggaaatataattttgtatttagagagttaaaatagaaaataagtaatagatttaagtggagatatgtagattatataagagatcggattttttaggatttagttttgtcgttaaatttattaagggtattaatatatttaaggaaaaggtcgggtatggtggttcgtaatttttgggaggtcgaggtgggtggattatttgaggttaggagtgtaagattagtttagttaatatggtaaaattttgtttttattaataatataaaaattagttgggtgtggtggtgtacgtttgtaattttagttattttagaggttgaggtaggaggtttttttgaatttaggaggcggaggttgtagtaaattaagatggtgttattgtattttagtttgggtaataagagcgaaattttgttttaaaaaaaaaaaaaatatatttaaggaaaaaggtgggttagtttaggatgttaagtaaagggagagttgagatttataaattggaataatttgaataacgagtggattagttgaggttaggagtttaagattaatttggttaatatggtgaaattttatttattgaaaatataaaaaattagttaggtatggtggtgtgtatttgtagttttagttattcgggaggttgaggtacgagaatcgtttgaatttgggaggtggaggttgtagtgaggtaagattatattattatattttagtttgggcgatagaaattttgttaaaaaaaaaaaagaagaagaagaaagaaaagaaaagaggagaattttttgatgaagtataagtgtttggttcgaatgataatagtattttgatttttttgtttatatatttattttttatgaatttgtttagtgtgtattgattttgcggagttttattatttttgggtttataaatagtaaatttcggagcgtataaaagtttatagaatatgttaataaaattaaaatattgttattatgtgggtttttttataagtttaattgttagtttttaaggtatttgtgtattcgattaatatgtaaatgaacgagtagatttttttggatataatgtggagaagattttattaaaggttattttttttaagttattgataatttttaattagtttaaattcgtttgagtttattatataaaatatttaaggattttgtttatttttataatattttattttttttagtttaataaaaatatttttaggaaagttttttttaataaatttattgaaataaaattttagtagtatttgagtatttagggttgtttttttcgaaagattttttttttattaatacggagtttggtgttagtttattttagagtatttaattttagttattttttgtttttggttaaaatgtaagatttaaaaattagatttttttgatgatgttttttttttttggattttttttatttttttttattttattttttttaaatttttttttttaaaattaaatttttttttttttttttttttttttttttttttttttttgagacggagtttcgttttgttatttaggttgaagagtaatggcggtatttttgtttattgtaagtttttttttttgggtttaagtgattttttcgttttagtttttcgagtagttgattataggtgcgtattattatgttagttaattttttttttttttgagatagttttattttgttatttaggttagagtgtaatgatataatttttgtttattgtaatttttattttttaggtttaagtaatttttttgttttagttttttaagtagttagaagtataggtatgcgttatcgcgtttagttaatttttgtatttttagtagagatagggttttattatgttggttaggatggtttcgatttcgatttcgtgattcgtttgttttagtttttcgagtgttgagattataggtatgagttatttcgttcggttaatagttaatttttgtatttttagtagagatggaatttcgttatgttgattaggttggttttaaatttttggttttaagtgatttattagttttagttttttaaagtgttgggattataggtatgagttaatgtatttggttttttttttttttttaatttttttatattttttttttttgtgtgtaaaataagtttttttattttaaaaagaaatttgtggtttttgtggttttttttagttatttcgatgtttttttttttaaattatatttagagtttttaattagttaaatttggttttaatttattatttgtattttatttttttttttttttttttttttttttttttttttttgtgtgtgtgtgttttttgagataatatttaattttgttatttaggttggagtgtagtggtgcgattttggtttagtgtaatttttgttttttaggtttaagtgtttttttgt

SEQ ID NO: 2210 - DNA, 3544 bp, Artificial Sequence
  chemically treated genomic DNA (Homo sapiens)
gtaggagaatatttgaatttgggaagtagagattgtattgagttaagatcgtattattgtattttagtttgggtgatagagttagatgttgttttaaaaaatatatatatataaaaaaaaaaagaaagaaaggaaaagagaaagaaaaatgaaatataggtgatgaattggagttaggtttggttgattaaaggttttgagtgtgatttgagaaaaagaatatcgagatagttggagggaattataggggttataggtttttttttaggatggagagatttgttttgtatatagaaggaagaagtgtggagaggttaaaaagagaggggaggttaggtgtattggtttatgtttataattttagtattttgggaggttaaggttggtggattatttgaggttaggagtttgaaattagtttggttaatatggcgaaattttatttttattaaaaatataaaaattagttgttggtcgggcgaggtggtttatgtttgtaattttagtattcgggaggttgaggtaggcggattacgaggtcgagatcgagattattttggttaatatggtgaaattttgtttttattaaaaatataaaaattagttgggcgcgatggcgtatgtttgtatttttagttatttgggaggttgaggtaggagaattgtttgaatttgggaggtggaggttgtagtgagtagagattgtgttattgtattttagtttgagtgatagagtgagattgttttaaaaaaaaaaaaaattagttggtatggtggtgcgtatttgtaattagttattcgggaggttgaggcgggagaattatttgaatttagggggaggagtttgtagtgagtagagatatcgttattgttttttagtttggatgatagagcgagatttcgttttaaaaaaaaaaaaaaaaaaaaaagaaaaaagaaaaaaaaatttgattttaaggaaggaagtttggagagagtgaaatggaaaggagtagaaagagtttaaaagaagggagtattattaaaaaaatttgatttttgggttttgtattttggttagaagtaaaggataattgaggttaggtattttgagatggattgatattaggtttcgtgttggtaggggagggatttttcgaggagagtagttttaggtgtttaaatattgttagagttttattttagtgagtttattggagagaatttttttgaggatgtttttgttgggttgagggagatggggtattgtgggagtgggtaggatttttgggtgttttatgtggtgagtttagacgggtttgagttggttaaaggttattagtggtttggggaaagtgatttttggtagagttttttttatattgtatttaagagagtttgttcgtttatttatatattgatcggatatataaatgttttggggattgatagttaagtttgtggaaaggtttatatggtggtagtattttagttttgttagtatattttgtaggtttttatacgtttcgaagtttattgtttgtagatttagaagtgataggatttcgtaggattaatatatattgaataaatttataagggatagatgtgtaaataagaaagttagaatgttgttattattcggattagatatttatgttttattaggaaatttttttttttttttttttttttttttttttttttttttttttgatagaatttttgtcgtttaggttggagtgtagtggtatgattttgttttattgtaatttttattttttaggtttaagcgattttcgtgttttagtttttcgagtagttgggattatagatgtatattattatgtttggttaattttttgtatttttagtaaatggggttttattatgttggttaggttagttttgaatttttgattttagttgatttattcgttatttaagttattttagtttgtgggttttaattttttttttgtttggtattttggattgatttatttttttttttagatatgttttttttttttttgaggtagagtttcgtttttgttgtttaggttggagtgtaatggtattattttggtttattgtaattttcgttttttgggtttaagggaattttttgttttagtttttggaatagttgggattataggcgtgtattattatatttagttaatttttgtattattagtagagatagggttttattatgttggttaggttggttttgtatttttgattttaggtgatttatttatttcggttttttaaagattacgagttattatgttcggttttttttttagatatgttaatatttttggtgagtttagcggtaaggttggattttggagagttcgattttttgtgtgatttgtatgtttttatttggatttgttgtttgttttttattttaattttttgagtgtagagttatatttttatttttgagtttttgagaagtgggaggggaatattaattttgttttgtagtggagtttttattagttttgtggatagagtagatagataagatataggatataaattatttttttaaaagaaaagagagggttttattttttattgagaaaagaatttttgaaaagggaggcgttggtaaaaattgatgagttgattttgtttttggtttaggtaggttggaagaaattgtattttttagagtaggtgatttttgtgtttgtttgtttgttgtttttgagatattttgtgttgtttaggttggagtaaagtggcgtgattttggcgtattgtaattttcgtttttcggatttaagtgatttttttgttttagtttttcgagtagttgggattataggtgtatattatcgtatttagttaatttttgtatttttagaagagatgagattttattatattggttaggttggtttcgaatttacgattttaagtgatttatttattttggtattttaaagtgttgggattataggcgtgagttatcgcgtttggcgagatggggttttattatattgtttaggttggtttggaatttttgagtttaggtaaatatatttacgtcggttttttaaagtattaggattatagacgcgagttatgtttagttattaatttattttattgatgtcgaaattaaagtttggaaaggttaaagagtttgatgaaggttaaataggtagtaaggggtggttggatttagattagggtttttaagttcgtcgttttttttatcgcgttgggttttttgagcgttttaatagttacgtttattttaaatggcgattttagagagtatttggttttaattttttttttttcggaggggagatggattttttggaatggaattgggttttggtaggggagaattttttgttgggtaaattttgataattgttttggtgtgggagtgtatagggaatttcgattttcgtagaattttgggattttcgtgggtggaggggaagaggatagaggaggggagggaggagacgttgagatagaggtttttattttgagtttggtggggaggtatgtgggagaagttgttgag

SEQ ID NO: 2211 - DNA, 2382 bp, Artificial Sequence
  chemically treated genomic DNA (Homo sapiens)
ggatttatttattgtttgtaatttttcgggttgaagagattatttttcgggagttaattaatttattttttggagcgcgcgtttttttttgtttttaggagtcggttttttaaaattttttgaggttcgcgtatgtttttttcgatttttcgtgtttttattttttatagaaatttacgtatttacgttttttttttttttcgagtttgtagaggatttcgttttgttttttttatatttagggttgttttttttgtcgttaatataaatttgttgataggttacgtttgggaagcgggtggggtgtttcggagcggtgttgaggcgttgtaggttcggtttttggttgcgggggagttgtattttgaagtttcgtcggaattcgcgtttggggttagtagggggtattagagttaatagggattgtatgtaaaatttatttttttttaggttttttagggggatggttaggtttttgtagagatggggaggatttttttttggtaaggggagagggacgggttaggagttaagcggaaggatttcgtgtttaaggttttttaagggacgggataggcgaggaatttttttgagttttttgaattgttttattagttaggtttgggaagtatttcgtttttataaattttgtttttttgaaaggggtcgggggggggattttaatattttttgttataggttatgatgggtatggtggttaagagtaataggtcgcgtggtgaggttggttttttgtggttttgttttgttatttttcgaggtatttttatgttagtgaatagagttgcgggtttttagttgtatagatgaatgtacgaataaaatataggtttatataaaggaagttattgtattgatttagattcgatttgggattgtcgtataaaatagggttgataaaaatcgtcgtgtttttattttggaaatagagatttagtttttttttttttgtttgaggtatttagtaaaggtttgtttttgagtggttgtggatgtttaaggatttacgatttttgattttataaagtttagggtgaaaataaaaaataaaataaggagattattgttttaaagtggtcgttgtagttaattattttaagaaagtaaataggttggtattgaaagttatataggcgggcggttttttgggagggttgtttagttttttttttttgagatttgagtagggagtagttagaggagtttgaagggatggtgtttagggtatgggaataggttgtatatatttttacggagtacggtgtttgtttagtttgagaagggaaagaaacgggagtagagggttgatgagaaggtagtagatggatagtgcgggattgaaaaggggatttatttgaagattggttattattatttatttttattatttgattgttgttgttttattgagatcgatgcgtggagaataagttggggagtggaataaatggtagggaggggagagaagtgagtgaatatgattttggtttagttttataggatagagcgtggttatgaagtttatagaggaggataggtagggaggaattatggtatggttaggttgtagggtaagaggtagagaggagagaggattgtggaggatgtttgcggagtgtcgattgttagtcgaggttggttttttatttatttattttttttttttgagacggagtttcgtttttgtttaggttggagtgtagtggcgcgatttcggtttattgtaagtttcgtttttcgggtttatgttattttttcgttttagttttttaagtattgggattataggtgttcgttattatgtttggttaatttttttgtttttaatagagatagggttttacgtgttagttaggatggttttgattttttgaatttatgattcgtttatttcggttttttaaagtgttgggattgtaggtattagttattgtgtttggttaaggttggtttttttttttatggcgatgggtgtttgaaagttgtatatattaaaataaatttattatttgttgatttaaagtaaaattttgagggtatgaaagggaagggtttatgtttatatggttgagataaaagttgttttaggaagttgggtgtggtggtttatttttgtaattttagtattttgggaggttaaggttggaggattttttgaggttaggaattgaagattagtttgagtgatatagtaagattttatttatatttttaaaaagggttggttgtttcgggatttttcgaaatagttttgtaagatatttttgttttggaattataataatttagataagatgtttttgaaagaatatttgtttaggtatagcgtttttattaatgaattgatgttaattgtggttt

SEQ ID NO: 2212 - DNA, 2382 bp, Artificial Sequence
  chemically treated genomic DNA (Homo sapiens)
aaattatagttggtattagtttattggtggagacgttgtgtttaggtaggtgtttttttaaaagtattttatttaaattgttgtgattttaaaataggaatgttttgtagggttatttcgaaaagtttcgagatagttaattttttttaaaaatatagatggggttttgttatattatttaggttagtttttaatttttggttttaggggattttttaattttggttttttaaagtgttgggattataggggtgagttattatatttagttttttgagatagtttttattttagttatgtaagtatgagttttttttttttatatttttagggttttattttgggttaataaatagtgagtttattttggtatgtgtaatttttaaatatttatcgttataaaagaaaggattagttttggttaggtatagtggttgatgtttgtaattttagtattttgggaggtcgaggtgggcggattatgagtttaggagattaagattattttggttaatacgtgaaattttgtttttattaaaaataaaaaaattagttaggtatggtagcgggtatttgtagttttagtatttgggaggttgaggcgagagaatggtatgaattcgggaggcggagtttgtagtgagtcgagatcgcgttattgtattttagtttgggtaagagcgagatttcgttttaaaaaaaaaaaataaataaataaaggattagtttcgattgatagtcggtatttcgtaggtattttttataatttttttttttttttgttttttgttttataatttggttatgttatgatttttttttatttgtttttttttgtggattttatgattacgttttgttttatgaggttggattagggttatgtttatttattttttttttttttttgttatttgttttattttttaatttgttttttacgtatcgattttaatggagtaatagtaattagatgatgaaaataaataatggtggttagtttttaaatggattttttttttaatttcgtattatttatttgttgtttttttattagttttttgttttcgtttttttttttttttaaattggataagtatcgtatttcgtgaagatgtgtgtagtttgtttttatgttttgaatattatttttttaagtttttttggttgttttttgtttaggttttagaaaaggagagttgggtaatttttttagggagtcgttcgtttgtgtaatttttagtattagtttgtttgtttttttgagataattagttataacggttattttaaaataatggtttttttattttgttttttgtttttattttaaattttataaagttagaaatcgtaagtttttgagtatttatagttatttaaggataaatttttgttgaatgttttaagtaaagagggggaggttgagtttttgtttttagggtgaaaatacgacggtttttattagttttgttttatgcgataattttaggtcgaatttggattaatgtaatgattttttttgtatggatttatgttttgttcgtgtatttatttgtgtagttgggaattcgtagttttgtttattggtatggggatgtttcggggaatggtagggtagagttataaaaagttagttttattacgcggtttgttgtttttagttattatgtttattatagtttgtggtaggagatgttggggtttttttttcgattttttttaggaaaatagagtttgtggaggcggagtattttttaggtttgattgataaaataatttaaaagatttaaagagatttttcgtttgtttcgttttttgaagggttttgaatacggggttttttcgtttggtttttagttcgtttttttttttttattaggaaaggattttttttatttttgtagaagtttgattatttttttagagggtttgggaggaagtgggttttgtatatagtttttgttgattttagtgttttttgttggttttagacgcgagtttcggcgaggttttagggtatagttttttcgtagttagaagtcgggtttgtagcgttttagtatcgtttcgggatattttattcgttttttaggcgtgatttgttaataggtttgtattggcgataaaaggagtagttttgaatgtagggaaagtagggcggagttttttgtaggttcgggggaggggaggggcgtgaatgcgtggatttttgtggagagtggaaatacggggagtcgaggggagtatgcgcgggttttagaaagttttgggaaatcgatttttgggagtagggaggaacgcgcgttttagagagtaagttaattgattttcggggggtggtttttttagttcggggggttatagatagtaggtaaattt

SEQ ID NO: 2213 - DNA, 2303 bp, Artificial Sequence
  chemically treated genomic DNA (Homo sapiens)
tataatttattttttgtggattgggagatttagtattataaagttgtcgattttttttaaattgttttatagatttaatgtaaatttagtaaaaaatttaataagaggttgggcgcggtggtttaagtttgtaattttagtattttgggaggttgaggtaggtagattataaggttaggagatcgagattattttggttaatatggtgaaatttcgtttttattaaaaaaaaaaaaaaaaaaaaaaatgagttaggcgtggtggcgggtgtttgtagttttagttatttaggaggttgaggtagggaatggtgttaatttaggaggtagagtttgtagtgagtcgagatcgagatattgtattttagtttgggcgatagagcgagattttgttttaaaaaaaaaaaaaaatttagtaaggggtgtgtgtgtgtgtttgtgtgtgtgtgtgtgtgtgtgtgtatgtaagttatagatagaatattttttttttttttttgagatagagttttattttgtcgtttaggttggagtgtagtggttcgattttggtttattgtaattttcgttttttaggtttaagtgatttttttgtttttgttttttgtgtagttgggattataggtgtgtattattatatttggttaatttttgtatttttagtagatatagggttttattatgttggttaggttagtttttaatttttggtcgtaagtaatttgtttattttagttttttaaagtgttgggattataggcgtgagttatcgagtttagttagtatatagaatattattttttatttaagtatattaatttagaagagttttttttaaaatatagtatattatttttatttataatatttaaagataattaaagttaaattatgttgttttaagatattatatatttagaaaaatatttataaaaagtaagagaaatatataaattaggtttatttggagagaagggagtgaagtattgcgttgatacggggataaatatgttggttgggtagataggtagtttttatgtttttggttgacgtagatgttacgtattattttatgtgttattatattttttagtaaatacgtaatataagagaataattaattattattaagcgtttttattttgagataggaagatgtagaggaaagattttgatgtgtgtgttagttataaggatgtatattagtgattgatatgatttggtgtaaattttgggtagagatttatatttaagttttttatttttatttgtcgaggcgtaagggtttagagggggttttatggggtgggcgggagtggtaagggtcgaggtgtagttatagtttggttttgtgtatattttttttttttttttggttttatgtgtatattttttttttgttttttgttttttgtgtatattttttgtattttttttttcgttttagtttgtgtttgtagtgttatagggtggttgtagtttttgttttttatagttttttaaggttagagggttgggaatttttgggatgtggttgggatgaggattttgtttttttttaggtatttttaggtaaggggtatagagatatagttagtttagtagttgagttttttttattaggttaggtgggaaattgaagtatgaatataattttagattggaaataaaaagtcgttatgtattgtgtgtttattgaatgttaagttttatgttttattttttaatgttatttttaatgagatgtttttatttagtttattatatgatagtagataggtatttatgatgcgtttattgtatgttgggtatttttttgggttatgaggatttagggaggtttttgttttggtagaagttaaattcgataggagatagagattaggggtttatatattaggaggaagaatttagtgtagagagtgttagtaggaagttataggggtagggaaggcgtttttgggagggtgggtggttgcgttttgaggttgagtagggggagttggtttcgggataggatgtgcgtaggcgtggagtaggaagtttttggaatgatgggtaagagggagtaggttattgggggtaggtttaaatattgggggttgtattgggatagtagaggtttcggataggttcgtttagtatgtagatttttttttttggttttttttttaggatgatagtggaggtttatttttaggtggtggtgagggtaattttgatatagagattttagtttagttggtaggggaaggggagtttttaaggatttttgtatgttggggcgtgtttcgttaggcggtt

SEQ ID NO: 2214 - DNA, 2303 bp, Artificial Sequence
  chemically treated genomic DNA (Homo sapiens)
ggtcgtttggcgggatacgttttaatatataggggtttttgggggtttttttttttttgttagttgggttggggtttttgtgttaggattgtttttattattatttggggatggatttttattgttattttagggaaggggttagggaggggagtttatatgttgagcgggtttgttcgaggtttttgttattttaatgtagtttttagtatttagatttgtttttagtgatttgtttttttttgtttattattttaggaattttttgttttacgtttgcgtatattttgtttcgaggttagttttttttgtttagttttaggacgtagttatttatttttttaggagcgttttttttgtttttgtggttttttgttggtattttttgtattgggtttttttttttggtgtgtgggtttttagtttttgttttttgtcgggtttgatttttattagagtagggatttttttgagtttttatggtttagaaaagtgtttagtatgtagtaggcgtattataaatatttgtttattattatgtggtgaattgagtgaagatattttattaaagatgatattaaagaatagggtatagggtttggtatttagtaggtatatagtatatgacggttttttatttttagtttggggttgtgtttatgttttagttttttatttggtttgataggaggggtttagttgttgggttggttgtgtttttgtgttttttgtttggaaatgtttgaggaggggtagggtttttattttagttatattttaggggtttttagttttttgattttgaggagttgtgggaggtaaaggttgtagttattttgtagtattgtaaatataggttggggcgggaaggggggtatagagggtgtgtataaggggtagggggtagggagagggtgtgtatatgggattagggggagggagggggtgtgtatagagttaggttgtggttgtatttcgatttttattattttcgtttattttatggaattttttttgagtttttacgtttcggtaggtgggggtgaggagtttaagtataggtttttatttaagatttgtattaagttatgttagttattggtgtatatttttgtaattgatatatatattaaggttttttttttatatttttttgttttaagatgagaacgtttgatagtggttaattatttttttatgttacgtgtttattggagagtgtgataatatatgaaatagtacgtaatatttacgttagttaaaagtataaggattgtttgtttatttaattagtatatttattttcgtattagcgtaatgttttatttttttttttttagatgggtttgatttgtatgttttttttgttttttatagatgtttttttaagtatatggtattttgaaatagtataatttggttttgattgtttttaagtgttatagataaaaatggtatattgtattttaaaaaaaatttttttagattaatatatttaagtaaaaaatggtattttgtgtattagttgggttcggtggtttacgtttataattttaatattttgggaggttgaagtgggtagattatttgcggttaggagttggagattagtttggttaatatggtgagattttgtgtttattaaaaatataaaaattagttagatgtggtggtgtatatttgtaattttagttatataggaggtagggataggagaattatttgaatttgggaggcggaggttgtagtgagttaagatcgagttattgtattttagtttgggcgatagagtgagattttgttttaaaaagaaaaaaaaagtattttgtttatggtttgtatatatatatatatatatatatatataggtatatatatatattttttgttgaatttttttttttttttgagatagagtttcgttttgtcgtttaggttggagtgtagtgtttcgatttcggtttattgtaagttttgttttttgggttgatattattttttgttttagttttttgagtagttgggattataggtattcgttattacgtttggtttatttttttttttttttttttttttagtagagacgggattttattatgttagttaggatggtttcgattttttgattttgtgatttgtttgttttagttttttaaagtgttgggattataggtttgagttatcgcgtttagttttttgttgaattttttattggatttgtattaaatttgtagaataatttggggagaatcgataattttataatattgaattttttaatttataaagagtagattatg

SEQ ID NO: 2215 - DNA, 2496 bp, Artificial Sequence
  chemically treated genomic DNA (Homo sapiens)
agtttattgtagtttcgattttttgggtttaagtaattttgggattataggtatgttttattaggttgagttaatttttttttttttttttttggtagagatggggttttattatgatgtttaggatggtttttagtttttggttttaagggatttttttattttgattttttaaagtgttgggattataggtatgagtttttttgttttttttttgttgttttttttttatttttgttgatttatttttattttttaaatgtaaaattgatttaaggtgtatttagagatgtgtatagatttttgtgatggagggaatcgtatagttatggtgaggagtttattataatttttaaacgtttttttaagaagtaggtattaatattttgttttatttttttggaggtagttttgggttgagtattggatttttgggttttattaattttagtgtttttaggagattaagcgcggtcgggggtgagtttttgttttcgcgttttttattacgttttaatatttattttttgttttattttttagtttttcgggttttggtttgtatttgtgaatcgaaggggttatattaggcgttatattagggtttttggatagtttttaggtttggatttcgttttttaggatattatttttattggttaatttattttgtttcgcgagtgtttagtgagtgtttggtacgtaatagagtttttataaatagttgtagaaattagcgttattttatagtatggaaattgaggttttaagtgggagtggtttgtttttaaggttttattggtgagagacgttgtggaagggttgttttggtttgggtatatagtaggcgttttgatgcgggttggagaaggttttgttcggtgggattgcgttttggggtatcgcgtacgggtcggggaagttcggggtagggtcgtatgtaaatagcgcgcgaggaggtcgcggattggttagtttaggcgggggcggggcgcgtcgagggtttagagttggtaggtgttttggtagggataggtttggtgttcgcgtttgttcgttggatcgttcgtttcgcgttttggcggtttttttcgggcgatgttttcgttttgggttttgttggttttcggttgtttgcggttcggttcgggtaggcggtgaagggtaggagggggttgagtttagaaagagcgggtagttttgttttggggcgttcgtcgtttggattttgatttttggcgttggggatttagatattattgttatgaataatagtgatagttaacgtttacgggttttttttgttgggaattcgagggtttatagatggttgtagttttgcgatgtgtgttgtaagagattaatatgtaggggggttgcggtaggatagagaagggattagttttagttttatggtgacgtttggacgggggtagatagagagatatttcggtcgaggaagtagtatgggtaagtttatggaggggagataatattgggttgttttgggaattgttagtttatgggattagttggagtttggggtgaggggagtttgtgggggaaggggtgaggttggagatcgaataaagtaaagtttagaattttaggattttattgtttttttagagaggttggatttcgttagggggcgttgggggattatgggagggttatagttagagaatgaggtagttagatttgtatgtggggggagggtttaggtgaggaaggtgggacggaggagggttgggtcgatggtatggagagatgtttaggaggggtagtggagtttttggtaattgagtgtttgtagtagggagagaaggtagtagtttggttcgatcgttttatttttgagtaggatgattgggtagggggtagtgtttgagatagtttatgcggtggtttagggggagggtgaagtttagggtttggtatataatacgtgtttagtaattgtaagtagagtgggtgtggatagttttgtcggaggttagtttttatttttattgttttttttagttgtgaatttgtagttttaattggttagtgtgattttcgttattaataattttatatttattattgtggttttggaaaagtttttttgtatgtttgatagtaaagaggtttttattggtatttacgaggtttatttgtatgttttggtcgatttaggtaagggttttgtttttttttggttattttaaaaggggttttgatttgtttgtagggaggagggaaggaggtagatagaggaattttttatgtttgtagtcgttttattaaataggtattgtagttatagatttgtttttgttttgtagggatatttagttagtgagggaagtaataatattattagttattgaatatttatattatattaggtattttgtatattatagagttagtatttataattagtttgtaaggtagttattattaatttttattatagagtagggaagtaaggtttagagaggtggaata

SEQ ID NO: 2216 - DNA, 2496 bp, Artificial Sequence
  chemically treated genomic DNA (Homo sapiens)
tattttatttttttgagttttgtttttttgttttgtaatggggattggtaatagttattttataagttggttgtagatattagttttatggtgtgtaaagtgtttggtatggtgtaggtgtttagtgattggtggtgttattattttttttattaattggatgtttttgtaaggtaaggataggtttgtggttgtagtatttgtttaatgagacgattataggtatggagggtttttttatttgttttttttttttttttttgtagataggttagagttttttttggagtagttagagggaagtaggatttttatttgagtcgattaggatatataggtagatttcgtgggtgttagtgagggtttttttgttgttaaatatgtagagaggtttttttaaggttatagtggtaagtgtggggttgttggtggcgaaagttatattggttagttggggttgtaggtttatagttggaggaggtagtgaggatgggaattgattttcggtagaattgtttatatttattttgtttgtagttattgagtacgtgttgtgtgttaggttttgggttttattttttttttgggttatcgtataagttgttttagatattgttttttgtttagttattttgtttagaaatggagcggtcgggttaaattgttgttttttttttttgttgtagatatttagttgttaagaattttattgttttttttaagtatttttttatgttatcggtttagttttttttcgttttattttttttatttgggttttttttttatatgtaagtttgattgttttattttttggttatggtttttttatggttttttagcgttttttgacgaagtttagtttttttggaaaggtagtgaggttttgaagttttgggttttgttttgttcggtttttagttttatttttttttttataggttttttttattttaggttttagttggttttatggattggtagtttttaggatagtttaatattgttttttttttatgaatttgtttatgttgttttttcggtcgaaatatttttttatttgttttcgtttaggcgttattatggggttggggttagttttttttttgttttatcgtagtttttttgtatgttggttttttgtaatatatatcgtagggttgtagttatttgtgagttttcggatttttaatagaggaggttcgtaaacgttggttattattattatttataatagtaatatttgggtttttagcgttaggaattagggtttaggcggcgggcgttttagggtagagttgttcgttttttttgggtttagtttttttttgttttttatcgtttattcgagtcgaatcgtaggtagtcgagggttagtagggtttagagcggaggtatcgttcgggaggagtcgttagagcgcggggcgggcggtttagcgagtaggcgcgggtattagatttgtttttgttagggtatttgttagttttgggttttcggcgcgtttcgttttcgtttgggttggttaattcgcggttttttcgcgcgttatttgtatacggttttgtttcgggttttttcgattcgtgcgcggtgttttagggcgtaattttatcgggtaggattttttttagttcgtattaaagcgtttattgtgtgtttaggttagggtagtttttttatagcgttttttattaatgggattttgagggtaagttatttttatttggagttttagtttttatattgtaaaatgacgttaatttttataattatttatggaggttttattacgtgttaaatatttattgggtattcgcgaaataaaatgggttgattagtaaaggtgatattttggaaaacgaagtttaggtttgggagttatttagagattttagtatgacgtttagtatgattttttcggtttataggtataagttaaggttcgggaggttggggggtggggtagggggtaagtattggagcgtggtggggggcgcggggatagggatttattttcggtcgcgtttggttttttggagatattgaggttggtggaatttaggagtttagtgtttagtttagggttgtttttaaagggatggagtagggtgttaatgtttattttttaaaggggcgtttgaaaattatgatggattttttattatgattgtgcggttttttttattataagaatttgtgtatatttttggatgtattttaaattaattttatatttaagaaataaaagtaagttaataaggataggaaaaaaataatagaagaggggtaaggaggtttatgtttgtaattttaatattttgggaggttaagataggaggattttttgaggttaggagttagagattattttgggtattatagtgagattttatttttattaaaaaaaaaaaaaaaaaaattagtttagtttagtggggtatgtttgtagttttaggattgtttgagtttaggaggtcgaggttatagtgaatt

SEQ ID NO: 2217 - DNA, 2499 bp, Artificial Sequence
  chemically treated genomic DNA (Homo sapiens)
attgtatttagttttttttttaatttttttttttttttttttttttttttttgggatagtagggttttgttttattattaaggttggaatgtagtggtgcgattttcgtttattgtagttttggttttttaggtttaaatgatttatttattttatttttttgagtagttgggaatataagtgtgtaatatttatatttggttattttttgtattttttttgtagagatagagttttattatgttggttaggttggtttggaattttttattttaggtgatttgtttatttcggttttttaaagggttgggattataggtatgatttattatatttggtttttttttttttttaaaattgcggtaattattttttttttgttgaatttattaatgagaaaaagttaatggggttaggtatggtggtttatatttgtaattttagtattttgagaggttgaggtaggtaaattgttcgagtttaggagttttagattagtttggataatgtggtaaaattttatttttataaaaaattttaaaaattagttaggtttggtggtgtacgtttgtagttttaattatttaggtagttaaggttgtagtgaattatgatcgtattattgtattttagtttaggtggtagagtgagatgttgttttaatttaaaaaaaaaaaaaaaaaaaaaaaggttgggtatagtggtttatatttgtaattttaatattttgggaggtcgaggttagtggattataaggttaggagatcgagattattttggttaatacggtgaaattttgtttttattaaaaaaaaaatatagaaaattagtcgggtatggtggtaggtgtttgtagttttagttattcgggaggttgaggtaggagaatggtgtgaattcgggaggcggagtttgtagtgagtcgaggtcgtgttattgtattttagtttggtttatagagtaagattttattttagaaaaaaaaaaaaaaatgtaattaattgtaaggtttggggtgatagttttttggttattttttttagtttttttgtgtttttatagttagagatgattaaagtttatttttaagaaaatagtaagttacgtataattgaagtttatgggggtaggatgttgttttttttatcggggtaatttaagtatttgagtgtttgatattatttattatttaggggattcgagttgaattttaaagattggaattaaagatgatagagtgcgtggttggagagagggggaagtttatagagtttaggtaaatttttgaattatatttttattacgtttataatgtattgtattgaagtatatcggaagttaaagattaaaaaggaattagatttttagttttgttatttaaagtagaaattgagggttttatttatcgtatagattttagtttaagtgttatgtttttagttttatagttttattagtagtttaagtaaaatggtttggatattaaagatggtttttgggttagagtattatttattttttttgtttataaattattttgattttttttgattttttttgttttttatttttttatttagtttttttttttttttttttttttttgagatagagttttgttttgttatttaggttggagtgttggagtgtagtggtgtgattttagtttattgtaatttcggttttttgagcgtaggtaatttttttattttagtttttagagtagttgggattataggtatatattattacgtttagttaatttttgtattttttgtagagatggggtttagttatgttgtttagtttgtttttaaattattgggtttaagtaatttgtttattttaattttttaaagtgttggtattataggtatgagttattgcgttcggtttatttggttttattaaatattttattttttgtaaatgtagacgtttttttagttttgattattttttttaaagtaatgattttttatttggttagatgaatgtttttagtaaaggaaaagattagaatgtgaaaattgtattgtaatagaatataaagttcgtttaattttattttttattagatttggggtggtggtagtagtaggcgttagggtttttaggtttgtttattagttatttttaaggttcgttagtatacgggttaggaggagtatatattttggaattagaaagtttaggattgaatttagttttgtttttagttaaggttttgttatttattattatttttttgatttaggattttataaaattttgttattcgtaaaattggggatgataagttttattttgaatgttgttgtgaggaataaatgaggtaatgtttatgtagtatttagtatagatttttgtagataaatatttaataaatgttaattattatttattatttagttattagaaaagtataatgatttggtatttttaagttttttcgtttttaaaaaaaaaaaagaaaagaaaaaagaaaaagatgtgtgg

SEQ ID NO: 2218 - DNA, 2499 bp, Artificial Sequence
  chemically treated genomic DNA (Homo sapiens)
ttatatattttttttttttttttttttttttttttttttggaagcggaaggatttaaagatattagattattgtgtttttttgatgattaggtagtggatgatagttaatatttattgagtgtttatttgtaggaatttgtgttaggtgttgtatagatattattttatttattttttataataatatttaaggtagaatttattatttttagttttacggatgataaggttttgtgaggttttaggttaagggagtgatagtgagtgataaagttttgattgaaagtagggttgggtttaattttgggttttttgattttagagtgtgtgttttttttaattcgtgtgttaacgggttttagggatgattaatgggtaggtttgagagttttgacgtttgttgttgttattattttaggtttgatgggaggtggggttggacgggttttatgttttattgtagtataatttttatattttggtttttttttttgttagaagtatttatttagttaggtggggggttattattttagaaaaaataattagagttgagaaaacgtttgtatttgtagagaatgaagtatttaataagattagatgggtcgggcgtagtggtttatgtttgtaatattaatattttgggaggttgaggtgggtagattgtttgagtttagtagtttgagagtagattgggtaatatagttaaattttatttttataaaaagtataaaaattagttgggcgtggtggtgtgtatttgtggttttagttattttggaggttgaggtgggaggattgtttgcgtttaggaggtcgaggttgtagtgagttgagattatattattgtattttagtattttagtttgggtgatagagtaagattttgttttaaaaaaaaaaaaaaaaaaaaaaagattagatggggagatgagggatagagagaattaaagagaattaaagtggtttgtggatagaggaaatgagtgatattttgatttagaggttatttttagtgtttaggttattttgtttgagttgttggtgaaattgtgaaattggaggtatggtatttgggttaaagtttgtgcggtgaataaggtttttagtttttgttttaggtggtagagttgaaaatttgatttttttttggtttttagttttcggtgtattttaatgtagtatattgtgggcgtggtggggatgtggtttagaaatttatttaaattttgtggatttttttttttttttagttacgtattttgttatttttggttttagtttttagaatttagttcggattttttgggtgatgggtggtgttagatatttaggtgtttggattgtttcggtggagagaatagtattttgtttttatgggttttagttgtacgtgatttgttgtttttttggaggtgggttttagttatttttagttataaagatataaaaaaattgggaagaatgattaggaaattgttattttaagttttgtagttgattgtatttttttttttttttttgagatggagttttgttttgtgggttaggttggagtgtagtggtacgatttcggtttattgtaagtttcgtttttcgggtttatattatttttttgttttagtttttcgagtagttgggattataggtatttgttattatgttcggttaattttttgtattttttttttagtagagataaggttttatcgtgttagttaggatggtttcgattttttgattttgtgatttattggtttcggttttttaaagtgttgggattataggtgtgagttattgtgtttagtttttttttttttttttttttttttaaattgagatagtattttattttgttatttaggttggagtgtagtggtgcgattatggtttattgtaattttgattgtttgagtagttgagattataggcgtgtattattaagtttggttaatttttaaaattttttgtagagatggggttttgttatattgtttaggttggtttagagtttttgggttcgaataatttgtttgttttagttttttaaagtgttgggattataggtgtgagttattatgtttggttttattgatttttttttattggtgagtttaatagaggagagatgattgtcgtagttttaaaaaagaaaagaggttaggtgtggtgggttatgtttgtaattttagttttttgagaggtcgaggtgggtagattatttgaggtgaggagttttagattagtttggttaatatggtgaaattttgtttttataaaaaaaatataaaaaatagttaggtgtgggtgttgtatatttgtatttttagttatttaggaggatgaggtaggtggattatttgagtttgggaggttaaggttgtagtgagcggagatcgtattattgtattttagttttggtgatagagtaagattttattgttttaaaaaaaaaaaaaaaaaaaaaaaaaaaaattaaagaaaaggttgggtgtaat

SEQ ID NO: 2219 - DNA, 2499 bp, Artificial Sequence
  chemically treated genomic DNA (Homo sapiens)
ttatatggatataggaaggggaatattatattttggggattgtggtggggtcgggggaggggggagggatagtattgggagatatatttaatgttagatgatatattagtgggtgtagcgtattagtatggtatatgtatatatatgtaattaatttgtataatgtgtatatgtattttaaaatttagagtataataaaaaaaaaaaaaaaaaagaaaattggatatttgaatataataatgtagtaattttggagatgagattttttttttttttagggtttgttgttttggggttttgttatgttttatattgttgtaggttgtttttatgttgaggattaatttgagttgtaagtttgaggtttttttaggtttgaagttgtttttttttttgggtatatatttttttttttaaggatgtgtggtaattttaattttttttgtgtatgttattgtttttgagtgttttagtttttaatgtttggtttttaaaaaaggaaaagagaataacgaaggggaagggaaatggggttttggttttttttattttttagaagttgttttagtttggtaagggtttgtagtagtggagtggggagttgtgagtaataatggttgtcggtttttgtgtttgtttttttataattaaaagtagtaattaataattagaacgtagatgttaatatttggaggatagagtgtttatcgtttatgattgtttttataagttttagtttaagaagttagaagtggtgtttaagtttgtttgtttgatagaaattgtgaatttatattggtttgtttattttgaggttgtgttgttagagtttttttagtataataaagagaggtgtatataaaggaataggaatagtaggaggtgggggtaaaaatattaggtgtgatttatatgttaagtcgattcgtattgtgttttataggaagtttagaagatgtttttgtaagaaattaaggattcgtttgttggggagggttgttggtatgtttgaaaagtattgtgacggttgaattttgtgggtttggggagattgtagattttttgattttaaggggaatgatgtgattttagagttgtaaagaataagtgatagtggaggcgtttatgttttgtgattgtattagagataaggaagatataattagaataatggggagtaggaatggagcggttaatagaatatgtgattgttagggatttttgatgaaggttgatttttagggagtgaattagattagtgattaattatttgtttttatataattgggtaatgtggatggattttaataaagggattatttatagtatagtaggaaagttataaagaaattagatagaagagtgtaagtagtaaggggttaagtagttatttgattagagatagtgttagtttgttaagaaggtattagatagaagttgtgatttttagtaaagggatatagtttgtttgtgttgattttgtaggggtagaggtgggggatatatatattttttttttatttattttttgttattttttttattagttgaattttaataaaagtatgagggtaagggagatttttgaagtatttaatttaggtgagttttttaaggaataaagtagaatgtagaaaaattaagagtgggtttagggaataaaatagagatatgtattagagtatgatgatgtgtttgggaaagaatatataaatatttttaaaattattagataataaatttgagatgatattaatataggtaaattttatttaatggtaatatattttaagaaatgtattattaggtgattttgtggttgtgtagatattaaagagtgtattttatataaatttagatagcgtagtttattatatatttaggttatatcgtatagtttattgtttttgggttatatatttgtgtagtatgttattgtgttgaatatagtaggttaatggtttttaatatttaagttatggattagtatcggttcgtgttttgttaggaattgggtataaagtaggagatgagtggttggttagtcgagtattattgtttgagtttcgttttttgttagattagtagtagtattagatttttataggagtataaattttattgtgaattgtttatataagggatttaggttatgttttttttatgagaatttaattaggttgggtgttgtggtttacgtttgtaattttaatattttgggaggtcgaggtaggtggattataaggttaagataattttggttaatatggaaatttcgtttttattaaaaatataaaaattagttgggtgtggtggcgtatgtttgtagttttagttattcgggggattgagataggagaattatttgaattcgggaggtagaggttgtagtgagtcgagattgtgttattgtattttagtttggtaatagtgggagatttagtttaaaaaagaaaaaaaaaagaaaaaaaagaatttaattaatgtttgatgatttga

SEQ ID NO: 2220 - DNA, 2499 bp, Artificial Sequence
  chemically treated genomic DNA (Homo sapiens)
ttagattattaggtattagttagatttttttttttttttttttttttttttttagattgagttttttattgttgttaggttggagtgtagtggtataatttcggtttattgtaatttttgtttttcgggtttaagtgatttttttgttttagtttttcgagtagttgggattataggtatgcgttattatatttagttaatttttgtatttttagtagagacggggtttttatgttggttaggattgttttgattttgtgatttatttgtttcgattttttagagtgttgggattataggcgtgagttatagtatttagtttagttagatttttataaggagaatataatttagattttttgtatgggtagtttataatagggtttgtgtttttgtgaaggtttaatgttgttgttgatttgataggaggcggagtttaggtagtaatgttcggttggttagttatttattttttgttttgtgtttagtttttaataggatacgaatcggtgttggtttatggtttgggtgttggggattattggtttattgtatttagtatagtgatatgttgtataggtgtgtagtttaggagtaataggttgtacgatatagtttaggtatgtagtaggttacgttgtttaggtttgtataaagtatattttttggtgtttgtatagttataaaattatttaatgatgtattttttggaatatattattattaaatgagatttatttgtattagtgttattttaggtttattgtttagtaattttaaaagtatttgtatatttttttttagatatattattatattttggtgtatatttttattttattttttagatttatttttaatttttttgtattttgttttgttttttaggaggtttatttgaattggatattttagagattttttttatttttatgtttttattggggtttagttaatggagggggtggtagaagataggtgagagaagagtgtgtgtattttttatttttgtttttgtagggttagtataggtagattgtgtttttttgttgaagattatagtttttgtttggtgtttttttggtaagttggtattgtttttagttaggtgattgtttggttttttattatttatatttttttgtttggtttttttgtgatttttttgttgtgttgtaagtagtttttttattagaatttatttatattatttagttatataaagataaatagttggttattgatttagtttattttttgagaattagtttttattaaagatttttaatagttatatattttgttggtcgttttatttttgttttttattattttagttgtgttttttttgtttttagtgtagttataaagtataagcgtttttattgttatttgttttttgtaattttaggattatattattttttttgaaattagagaatttgtaatttttttaagtttataaaatttagtcgttatagtattttttaagtatgttagtagttttttttaataaacgaatttttaattttttatagaaatattttttgggttttttgtgggatatagtgcgggtcggtttggtatgtggattatatttgatatttttatttttattttttattatttttatttttttgtatgtatttttttttattatgttaggaaagttttggtaatataattttaaaataagtaggttagtgtggatttatagtttttgttagataaataaatttgagtattatttttaattttttgggttaagatttgtgggaataattatgggcgataagtattttgttttttaagtgttagtatttgcgttttggttgttgattgttatttttgattatggaagggtaaatatagaggtcggtagttattattgtttataattttttattttattgttgtaagtttttattagattgaagtaatttttaggagatagaaaaggttagaattttattttttttttttttcgttgtttttttttttttttttgggagttaaatattaaagattaggatatttaaaagtaatggtatatatagaggaaattaaagttattatatatttttggagagaggagtgtgtgtttagggaaaggagtagttttagatttgagaagattttaagtttataatttaggttgatttttagtatggagataatttataataatgtaaaatataataaaattttaaaatagtaaattttgaggaagaggagagttttatttttagagttattgtattattatatttaagtgtttagtttttttttttttttttttttttattatattttaagttttagggtatatgtgtatattgtgtaggttagttatatatgtatatatgtgttatgttggtgcgttgtatttattaatgtgttatttagtattaggtatattttttaatgttattttttttttttttttcgattttattatagtttttagagtgtgatatttttttttttgtgtttatgtga

SEQ ID NO: 2221 - DNA, 2279 bp, Artificial Sequence
  chemically treated genomic DNA (Homo sapiens)
taattttagtattttgggaggtcgaggtaggagggttgtttgaggttagagtttaagattagtttggataatatagtaagatttttttttaaaaaatgtttttaaaaattagttgggtaggttaggtacggtggtttacgtttgtaattttagtattttgggaggttaaggtgggtggattataaggttaggagatggagattattttggttaatatggtgaaatttcgtttttattaaaaatataaaaaaaaattagttaggcgtggtggcgtacgtttgtagttttagttatttcggaggttgaggtaggagaatggcgtgaattcggaaggtggagtttatagtgagtcgaaatcgcgttattgtattttagtttggacgatagagtaagattttgttttaaaaaaaaaaaaaaaaaaattagttgggtatagtggtatgtatttgtagttttagttatttagaaggattttttgagtttaggagtttatagttgtagtgagttgtgattattttattgtattttagtttgggtgatagaaagattatgtcgttgaaaataaaattacgggtggggggtggtgttttgtgtatttaggggagtttaggtgtgaaaaattgcgttttgaaaaagtaggtttttgtgtgttggttagaatggggggatgaggaaattgaggggtagttttttttatattattatttgttttggagtagattggaagagttagtagaatgaggggtaataagtatggattggagtgatttgggtgagttgaggtaggggttgaagtttttatatggaacgtggtagggatgagtaggttatttggaatttagatttaaaagtattagttatttagatattgatttgagatttttgtagagggggaaacggttggggttttagttatttggagtgttttaattttttagtagagtttggtcgtgagatttagtttttttgttttatttggcggggtgatgtgtttattttaaagttttattggatataggtaggtaaatttttatcgggtatttgatttttgtattaggttttagcgtggacgttgttaagttagtatgtggtttcgtatatgtggagttttatagttattttgaagtaagttttgggatttcgaatttgatttcgaagtttttgttgggttgattttttattcggtgttgatttgattttatacgggagttagtgtagttatgggttcggaaagtatttagataaaaggtgttttatttagtgatgaagaatgtgttgatgttttaagatcgtttttagataaatagtaaaatcgttggttaaaagttggtttaatttattttattttgttgttgtttgttttgttttagacgtttcgtagtttgaagttgtggttttagtttttttttttagtgataagtggaaaagagggatgaggaaggggttttgttggttcgattaaaaataaaattaagaatttatgagtgtatttttttttttgggtatttggatatttttgttagaatatttagtagacgttgataattttaagttaatgtaaaagttaagtttggagggttatggggtgggagattagggtgaggaagttgttaaaggaggttaaggggatggtacggtttttatttaatagtgatagtagtattttagagttagagggtttttatttattgtttagtttatatgtatgattttaaaaaaggaagttgaggtaggaggattgtttgagtttaggagttggagattagtttaggtattttagcgagttaacgtttttgttaaaattaataaatgaagttaagaaaggtgaggtatgggcggttttagtgatttggattaatttatagagaggtagtaatggggagggttagagtttcgtttttgagggattatattatagtttattttttttatttaaaggttaaaggaattgagcgttaataattaatatagcgattttggtatttggagttttttcgatgttttatggattaaggagattagatttttttatatagtttgttgagggatttggtgggtgttttttgtttttggggtttttttattttggttgttatgtttaatttagatttagtttttttttggaattttttttttaatacgtatagagatagaattcggttcggattttgtagttagtagttgtgtgtaattatttgggatagtgttgtaggttagtagtcggtaatgttagatatcgggttggggtcgtttagtaggtttaagttttggttgttagt

SEQ ID NO: 2222 - DNA, 2279 bp, Artificial Sequence
  chemically treated genomic DNA (Homo sapiens)
gttggtagttagggtttagatttgttgagcgattttaattcggtgtttagtattgtcggttgttgatttgtagtattgttttaggtgattgtatataattattggttgtaaagttcgggtcgggttttgtttttgtgcgtgttgaaaggagaattttaggaagaggttgggtttgggttgagtatagtagttaaagtaggaagattttaagagtaaggggtatttattaagttttttaataagttgtatggaggaatttggtttttttaatttatgggatatcgagggggttttaggtattaagatcgttatgttggttattaacgtttagtttttttggtttttgggtgggggaagtgagttgtggtgtaattttttagaagcgaggttttggttttttttattgttatttttttgtgagttagtttaggttattgaggtcgtttatgttttattttttttgattttatttattaattttaatagagacgttgattcgttaaggtgtttaggttagtttttaatttttgggtttaagtaatttttttgttttagtttttttttttaaaattatgtatgtgaattagataatggataaagattttttagttttaaaatgttattgttattattagatgaaggtcgtgttatttttttggttttttttaataatttttttattttagttttttattttatgattttttagatttggtttttatattagtttggaattgttagcgtttattaaatgttttagtagaggtgtttaagtgtttaagggagagaatatatttatgggtttttagttttgtttttggtcgggttagtaaagttttttttttattttttttttttatttattattagagaaagagattaaaattatagttttaggttgcgaaacgtttaaaataaaataaataataataaaataaggtgggttagattagtttttaattaacggttttgttgtttatttgaagacgattttaagatattaatatattttttattattgggtggagtattttttatttgagtgtttttcgagtttatgattatattgattttcgtgtaaggttaagttaatatcgagtagggagttagtttagtaagaatttcggggttagattcggggttttagggtttgttttagagtaattgtaagattttatatgtgcgaagttatatgttggtttagtaacgtttacgttaaaatttggtgtaagaattaagtgttcggtgagggtttgtttgtttgtgtttagtgagattttgaagtggatatattatttcgttaggtgagatagagagattaggttttacggttagattttgttggggaattaggatattttaagtggttgaaattttagtcgtttttttttttgtagagattttaaattaatgtttgggtgattgatgtttttaagtttggattttagatggtttgtttatttttgttacgttttatatgagggttttagtttttgttttagtttatttagattattttaatttatatttgttgttttttattttgttgatttttttagtttgttttaaggtaaatgatggtgtggggaggattgttttttaatttttttatttttttattttaattagtatataggaatttgtttttttaaaacgtagttttttatatttgagtttttttaagtatataaagtattattttttattcgtgattttatttttagcgatatgatttttttgttatttaggttgaagtgtagtggagtgattatagtttattgtagttgtgaatttttgggtttaagggatttttttaagtagttgggattataggtgtatgttattatgtttagttaatttttttttttttttttttgagatagagttttgttttgtcgtttaggttggagtgtagtggcgcgatttcggtttattgtaagttttatttttcgggtttacgttatttttttgttttagttttcggagtagttgggattataggcgtgcgttattacgtttggttaatttttttttgtatttttagtagagacggagttttattatgttagttaggatggtttttattttttgattttgtgatttatttattttggttttttaaagtgttgggattataggcgtgagttatcgtgtttggtttgtttagttaatttttaaaaatattttttgagaaaaagttttgttatgttgtttaggttgattttaaattttggttttaagtaatttttttgtttcggttttttaaagtgttgggatta

SEQ ID NO: 2223 - DNA, 2443 bp, Artificial Sequence
  chemically treated genomic DNA (Homo sapiens)
cgaatttttgaatttaaggaatttatttgttttagttttttaaagtgttgggattataggcgtgagttattatgttttgttatttttagttttttgatttgaaatgttttttcgtaaataagtattaattattttatcgtaggtttgaggagaaaaaggtgaatgagtttttttttagttttgaagttaattagtttaatgaattggtaatgataatatatttttatttttttgggttatttttattagttttatatattgttgagagagtcgaaagtgttgagttaagttagggaaggtaagagtaggtaggtgattgttaagatatttttgttttatttgtttgatatttgatattttgtagggacgaaaggttatatttatggatggtgaaggtagtggaaattgtattgatttgggagttagaaattttaagtttaagttttagttttgttattaatatgttgtgattttaagaaagttatttttttttttgggttttagtttttttatttatgtaagtaagggttgagttggttaatttattaagattttttataggttaggtatggtggtttatgtttgtaaatttagtatttcgggaggttgaggtaggtggatcgtttgaggttaggagtttaagattagtttggttaatatggtgaaattttatttttattaaaaatatgaaaaattagttaggtgtggtgatgggtgtaatttttgttttttagttatttaggaggttgagataggagaattatttgaattcgggaggtagatgttgtagtgagttgagattgcgttattgtattttagtttgggtgatagagcgagatttcgttttaaaaaaaaaagattttttatagtgtagtttatggtttttttaatttatttatgttatgtagttaatagttattttagtaaggtagtttgtgatttgtttttttatttttaggtttggtaatttttatatttaaaatgttttaagataatttttggtttagggtagttgaaatggatttttaatttggagttagagtttttattatttttatagtatttatgagggttaacgttttatttttttagtatagaatatggatttttagtttttaattacgagattgggtttagggcggttattttgaagttttttataattttttttttatggttttgggtagggatttatttttggtttttttgaaattataatataaattaagtagggaatatcgaagtttttagatattagagattttaggttgattgataggttttagaaagtgagggaaggagagaggattggagttgggattttattttagttttagttttatagatagtagttatgtagagggtgtttgtagagttatatttcgggtttgtggttgtggggtaagaaagatagatgtttggttgtttggttggggattatagttaaagggaggtgtttttattggggttttattttgtttataaatattagagatatgtttttatttttttttttattttttagatttttagaaggaaagaaagaaaattaatattttttgggtcgttatttgtgataagcgttgtgttaggtatttttacgtattatatatttatttaatttttagagtaatgttgggaagtgggtgttattgtcgttttttatagtgagtaaataggtttagagatttaggattttgtttaaggttataaagttagtaagtgtaatttttaagtttggtttttttttaatatattatattgttttgtattttaagatttggttgattgtttgataagtatgtagtaggaatttttatgttttagtatttttttataaatttgagtttttttttttaaggttttataaatgtaattgggaattttttttttagattttaagattatatatttttttgggttttaattttaggtgattgttttttaatttaaaatattttaggtttttattaagtttttataagtgaatttttggggaattgtgataaagtattagttagggtgagggtttagaatgaggggtgttttttttgagttttggattaaatttagtttgttgtgagttagtagggagatattggaggagatagatttagtgggtgagagggaattttttttaggggaggggtttggatttttttaaggaagaaggaggtttggtgaataagaggttttagggttggggaaaatttcggaagtgataggggtttttagatagttaaagcgtttttataagttatgagagagtttggggtgattttggataattttaattggttagagaaagggagaaaggatattttttggagtagggttatggtagggttttaggagtttttattggtgattgggatggaaagtatatattaggagggagttttgttagttttgtgtataatattggttttacgtgataggatag

SEQ ID NO: 2224 - DNA, 2443 bp, Artificial Sequence
  chemically treated genomic DNA (Homo sapiens)
ttgttttgttacgtgagattagtgttgtgtatagaattgataagatttttttttgatgtgtgttttttattttaattattagtaggagtttttggggttttgttatgattttattttagagaatattttttttttttttttttgattaattgagattgtttaaggttattttagatttttttatgatttatggaagcgttttaattgtttaagaatttttgttattttcgggattttttttagttttaaagttttttatttattaggttttttttttttttggagaaatttaggttttttttttaaggggagtttttttttatttattggatttgttttttttagtatttttttattggtttatagtaggttaggtttagtttaggatttagagagagtattttttattttgaatttttattttgattgatgttttgttatagttttttagggatttatttgtgagaatttagtggggatttggagtgttttgaattgaggagtagttatttgggattaggatttagggaggtgtgtggttttgagatttaggaaaggagtttttagttgtatttatgggattttggaaggaagagtttagatttgtgggagaatgttagggtatgagagtttttattatatgtttattaggtaattaattagattttggggtgtagagtaatgtgatatattaggaaaaggttaaatttaggaattatatttgttagttttgtgattttgggtaagattttgaatttttgagtttgtttatttattgtaaagggcgatagtaatatttattttttaatattattttgggggttaaatgagtatatgatacgtgaaggtgtttggtatagcgtttgttataagtagcggtttagaaaatgttagttttttttttttttttttaagggtttgagaaatgaagagaaaaatgagggtatatttttggtatttgtgggtagagtgaggttttagtggaagtatttttttttggttgtagtttttaattaggtagttagatatttgttttttttattttataattataaattcgggatgtggttttgtagatattttttatatggttgttgtttgtagggttggggttgaggtgggattttagttttagtttttttttttttttttattttttggagtttgttagttaatttaaaatttttggtatttgaaagtttcgatgttttttatttaatttatattgtggttttaaaaaagttaagagtaagtttttgtttaaggttatagaggggaagttatggaaagttttagggtgatcgttttgaatttagtttcgtggttgaaggttaggagtttatgttttatgttagagaagtgaaacgttagtttttatgggtattgtggagatggtggggattttgattttagattaaaggtttattttagttattttgggttaaaggttgttttaagatattttggatgtggaagttgttaggtttgggggtaagaaagtaggttataggttattttattgaggtgattattagttatatggtatgagtagattaaaaaaattatagattgtattgtaagggattttttttttttgagacggagtttcgttttgttatttaggttggagtgtagtggcgtagttttaatttattgtaatatttgtttttcgggtttaagtgatttttttgttttagttttttgagtagttgggaggtagagattgtatttattattatatttggttaattttttatatttttagtagagatggagttttattatgttggttaggttggttttgaatttttgattttaggcgatttatttgttttagtttttcgaagtgttgggtttataggtatgagttattatgtttggtttgtaagggattttaatagattgattagtttagtttttatttatatagatgaggaaattgaggtttagagagaagagtaatttttttaagattatagtatattagtggtagaattaggatttggatttagggtttttgatttttaggttagtatagtttttattgtttttattatttataaatatggtttttcgtttttgtaggatattaggtgttagataggtagaatagaagtgttttagtagttatttgtttgtttttattttttttgatttagtttagtattttcgatttttttagtagtatatgaggttaatagaagtggtttagaaggataagaatatgttgttattattagtttattagattgattagttttaggattgggaagaggtttatttatttttttttttttaggtttgcggtggagtaattaatatttatttgcggggagatattttaagttaggaagttgaaagtggtagggtatggtggtttacgtttataattttagtattttgggaggttgaggtaggtggattttttgagtttaggaattcg

SEQ ID NO: 2225 - DNA, 2480 bp, Artificial Sequence
  chemically treated genomic DNA (Homo sapiens)
aggtgtgtagagttttgatttttggtttcggaaaaaaggttagtatagttcggaatgggattattttagaattatatttttttttttttttgtattatttattattaggggttttttaggtttatcgagaaatttggttttgtagatttttgtgttacggttttattatttttgttggatagtttaggtttaggggttgttataagatttagtttagtttttggggttatattggtggtgtcgtgtttggtgcggaaaattttaaggttagggtttataatttttgttttttatgttttattaggttttttttataggttttgtttttttttttattttatggggttggggattttttttggttaaagtttagtagattggatagattttttagaaagtaatggtaggagacgtacgggacgtttgatttatttgtttttttttatttacgtgtgtagtttttttggttttgggtaaggttaaagtcgggtttgtagtcgtaggttattttatttttgggcgtttttcggtagatgtgggtatagttatggtttttgtttatgtagtttatattttttgggaagagagatagataagagacgggttgaagattaggtagagagggagagagaaaattttaggttgaaaggggatagttaatgatatgtaataattaaatgggttgttattgtatgtattatgtatatatacgtatttgcgtatatatatatatgcgtgtgtgtagtagttatttatatggatattttttagggagaaagtaagggtacggtgtttgggtttagatttaggttttgttttgtgagttgtattgtaaatggtatttcgtgatttacggagattaagtttttgttttaggttagattgtggggtatggtttgtagaattatttttgtgttagggtgatttgtttttttttttcgagttatttatggttttagggtattttttattcgtttagtagattggattttttttttttgtttgtttggagtggtttatattttttttcgttgattttagttgatgtttatttttttggtgatttgtgaggcgtttttagaatttatgaggttaggggttaagtgagaggttgtaggttataagtttattaagaggttaaggtagatgaaagggaagcgtttttgtttgttaatttattagttttgtgatttgttttttatttttatttataggaagtttaggtaggagtgaagtcggttcggggagcggtagtgaaggttgtagacggcgaatacgtatagggtaatttttttttttcgggatatatcggttttttgttttaagggaggattggtttaattttgatttcgtttattttaaatacgggtatgtagtaatatagaatagatttaagaatataaatattttgttagttgtaataaagataaaaacgtttaaagttaaaaattaaataaataaatggaaatgaggaagtttgtattttgttcggtattgtaatttttggttttatttgattttgcgatttatatttttttattttgatttttttattaattaattaaattgttggaatgacgtagagtttaattaagtaacgagttagtacggaaagcgtttttatgttgttgttttgtatagaagttgtaagtttatacggaaagatttttttcgttggttcgattttaaaatagtattagcgtttgagttatatagatagtggcgtgcggttaacgtttaatagtcggtaggggtggaggttgatttgtagtatttattaatttacgtgggataaatacgttagttacggttaattttaaggtattagggagatgtcgttaagggtagagttgggaataaatgtgtatagttggtttttataagttgagataagttagttatagtacgttttttttttagaaaggtcgttgtaaagttaggtagatgtaggtgtgaatttggttttttttttggttgtggtttgggagataattgttttttttttttgagtttaattttagaaggggtaggattatttttgttttatagaggagttgtgtaaattaaatttagttatagataggaaatgttaggtaataagagacgaggtttgtttgtgggggtattggtttttgaggtcggtgttttttttgtaggtttggagatagcgtggtttttttttggggtttggttggatcgggtggttagaggcggttttcggtagagaaatttttttaggttattgagatatatttagttttttattaggttttttgggagttttttgttttggtaagggtttggttagtgggtggtggttagtaagttatttttttgatcgttattgatagttgttgtcggcggtgggttgagtttagggtcgttttttttatttttgtttatttggtttttatggttttttgttgttttagtttttttatagttgtatatattttacggttcgttattttataatgttt

SEQ ID NO: 2226 - DNA, 2480 bp, Artificial Sequence
  chemically treated genomic DNA (Homo sapiens)
aggtattgtgggatggcgaatcgtggagtgtgtatagttgtgaagaagttggaatagtagggagttatggaagttaaatgaatagggatgaagggggcgattttggatttagtttatcgtcgataatagttgttagtaacggttagggagatggtttgttggttattatttattggttaaatttttattagggtaggaggtttttagaggatttgatgagggattgaatatgttttagtagtttgggaaggtttttttatcgagagtcgtttttggttattcggtttagttaggttttagggaggagttacgttgtttttagatttgtaggagagatatcggttttaagagttagtgtttttatagatagatttcgttttttattgtttggtattttttgtttgtaattggatttaatttgtatagtttttttgtgagatagaggtgattttgttttttttaagattaggtttagaaaagggaagtagttgttttttaggttatagttaggaaggaagttagatttatatttatatttgtttgattttataacgatttttttaagaaagggacgtgttatggttggtttgttttagtttgtgagagttaattgtgtatatttgtttttagttttatttttggcgatatttttttggtattttgaaattagtcgtggttggcgtatttattttacgtaaattggtaaatattgtaaattagtttttatttttgtcggttgttaagcgttgatcgtacgttattatttgtgtgatttaggcgttgatgttgttttggaatcgagttagcggaaagggttttttcgtgtgaatttgtagtttttgtgtagggtagtagtatgaaagcgtttttcgtgttaattcgttgtttagttagattttgcgttattttaataatttgattgattagtgagaaaattaaggtgaggaaatatgagtcgtaaaattaggtgaaattaggagttatagtgtcgggtaaaatgtaggtttttttatttttatttgtttgtttgatttttaattttagacgtttttgtttttattataattagtagggtgtttgtgtttttaaatttattttgtgttgttgtatattcgtatttaaagtggacggggttaggattgagttagtttttttttggaataagaggtcggtgtgtttcgggggaaggaggttgttttgtgcgtgttcgtcgtttgtagtttttattgtcgtttttcgagtcggttttatttttgtttgagttttttgtgggtggaggtggaaggtaggttatagagttggtgggttggtagatagaggcgttttttttttatttgttttggttttttgatggatttgtgatttataattttttatttgatttttgattttataaattttagaaacgttttataaattattaggaagataaatattaattgaggttaacggaagggggtatgagttattttaggtagatagagaggggagatttagtttgttgggcgggtggggggtattttagaattatgggtggttcgggagaggggagtaaattattttgatataaaagtagttttatagattatgttttataatttgatttagagtaagagtttggttttcgtgggttacgaggtgttatttatagtgtaatttatagagtaaagtttgaatttagatttaggtatcgtgtttttgttttttttttaagggatatttatgtagatggttgttgtatatacgtatatgtgtgtgtgcgtaagtgcgtgtgtgtgtatgatatatgtaatgatagtttatttgattgttatatattattggttatttttttttagtttgaaattttttttttttttttttgtttggtttttaattcgttttttgtttgtttttttttttagagggtatgaattgtatgaataaagattatggttgtgtttatatttgtcgggagacgtttaaaggtggggtggtttgcgattgtaggttcggttttgattttgtttaaaattagaaggattgtatacgtaggtagagggagataaatgggttaaacgtttcgtgcgttttttgttattattttttggagggtttgtttagtttgttggattttggttagggagggtttttagttttatggggtggagagaagggtagggtttgtggaaggggtttgatagggtataagggataagggttgtaaattttagttttggggtttttcgtattaagtacgatattattagtgtagttttaggagttgggttggattttatggtagtttttgagtttaagttgtttagtaggaatggtggggtcgtggtatagaggtttataggattaggtttttcgatgggtttgggaagtttttggtaatgagtagtataaagaaggaaaagagtatggttttgaagtggttttatttcgggttgtgttgatttttttttcgggattaaagattagaattttgtatattt

SEQ ID NO: 2227 - DNA, 2487 bp, Artificial Sequence
  chemically treated genomic DNA (Homo sapiens)
ttaaaagagttttgcggaggttaggagtggtttttgatgtttatttgaagtttttagacgttgttaggagggggggtttttttgggtttttaatattttttcgtttgtcgttgttagcgtatttttgtagtttagcgtgtatttattttacgtacgtttcgtgttgtgtttttgggttttgtttatggttttaataaattttttgtttggtgtgatattggttgtttttagagggtgttaagatatggggttaggtgtttaggggttgtttattgtggtagggatagagtttttagtggcgggagtgttgtggtaattttatttttttagtttttttcgaaattgtgtcgggggtttttgcggtgttgttttggggttttatttgaggtgtcgtatttagaagtatttttgggaattttttttagatatattcgattggttatagaggaattcgaggttgtgtaatggggtgttttttttacgtgtacggattgggggttagtacggtttaggttagtgtgtagtgggggtatgaattttttgaagaataatttggtcgggtacggtggtttacgtttgtaattttaatattttgggaggtcgagtcggggcgtattatttgaggttaggagtttgagattagtttggttaatatggtgaaattttatttttataaaaaatataaaaattagttaggtgttttggcgtatatttgtaattttagttatttaggaggttaaggtatgagaatcgtttgaatttgggaggcggaggttgtagtgagttaagattgtattattgtattttagtttgggcgatagagggagatttcgttttagaaaaaggaaaagaaaaataatttatttagattttaaaatggatatttaaaaaattttttagagaaagttagaagaaaataggtgatttttttattatgtgtttaggtgattgtagatgttcggtaatgtttttttttaggtttttttgggtgagttcgttttttaggtaggggttagtatggtcggggtttttttgtttgagtttaggattcgtgtaatattaggaagataatagttgaaggttttttagtgagttaagggaagtatatataaatttattatataaatattagaaagtgttgttcgtaaaaaatacgtttttatagagttaataagtagagaaatagttgtttagtgttaggaagtgtattatgatttagaggtttagttcgtgtgtagcgtatagatttgaggttttagagagatcgaggacgtagattagtggtacgacggaaacgtagaacgtttatgagaaaatttttttattaattgagataaagttgtaaagaggtagatagttttattgggtgtgtacgtttgaaatttgtgttttttgggttagggtattcggggtgtggtttttagttttttgtagttgttgtttggaaatcgttgttatttatttattttttttttttgtttttttatttaggtgagaattttttaagttttgtttttcggcgttttcgtttcgtttttgttcggtttggtttcgtttttgttcggtttcgttttttaacgtgtttttaggtttttttttttttagtcggtttttaggacggttgttggacgtgttcgtgagtttttcgtttgtttgttttttatttttttgtagttttttttttaattttatggtttttttgagtttggtcgttttttacgttttatgttgggtttggtcggttttggggtttatttttttggttttattttttttatagtttcgagggtttttttgtgtttaggtttttggtagtcgttttttgtgtagattattgggtagatttagttgatttttaggggtattttttcggtttattattgggtcggtgttttgtagaatgagttgtgagagttattgtggttggttagagggtgttatttatagttattttagatttataggagttttcgtttcgatttttgtatttatttgtgttttgttttatgtttttttttagttatttgagttgtaggttttggttattttagattttttttttttgttatttttatttttattttagtatttttacgtttgttttaggttttattttttttttttttgtttggattaaattattttgatttttttgggttttcgtgtaatagtttgtttcggtcgttgttttattgtatttgtaaatttatttgtatttatatttaggttagggtttttaaatagaagttttagtagatttttttttttggttagttttttgttgaattaggaagtaggtttttgttgaattttagtatgattcgtttttatttttgtattttatttttgttttgggagtttttgggtttttgggcgtatttgttgtttttttttgtttgttattgggtgatttttcgtttttgtgggcgttttcgggttttggtttcgggttttttgaggatttgtttttttggtagcggttgttga

SEQ ID NO: 2228 - DNA, 2487 bp, Artificial Sequence
  chemically treated genomic DNA (Homo sapiens)
ttagtagtcgttattaggagagtaagtttttagaaggttcgagattagggttcgggagcgtttataaggacgggaggttatttagtgataaatagggaagggtagtaggtgcgtttaggaatttagaggtttttagagtagaagtgggatgtaggggtgggggcgggttatgttgaggtttaatagggatttgttttttggtttaatagggagttggttagagagagggatttgttgaggtttttgtttaaaaattttggtttgggtgtgggtgtaagtggatttgtaggtgtagtgaggtagcggtcggagtaggttgttgtacgaagatttaggaaagttagggtggtttgatttaggtagaagagggggaaatggagtttggggtagacgtaaaggtgttggggtgaggataagggtgataggagggaggagtttggggtgattaaggtttgtagtttaggtgattgggaaaaaatataaaatagaatatagatgaatgtaggggtcgggacgaaggtttttgtgagtttgaagtgattgtgagtggtattttttggttagttatagtggtttttatagtttattttgtagagtatcggtttagtgatgagtcgaggaagtgtttttggaggttagttggatttgtttagtggtttgtatagggggcggttgttaggggtttgagtatagggaaattttcgaaattgtgggagggatgaagttagagaggtagattttagaatcgattaagtttagtatggggcgtggagggcggttaagtttaagaagattatgagattggagaaggagttgtagagaggtggaaggtagataggcgaaggatttacgagtacgtttaatagtcgttttaagggtcggttggagggaaagagatttgaagatacgttggggggcggggtcgggtaggggcggggttaggtcgggtaggggcgggacgggggcgtcggagggtagggtttggagaatttttatttgagtggaagagtagagggaggaggtgggtgggtggtagcggtttttaggtagtagttataggggattgagggttatatttcgaatgttttagtttagggggtataagttttaaacgtatatatttagtggggttatttgtttttttatagttttattttaattagtaggaaagtttttttataaacgttttgcgttttcgtcgtgttattggtttgcgttttcggtttttttggggttttaggtttgtgcgttgtatacgggttgaatttttggattatgatgtattttttaatattgggtagttatttttttgtttgttggttttgtgaagacgtgttttttacggatagtattttttaatgtttatgtagtaagtttgtgtatattttttttagtttattaaggaatttttaattgttgtttttttggtgttgtacgaattttgggtttagatagagggatttcggttatgttgatttttgtttgggaggcgggtttatttaggagggtttgggagggaatattgtcgggtatttgtagttatttaagtatatagtgaaaaagttatttatttttttttggttttttttggagaattttttaaatatttattttaagatttaagtagattgtttttttttttttttttttgagacggagtttttttttgtcgtttaggttggagtgtagtggtgtaattttggtttattgtaattttcgttttttaggtttaagcgatttttatgttttagttttttgagtagttgggattataggtgtgcgttaggatatttagttaatttttgtattttttgtggagatggggttttattatgttggttaagttggttttaaatttttgattttaggtgatacgtttcggttcggttttttaaagtgttgggattataagcgtgagttatcgtgttcggttagattgttttttaaggagtttatgtttttattatatattgatttgagtcgtgttggtttttagttcgtgtacgtggaaaggatattttattgtatagtttcggatttttttgtggttaatcgagtgtatttagggagaatttttaagggtgtttttagatacggtattttagataaggttttagagtagtatcgtagggattttcggtataatttcggaaagagttaaaagggtgagattgttataatattttcgttattggggattttgtttttattataatgggtagtttttgggtatttggttttatgttttagtattttttagaaatagttaatgttatattaagtagagagtttattgaggttatgggtagggtttaggaatatagtacggggcgtgcgtggggtggatgtacgttggattgtaggggtgcgttagtagcggtaagcggaggggtattgggggtttaggagggtttttttttttagtagcgtttaggggttttaggtgagtattaagaattatttttagttttcgtagggtttttttgg

SEQ ID NO: 2229 - DNA, 2429 bp, Artificial Sequence
  chemically treated genomic DNA (Homo sapiens)
aaaatataaaaattagttgggtgtgatggtacgtatttttagttttagttatttgagaggttgaggtaggagaatcgtttgaattagggaggaggaggttgtagtgagttgagatcgcgtcgttgtattttagtttaggtgatagatcgagattttgttttaaaaaaaaaaaattagtcgggtgtggtggtatgtagttgtaattttagttatttgggaggttgaggtgggaggatggtttgagtttaggagttcgaggttgtagtgagttatgattatacgattgtatttgggcgatagagtggaggtgatgtgtttttttaaatagttatgagaataacgtttttttttttgttttggtttaggaattttattattatgttacgttgttttgttgcgttgtgttggtgtcgtaggtcggtggtaggatatttgtttattttataggttttgtttttagttttgaagtatggtttttttcgattgttgtttatacggttttttgttgttagtttgggttatatatttgggtttttttatttttgtgggtttggtgaggtttggttatgtgtttgtgttatgttagttgtttttaagatgatgtttttagtaggattatatgtgaatatagtgattattatggttaggaggaagttggttgtttattattagtttgtttagggattttttgtattttggcggggattagtagattttgttatgagagagtagaaggtagtatgttgatttttaggagtgtttatagcgtggttgggtagagtagagttataaatgaatagatttagtgtcgaggttattttgatttttttaggggttgttaggtcgtgggtgtagggtttagtaggtttatttgattttagtattttacgtgtgtttgttcggggtggttagtttattgtttttttatttttagtttaattagtaggtgttttattatgagtttttttaggtttattttgtttatttttgttatgtgatttgggatttttgagatgagattatagttgtagagtatatagtatagggaggagtttattagtatttttttatttgtggtgttttggtttagttttttttcggttggggttggattcgttttggtagttaggttttgcgttatttgttttattcgttttgtaatttatttgtttaattgttatttcggtggtcgtgaggttagttgatagaatggagaggggtaagtatttttcgtttggagaggatgggcgtgtggttatttgattgtttttgtaagtttggtggttgtgtgtaggttgttttggtggttttagttttttggggtaggcggggttttgtgtaggatgtagagattgggcgtggttttttgtagatgtttagatgtttttgggttgtggtttttgagatttagggtaaggttgttgattggattttagatttttttgtttgtttttttttttagttgttttttgtggtttggttttggtcgtttgggttttagggttaattttgtatggttttgattattttggtttttttggattgttaaggatatgttgagagttggttgggtttggtttaagtgttgagtttagggtaggggtggggataggtagggcggagttttatttggaaagttaggtacgattttttttgggatattaatttttttgtagagttggttaattcgggtaattttgagggcgagttttgtgtggtataagagatgttttgaggagtttagttttatttggtgtgatgggatttgtggaagttgtgggaagtggttttggttattcgtgtgtttatatgttttgcgtttagattaagatatggtgattaaaaggataaggattatatttatggtttttttttagagtttggtaagttagtaggtatgagagggtgttggaatgttgtggtgggtttgtgtggggattttgtaggatttagggaatttgtagggtttggtttagggagtatataggggtttaggtaaaggtaaggttataggtcgggggaggtgaagttggtagggggagggggagatttgttggttagagttgggttgggggtcggtgggtagtgggtttggttcgagtagggggcgagggattggagagaaaggtagtttttgatggttttttttttaggggttggtttttttttggttttttttttttaatgatcgcgttttcgtcgaggttatagtttttggttttgcgtttatatttttagtgttaggttgttcggagatttgtttatggtttttttttggattatggagttttttttgttattggtgtttggagggttggtttgttgtttttgtattttggttagttaggatggtggggttttgtagttgaattgggggtgtttttttgtttgtttgttttacgtgtattagtggttagaattgtttttat

SEQ ID NO: 2230 - DNA, 2429 bp, Artificial Sequence
  chemically treated genomic DNA (Homo sapiens)
atgagggtagttttggttattgatatacgtaggatagataggtagaaaggtatttttagtttagttgtaggattttattattttagttggttagggtgtaggggtagtagattagttttttaggtattagtggtagggagggttttatggtttaagggaaggttataaatagattttcggatagtttggtattggaggtgtgggcgtagagttaagggttgtggtttcgacgaagacgcggttattgggagggaaggattagaggaaagttagtttttggggaggggattattaggaattgtttttttttttaatttttcgttttttgttcgagttaggtttattgtttatcggtttttaatttagttttagttagtaggtttttttttttttttgttagttttatttttttcgatttgtgattttgtttttgtttgggtttttgtgtgttttttaagttaagttttgtaggttttttaggttttataaggtttttatataggtttattatagtattttaatatttttttatgtttgttgatttgttaggttttgggagggagttatggatatagtttttgtttttttggttattatattttgatttgggcgtagggtatgtgggtatacgggtggttaggattattttttataatttttataggttttattatattaggtgaggttgggttttttagggtattttttgtgttatatagagttcgtttttaaggttgttcgaattggttaattttataggagggttggtgttttagggagaatcgtgtttggttttttaggtgaggtttcgttttgtttgtttttatttttgttttgggtttagtatttgggttaagtttaattaatttttagtatgtttttggtagtttaagaaggttagagtggttaaagttatgtagggttggttttgaggtttaggcggttagaattagattataaagagtagttggaggaagaggtaggtaggagggtttggggtttagttagtagttttgttttgggttttagaggttatagtttagaagtatttgaatatttgtaggaagttacgtttagtttttgtattttgtataggatttcgtttgttttaaggggttaagattattagggtagtttgtatataattattaggtttgtagaagtagttagatggttatacgtttattttttttaggcggaaaatgtttatttttttttattttgttaattggttttacggttatcgggatagtagttgggtaagtaggttatagggcgggtggggtaggtgacgtaaaatttggttgttagggcgggtttaattttaatcggaaggaggttgggttagggtattataggtgggaagatgttgatgagtttttttttgtgttgtgtgttttgtagttgtgattttattttaagagttttaggttatatggtagggatgggtaaggtgagtttggaggggtttatggtggggtatttgttggttgggttagaggtgaagaagtagtgagttggttatttcgagtaggtatacgtgggatgttgggattaagtgggtttgttggattttgtatttacggtttggtagtttttgagagagttaggatggtttcggtattggatttgtttatttgtagttttgttttgtttagttacgttgtggatatttttggaagttagtatgttgttttttgtttttttatagtaggatttgttgattttcgttagggtgtaagaggtttttgggtaagttggtgatgggtagttagtttttttttggttatggtggttattgtgtttatatgtggttttattagaaatattattttgaaagtaattggtatgatataggtatatggttaggttttattaggtttatagggatggaagagtttagatatgtagtttaggttgataataggaggtcgtgtgggtagtagtcgagaggagttatattttaagattgaaagtagagtttgtgaggtgggtaaatgttttgttatcgatttacgatattagtatagcgtagtagggtaacgtggtatggtggtgaggtttttgagttaggataagaaaagaagcgttgtttttatggttatttgaggaagtatattatttttattttgtcgtttaggtgtagtcgtgtgattatagtttattgtagtttcgaatttttgggtttaagttatttttttattttagttttttaagtagttaagattatagttgtatattattatattcggttaattttttttttttgagatagagtttcgatttgttatttaggttggagtgtagcggcgcgattttagtttattgtagtttttttttttttggtttaagcgatttttttgttttagttttttaaatagttgggattagaggtgcgtgttattatatttagttaatttttgtatttt

SEQ ID NO: 2231 - DNA, 2267 bp, Artificial Sequence
  chemically treated genomic DNA (Homo sapiens)
ttaagggtttttatttgtttttttagttttagttttttttttgaagaaagaggtaagatgttagtggaaaataatttttattgagattttattaattgtaaaatttgtttttggtattaagttttttttttttttgtaattcggtttttttttagtggtttttgtggggagagaggtagtggttagaggtagaagatgataggtgatagtagatgtttattttagaggagattaagattttgggttagtttttatagttataagagaggtttaaggtattaagattatttttatttcggttggagttaaaggtaggcggttgtttaagttattatatttagcgaggggggtaggtagaggtgtttattatgaatgttttttttttttttatggtttggaagcggttatggttaaatttggaggtggtgttaatgaatttaaggttaattttttttagagttcgtcgtttcgtttgtattagtaaggattatgggttaagaggggaagggatttaggattacgaggagttaggttttttttagtattgtttatagcgtttttgtatttgggaagttatacgattaatttagttttttttattattcggtagatgaggatatatttaaagtagtaaatagtttagtaaggttagattgggaatttttttattttaggattttaaagttagtgtgaaaggattgttaatatttttttttttttttttttttttattatagggttattagcgtttgtggttttggattttttttttataagagtttttttatgataagttaggatttgttttattttgcggagggtgagtattcgttttttggtttttattatatagttttttagtatgataaagttattggttattttattatagtggataaagttattttggaaaacgagtatcggattagtataggtttaggaggggattgtcgtgtagatgatttttttaggtttaggttttttttgattatagggttgtttttagaaggaaggtaataaggaacggtttcgtagtttgtttcgggcgttgtgtttagcgtatattttaggttttattattgaatagttgagtttgagattttattttttattagttaatttcgacgagtggatttagatgataatatgttatttataagggatatagttaggtgttgtgttggttttagttaacgattttgttagtagtttttaggaagtagtttatttttaaaagtacgaggtttgggatggttttatagagtagaatatttattatttattagagggttgatgtttttgttagataggttatagttagtggaggtattgtttttgattagtttgtcgtttttgataaggtagttttggttaattttataaatttgaatgaataagaagggtgtaaggttggggtattagggataaataatttagatatgttagtgtgttgatttgtaaagtacgttagaaggtagttgaggttttagttttagttatagcgtattttaaggttagagtaaaaagttggttggttttttaggtttttttttgtaaggcggttgggttaaaattaaagattttgttgtataatataggtttgttatttttttggtggtggtattagggattaataagattagtatttttagttatattagttagttttattatagttattttataggatggtattttataaattattaagatgggttagaattgattatgagaagtaagttattgatgtttacgtgatgtataagttatagttagtgaagtagtattgataggtatagaaattttattttttattacgggggtttttttttatttttagggagttatttttagaattttatttttttgttgattttagtgcggtgatggtagtttttttgtttagcgcgtgttatagagaaggttatacgagtaggatgttatgttttaatataggttattttgcgtaggtttcggtgggttttgcggggtagttttttggtgtgttaacgattggtgatttttggaatggatatatattattttattttagcgtttagtattttttattgatttttttttgttatttagtaattattaattatggttgggttatttgagggagtgataagattattttatgtgtattatttataggttttttttgttaagttggataggttttgggggtgttattttgaatttaattttgaatgggtgttttttaaggtatttattagtttaagtttttttatttatagggattg

SEQ ID NO: 2232 - DNA, 2267 bp, Artificial Sequence
  chemically treated genomic DNA (Homo sapiens)
tagtttttgtgaatgggggagtttaaattaatggatgttttaaaaagtatttatttagaattgagtttagggtgatatttttagagtttatttagtttgataggggagatttgtgggtaatgtatatgaaataattttattatttttttagatgatttagttatggttggtaattgttgagtagtaggaaggggttagtgggaggtgttgggcgttgaggtgaagtaatgtgtatttattttaggggttattagtcgttggtatattaagaagttgtttcgtaagatttatcgaggtttgcgtaaggtggtttgtattggggtatggtattttgttcgtgtagttttttttgtggtacgcgttgggtagaaaggttattattatcgtattgagattaataagaaggtgaggttttgagagtggttttttgggggtgggaagaggttttcgtgatggggagtggggtttttgtgtttgttagtgttgttttattgattgtagtttatgtattacgtggatattagtggtttgttttttatggttagttttggtttattttgatgatttgtaaggtgttattttgtagagtggttgtggtggggttgattggtgtggttggggatattagttttattggtttttgatgttattattaggggggtgataggtttgtgttgtatagtaggatttttagttttagtttagtcgttttatagaaaggaatttggagggttagttagttttttgttttgattttgggatacgttgtgattgggattgaggttttagttgttttttagcgtgttttgtaggttagtatattggtatgtttgggttatttgtttttaatgttttagttttatattttttttgtttatttagatttataagattggttagggttattttattaaggacggtaagttgattaagaataatgtttttattgattatgatttatttgataagagtattaattttttggtaagtaatgggtgttttgttttgtgaggttattttaggtttcgtgtttttggggataggttgttttttaggggttgttagtaggatcgttaattgaagttaatataatatttagttgtgttttttgtaagtggtatgttgttatttgagtttattcgtcggggttggttggtgagaagtggggttttaggtttagttgtttagtgatgaggtttggaatgtgcgttgggtatagcgttcgagatagattgcggaatcgttttttgttgttttttttttgagaatagttttgtggttagggagggtttgaatttggaggggttatttgtacgataatttttttttgggtttgtgttgattcgatgttcgttttttagggtggttttgtttattatggtgaagtgattaatgattttgttatgttgaaaggttgtgtggtgggaattaagaagcgggtgtttatttttcgtaaggtgaggtaggttttgatttgttatgggggggtttttgtagagggaggatttaaggttatagacgttggtggttttgtggtgggagaggaaaggaaggagagggtgttggtagtttttttatattggttttgaagttttgagatgaggaaatttttagtttggttttgttgggttgtttgttgttttgagtgtgtttttatttgtcggatggtgggggaggttgaattgatcgtgtggttttttagatgtaggggcgttgtgaatagtgttgaggaaagtttggtttttcgtaattttaaattttttttttttttggtttatagtttttgttggtgtagacgaagcggcgggttttggagaagattgattttaagtttattgatattatttttaagtttggttatggtcgtttttagattatggaggagaagaaagtatttatggtgagtatttttgtttgtttttttcgttgggtgtggtggtttgggtagtcgtttgtttttggttttagtcggggtaggggtggttttgatgttttaggttttttttgtggttgtggagattggtttagagttttggttttttttagagtgggtatttgttgttatttgttattttttatttttgattattgtttttttttttatagggattattgaagaaagatcgaattgtaaaggaagaaggagtttaatgttaggaatagattttgtagttggtggggttttaataaaagttattttttattgatattttgtttttttttttaggagagaggttgggattggggaggtagatgggggtttttga

SEQ ID NO: 2233 - DNA, 2426 bp, Artificial Sequence
  chemically treated genomic DNA (Homo sapiens)
gttttggttaattttataaatttgaatgaataagaagggtgtaaggttggggtattagggataaataatttagatatgttagtgtgttgatttgtaaagtacgttagaaggtagttgaggttttagttttagttatagcgtattttaaggttagagtaaaaagttggttggttttttaggtttttttttgtaaggcggttgggttaaaattaaagattttgttgtataatataggtttgttatttttttggtggtggtattagggattaataagattagtatttttagttatattagttagttttattatagttattttataggatggtattttataaattattaagatgggttagaattgattatgagaagtaagttattgatgtttacgtgatgtataagttatagttagtgaagtagtattgataggtatagaaattttattttttattacgggggtttttttttatttttagggagttatttttagaattttatttttttgttgattttagtgcggtgatggtagtttttttgtttagcgcgtgttatagagaaggttatacgagtaggatgttatgttttaatataggttattttgcgtaggtttcggtgggttttgcggggtagttttttggtgtgttaacgattggtgatttttggaatggatatatattattttattttagcgtttagtattttttattgatttttttttgttatttagtaattattaattatggttgggttatttgagggagtgataagattattttatgtgtattatttataggttttttttgttaagttggataggttttgggggtgttattttgaatttaattttgaatgggtgttttttaaggtatttattagtttaagtttttttatttatagggattgattaatataattttaagtttttttttgtagttattagtaggttataaagagtaaagggtttaggaacgtgttaagaagttgttttttggtttttcgttattttagttatttttgattataaggttgtttttagaaggaaggtagtagagaatggttttatattgttcgattcgggcgttgtatttagcgtttattttgagttttattaacgaatagttgggtttgaaattattttttttttaggtttgtatagtaatttaagttatcgtaaagtttatttttgtagtttttgtttttggttatttcgatgacgtcgattattttattttgtttaaatatttggtttataggtatttgttgtttaagtttttcgcgggtttagtttagtttttcggttatagtgttttcgtttatttggatttttattaggtgggtttttttttggcgtagaggaagtaggcgtatttaggagaaggtagatatagtttagttttagttgttagcgttttttttatagtagaggaattgtagttttatgcggtttgattgatgttaagtatacggtaaaaagttagtaattttgaataagttattgaattttattaagaggaaggaatttttatttttgttaatagtaataatttaattttggatattggtgtttgagttattgttaggatgagcggataagatttatattataggtaaataattagattttagtttttattagtttaatgtttttgtggttgttttttgggttagttttttttggggtattgtagtggttttattttagttatttatatttgttttagtgataagtttgtttttgagagagtataagttttaagtaagaaaatgtattatcgggagcggtggtttatatttgtaattttagtattttgggaggtcgaggtaggtggattatttgaggttaggagtttaaaattagtttgattaatatggagaaatttcgtttttattaaaaatataaaattagtagggcgtggtggcgtatgtttgtaattttagttatttaggaggttgaggtaggagaatagtttgaatttagaaagtggaggttgtagtgagttgagatagggttattgtattttagtttgggtaataagaacgaaattttgtttttaaaaaaaaaaaaatgtatttaagtataaagtttttatttaaggatagtttggtaatgttttgataaaattttaacggtggatatgtatttttattcgtggtggtttttattatatggggttgtatttagtatttgagattagttaggataattagtaataggatagtaagaggtatttattttaattaagttaataaaaagtttgtttagtttattaattaggtttttaggagagtagttagtattttataatcgatttttaggtaggtattttagtgttattggtgagttattagttgaattttaaaggggaatggtttttttgttaagggttagtaaggatatagtgttttttgttggtaagggagaagtt

SEQ ID NO: 2234 - DNA, 2426 bp, Artificial Sequence
  chemically treated genomic DNA (Homo sapiens)
ggttttttttttgttagtagagggtattgtgtttttattggtttttagtaagggaattatttttttttaaaatttaattggtgatttattagtaatattgaaatgtttgtttgaaagtcggttgtgaggtattggttgtttttttggaaatttagttgatgagttgagtaggttttttattgatttggttagagtgggtgttttttgttgttttgttattggttattttggttgattttaagtgttgagtgtaattttatgtggtgagggttattacggatgagagtgtatgtttatcgttgaaattttgttaggatattgttaggttgtttttgagtgaaagttttatgtttaaatgtatttttttttttttagagatagaatttcgtttttgttgtttaggttagagtgtaatagttttattttagtttattgtaatttttattttttaggtttaagttatttttttgttttagttttttgagtagttgggattataggtatgcgttattacgttttattaattttgtatttttagtagagacggggtttttttatgttggttaggttggttttgaatttttgattttaggtgatttatttgtttcggttttttaaagtgttgggattataggtgtgagttatcgttttcggtgatgtatttttttatttagagtttgtgtttttttaaaagtaggtttgttattagggtaagtgtaggtggttgaggtaaaattattgtagtattttaaaaggaattgatttaaaggatagttataggaatattgggttggtaggggttgggatttggttgtttgtttgtggtgtgggttttgttcgtttattttgatagtaatttaggtattagtatttaaagttaagttgttgttgttggtaaaaatgaaagttttttttttttggtgaggtttagtgatttgtttagagttattggttttttgtcgtgtgtttgatattaattaggtcgtatggagttgtagtttttttgttgtgggaggagcgttggtagttggagttgagttgtgtttatttttttttagatgcgtttgttttttttgcgttagaagaaggtttatttgatggagatttaggtgaacggaggtattgtggtcgagaagttggattgggttcgcgagaggtttgagtagtaggtatttgtgaattaagtgtttgggtaggatgagatgatcgacgttatcggggtgattaagggtaaaggttataaaggtgagttttgcggtggtttgagttgttgtgtaaatttgggggagaagtggttttaggtttagttgttcgttgatgaggtttagagtgagcgttgggtatagcgttcgaatcggatagtgtagaattattttttattgttttttttttgagaatagttttgtggttagaagtggttgggatagcggagggttaggggataattttttaatacgtttttggattttttgttttttgtagtttattgataattgtaaaggggagtttggaattatgttagttagtttttgtgaatgggggagtttaaattaatggatgttttaaaaagtatttatttagaattgagtttagggtgatatttttagagtttatttagtttgataggggagatttgtgggtaatgtatatgaaataattttattatttttttagatgatttagttatggttggtaattgttgagtagtaggaaggggttagtgggaggtgttgggcgttgaggtgaagtaatgtgtatttattttaggggttattagtcgttggtatattaagaagttgtttcgtaagatttatcgaggtttgcgtaaggtggtttgtattggggtatggtattttgttcgtgtagttttttttgtggtacgcgttgggtagaaaggttattattatcgtattgagattaataagaaggtgaggttttgagagtggttttttgggggtgggaagaggttttcgtgatggggagtggggtttttgtgtttgttagtgttgttttattgattgtagtttatgtattacgtggatattagtggtttgttttttatggttagttttggtttattttgatgatttgtaaggtgttattttgtagagtggttgtggtggggttgattggtgtggttggggatattagttttattggtttttgatgttattattaggggggtgataggtttgtgttgtatagtaggatttttagttttagtttagtcgttttatagaaaggaatttggagggttagttagttttttgttttgattttgggatacgttgtgattgggattgaggttttagttgttttttagcgtgttttgtaggttagtatattggtatgtttgggttatttgtttttaatgttttagttttatattttttttgtttatttagatttataagattggttagggt

SEQ ID NO: 2235 - DNA, 2306 bp, Artificial Sequence
  chemically treated genomic DNA (Homo sapiens)
tagtggtttatgtttgtaattttagtattttgggaggttgaggcgggcggattacgaggttaggagattaatattattttggttaatacggtgaaattttttgtttattaaaaatataaaaaattagtcgggcgtagtggcgggcgtttgtagttttagttattcgggaggttgaggtaggagaatggcgtgaatttaggaggcggagtttgtagtgagtcgagatcgcgttattgtattttagtttgggggatagagtgagattttattttaaaaaaaaaaaaaaaaaaaaaaaaaaaagtttggtagggagtaggatatttggattttattttgttgtttttttggttgtgtgatatttaggttacgttgtttttttgggtttcggtttttttatttgtttaagaggggttgatagtcgtatttgtttttttagtttttttttaggaaggtggtagttataattagtatttgttgaggttgattttgtattaggtttaggataggcggggtttagggaggttcgtttttcgttacgtttttttgttaggggagtttcgaggtttttttagtgttatttttatgttatattttgttttagttttgtgcgttttaagttagggtattgagtgtgttagtattcgtagggataggtattggattttgggtggatttgagggtttgtgattatttttttagttgtttttttttagaggttattttttttaaggaaggaaagaattttttcgttattttttgtagtgcggttagtttaggttagtttgtatagtagggttagaattagggtttttggggagggatgtttgtttgtttagtgggaggagacggtacgttcgtgaagtcgttatttagttagtttgggggttacgagtgttgtttttggtggcgttgtgcggggagggagggggtcgagtagggtgggtattcgtatgtttgtgttttgttggttttcgatagatgatagttttttttttagggtttttagtgtagagttttttggggatattatggttatttttgtttagatgagagggagtcggttgtttgtgatagcgtcgtaaaatgtcgttagggttttttttttttttttttttttttttttttcgtttttttttggttggtggttttttgtaggttttcgtttttgttggtgttggttataatgtttttatttttagggtttcggcgttttagttttttgcgtttatcgcgtttgttcgttagaatttttgtgtttttggtgcgtgtggtttgtcgagtttcgagtttttgttttttttagtttttttttttttcgcgtttttaggaggtgtttttggaagttacggagttttatcggtattaagatcgattgttttttggggtgaggtagtaggttgtatagtttggggttttgttttgttatgggataattatataatttattgttttttttgaagtggttgtaatatttgcggtggatagagcgtttggaattttggttgggagcgggtagggttaggtttgggggtagttttggtagtagtcgggggtaggggtcgtttatattgagaagtttgataggtttaggtgttatttgttgtgtgattttggataggtttttgatttttttgggttttagtttttttttttgtaaaatggaggtaaatgaggatggaaggagatgtagtgtggagtatcgagggtagaggagagttgagtcgattttattttttgttttagtcgtattgagagaggcgatttacgtagttgtttgtttgatttttgttttttaatattttttaatatttttttcgttattaggtttaggtttatgggtggttttgagtcgtattttttattgagtattaggagaaggtatcgtggggttaggggtggtcgagacgtttggaggttatagggttgcgagtattggcgttgtttattattttaggtttttagtacgtgttttagtttggttagtttagtggtagggtttttgtttgtggaggaagggaggttaaggtattttttttgagtaggaagtgagaggaatagttttgtatatattgggttttatatggtataatttgaaggtagatagtggtttttttgtatttggggaaattgaggtttagagagttagggattttttaagattagttagtagtagttgtttttttttggggtgttattttttttgttttttttgttttgcgtttgtttagtttttttgttttggtgattgaggatcgttaggtaggggttggtgttgggcggggggcggcgggttttttcgtagtgta

SEQ ID NO: 2236 - DNA, 2306 bp, Artificial Sequence
  chemically treated genomic DNA (Homo sapiens)
tgtattgcgggagggttcgtcgtttttcgtttagtattagtttttgtttggcggtttttagttattagagtaggagggttgggtaggcgtagggtaggagggataggggagatggtattttaggaaggggtagttgttgttggttggttttgggaagtttttggttttttgggttttagtttttttaggtatagaggagttattgtttgtttttagattgtgttatgtgggatttagtgtatgtagagttgttttttttattttttgtttaggaaaggtgttttggtttttttttttttataggtagaggttttgttattgagttggttaggttggggtacgtgttgggaatttggggtgatgggtaacgttaatattcgtagttttgtgatttttaaacgtttcggttatttttggttttacggtgtttttttttggtgtttagtggagggtacggtttagggttatttatgagtttgggtttgatggcggggggagtgttggggagtgttgggagatagaggttagataaatagttgcgtggatcgttttttttagtgcggttggggtagagggtggggtcggtttagtttttttttgttttcgatgttttatattgtatttttttttatttttatttgtttttattttatagaggaggaaattgagatttagagagattaggggtttgtttaaggttatatagtaagtggtatttaggtttgttagattttttagtgtaggcggtttttgttttcgattgttgttaaggttgtttttaaatttggttttgttcgtttttagttagggttttagacgttttgtttatcgtagatattatagttattttaggaaagatagtagattgtatagttattttatagtagggtagagttttaaattatataatttattattttattttaaagggtagtcggttttggtgtcgatgggatttcgtggtttttagaggtattttttggggacgcgggaggaaagagggttgaggagaataggggttcgaggttcggtaggttatacgtattaagggtatagggattttggcgggtaggcgcggtgggcgtagggggttgggacgtcgaaattttgggagtggggatattgtggttagtattagtagggacgggagtttgtaggaaattattaattagagagggacgaggaagagagaaaggaggagggagggaaagttttggcggtattttgcgacgttgttataggtagtcggtttttttttatttggataggagtggttataatgtttttaaggaattttgtattggagattttaggaggagggttgttatttgtcgaaggttagtaagatataggtatgcgagtgtttattttgttcggtttttttttttttcgtatagcgttattagaagtagtattcgtggtttttaggttggttgagtagcggttttacgggcgtgtcgtttttttttattgggtaggtaggtatttttttttaggggttttggttttggttttgttgtgtaggttggtttgagttgatcgtattgtaggaggtggcgggaaggttttttttttttttgagggaagtggtttttaggggagagtagttgggggggtagttatagatttttaggtttatttagggtttagtgtttgtttttgcgggtgttggtatatttagtgttttagtttgggacgtatagggttgggatagagtgtagtatgaggatgatattgagagggtttcggggtttttttagtaggggaacgtggcgagagacgggtttttttaagtttcgtttattttgggtttggtgtagggttagttttaataaatgttaattgtggttattatttttttggggaaaagttgagggggtagatacgattgttaattttttttaaataggtgaggagatcgaggtttagagaggtaacgtgatttggatgttatatagttaagggggtagtagagtgaggtttaaatgttttgttttttgttaagtttttttttttttttttttttttttttttgagatggagttttattttgttttttaggttggagtgtagtggcgcgatttcggtttattgtaagtttcgttttttgggtttacgttatttttttgttttagtttttcgagtagttgggattataggcgttcgttattacgttcggttgattttttgtatttttagtagatagggggttttatcgtgttagttaggatggtgttgattttttgatttcgtgattcgttcgttttagttttttaaagtgttgggattataggtatgagttattg

SEQ ID NO: 2237 - DNA, 2473 bp, Artificial Sequence
  chemically treated genomic DNA (Homo sapiens)
tagtttcgatgtttgagtatttttaatgtttgatcggattttttattttttatttttttttgggtgatgtcggttattttggtttgtttttagttagaatttagtttggttagtttagatagagtgatttatttttttagttattttttatttattaattttatttggagttttgtttttgaatttttatatttttttgtgtttgaaatggagtataattttttttttttgttgtaaaattttattgtaggggtttttgtgagtagagattgttttatcgtttggaataagttttagaagaattttatttttaatatgggaagtggattagagggtagagtttttagggtttttttttttagttggtagtttatagttttatttttagttttagaggtataggttttttattgtcgggttaggaatgggaatagtaggggtttcggagtgggtagggggttttcgggtaggaggtgtatagagggtatgggttggttatttcgggtttggtaatggttatttgttttttgtatatgatggttttatagggtatttttatgtttattatgttataaacgatgttttaaggatttgaatcgggggtggaattgatatttttggatttttaagtttaggtgtattttaaaattgtcgagataggatggttgaggttttagaattttaaggcgtaatattatttatttagtttaagttgtggttttaaatttttatttgaaaattttggttttgtttatgtgggttagattatgttgggtaggaggatttggtttttgaggatttagttgtttagagtggtttagatttaaagttaaaaggatgttttttttattttttttttgggttttgttttttttttaattttggagtgtgtggttagatgttagttagatgaggtttcgtatttttggatagttttttgatttttttttttttttattacgaggcggtttttgttattgggttttaggataaagtttcggggtagtttggatggtgttttgattttaatttttttagggggtttttagttaagggttttttttgtatggaatttttaaagttagtaagaaatagaagttttttgaatattgttaacgttttgaatatttagtatttacgaaatttaagcgaattagttaaaaataaaaacgtggtgatgattatttgttgtgggtttaatttaatttgaggatttatttaaaataaaattttggggaatgaaaatagaagttagtagtatatttttagggttagtagggagtatatttgtttagtatttgagtttttgttaggtgttagattttgtttttgatagttgtgttgggcgtgcgtatataagtttcgggcggaggttagggttgtatttagcgtatatgagatgttacgtgggattggaaatgttttttgcgtttttttgagttatatgaaattattgagaagtttttgatttgggggttattagaggaatttggtttattttgtttggaatatagagggaaggttggttacggggaaaatttagaggcggtaatttcgtgtttttaatagatagtatgagttattatgagaaggggaaaggggatttggtttttagatatatattaaggattttaatgtggatagtggtaaggtgttgtttttgattttttattcgtcgtttatttaatttggtattttagggttgtatcggtcgagttattattaaggtttatttttcgtttggtttaggatttttttggagatgagggtagataagtggatggtattttttgttttaaggtttcggggttttatgaagtagtcgtttttattgaatagttttagtagttgtagtgtttttttttgtattttttagaatttgttgttttgaagtttcgtttgttattattgtgtttattttttttagttagttatatagaataaatttatttttttgttttcggaaaaggggttaggtttttggatgtttgaaaatagttgttttgttttttttgatttttttttcgttatcgtcgtaatttaaggcgaggagttgttatttataaggtatttattgtttgtcgagggttttatttaggttaggacgcggttatttttatttagagatgaagaaattggggttcggcgaggttaattgtttgtttagggttatatagggaataggagacgttggatgtaaatttagtttcgtttggttttgaaggttgtttttttttcggttttgtagagcgttagttttttttttataagttggatgttttcggtttaatattttatagagaaaaggtttttaatgttttttttgttattagcgtttttttgtaaaagagtattttgaatgtttacgttagttatagaggcgttttttttattttttggtaggtgggttttttttattttttttttttgtatcgattggtatgtatttaggttaggtagtagaatgtttggt

SEQ ID NO: 2238 - DNA, 2473 bp, Artificial Sequence
  chemically treated genomic DNA (Homo sapiens)
gttaggtattttgttatttgatttgaatatatattaatcgatatagaaaaggaaggtgagaggagtttatttgttagagggtgggaggggcgtttttgtggttggcgtgggtatttaggatgtttttttgtagagaagcgttgatggtaggggaggtattggaggttttttttttgtggggtgttgggtcgggggtatttagtttatagaagagaggttggcgttttgtagggtcggggagaaggtagtttttagaattagacggggttgagtttatatttagcgttttttgttttttgtgtgattttgggtaagtagttaatttcgtcgaattttagtttttttatttttaaatgggaataatcgcgttttgatttaaataaaattttcgataaatagtaggtgttttgtaagtggtagtttttcgttttaggttgcggcggtggcgggggaggggttagagaggatagggtagttatttttaaatatttaaggatttgatttttttttcgaggataagggaatagatttgttttgtgtgattgattgaagggaatagatatagtggtgatagacggagttttaggataataggttttgaggaatataggaaggaatattgtagttgttggagttgtttaataggaacggttgttttatgaggtttcggagttttggagtagagggtgttatttatttgtttgtttttatttttaagggagttttggattaggcgagaggtgggttttggtgatgattcggtcggtatagttttggggtgttaggttgagtgggcgacgggtggagggttagggatagtattttgttattgtttatattgaagtttttggtgtgtgtttggaagttaagtttttttttttttttttatggtgatttatgttgtttgttgagagtacgaagttgtcgtttttggatttttttcgtaattagttttttttttgtgttttagataaggtgggttaggtttttttaatggtttttagattaagaattttttagtagttttatgtaatttaagggagcgtaggaggtatttttagttttacgtagtattttatatgcgttaagtgtagttttggttttcgttcggggtttgtgtgcgtacgtttagtatagttgttaggaatagggtttggtatttggtaaggatttaggtgttgggtaaatgtgttttttattagttttggaggtgtgttattgatttttgtttttattttttaaggttttattttaagtaaatttttaaattggattaaatttatagtaaatgattattattacgtttttatttttaattagttcgtttgggtttcgtggatgttggatatttaggacgttagtaatgtttaggaagtttttattttttattggttttgggggttttatgtagggaagatttttgattaggagttttttggggggattggggttagaatattatttaggttgtttcgaggttttgttttgggatttagtgataaaggtcgtttcgtggtggaaggaaaaggggattaaaggattgtttagaaatgcgggattttatttggttggtatttggttatatattttagagttggggaggaggtagggtttaagggagaggtgggagaggtatttttttggttttgggtttgggttattttggatagttgggtttttagaaattaagtttttttgtttaatatggtttgatttatatgaatagggttagggtttttaagtaggagtttggggttatagtttgggttggatagatagtgttgcgttttagggttttagggttttagttattttgtttcgatagttttgagatatatttgagtttggaggtttagagatgttagttttattttcggtttagatttttagggtatcgtttatagtatgatgaatatgaggatgttttgtgaggttattatgtgtagggagtaggtggttattgttaggttcggggtggttaatttatgttttttgtgtattttttgttcgagggttttttgtttatttcggagtttttgttgtttttatttttggttcggtagtggggagtttgtgtttttggagttgagagtgggattatgggttgttagttgaggagaagagttttgggggttttgttttttggtttattttttatgttaagaataaaatttttttgaggtttattttagacggtaaagtagtttttatttataggggtttttgtaatgaggttttgtaataggggagaaagattgtgttttattttaaatataaggaaatgtggggatttagaagtaaggttttaggtggaattggtggatggaagatggttaagagggtgggttattttgtttaagttgattaggttggattttggttagaggtaggttagggtgatcgatattatttagaggaaggtaggggatgaggaattcggttaggtattgagggtgtttagatatcgaaattg

SEQ ID NO: 2239 - DNA, 2498 bp, Artificial Sequence
  chemically treated genomic DNA (Homo sapiens)
taaaacgtaagggagggtatgggtattttttattttttataaataggattttgttttttataatttttttatcgttttatttttatttgattaaattttaaatgaatatttgaggtagataattataagagatttttttcgaaagtaaaatcgagatgaaattttcggttaaatgggtttgtttattatagcgtggatttggagagagacgtaagtaagaagaaaagttttggttgggtgtagtattttacgtttgtaattttagtattttgggaggttgaggagggaggatcgtttgagattaggagtttaagagtagtttgggtaatatagtaagattttatttttatgaaaatataaaatattagttaggtgtggtggtatatatttgtagttttagatattttggaggttgaggtgggaggatcgcgtgagtttaggagttggaggttgtagtgagttatgatggtgtttttgtattttagtttaagtgatagagttagattttgtttttaaaaaaaaaaaaaaagagagagagaaaaaaaaaataaaagtttagtttagtattgtggtttatgtttgtaattttagtattttggaaggttaaggtgggtagattatttgaggttaggagtttaagattagtttggttaatatggtgaaatcgtgtttttattaaaaatatatatatatatatatataaaatattagttgggcgtggtggcgtatgtttgtaatgttagttattagggaggttgaggtaagagaatcgtttgaatttagaaggcggaggatgtaatgagtcgagattacgttattgtattttagtttgggttatataagtgagattgtatttttaaaaaaaaaaaagaaagaaagaaaagaaaaattttatagggtatattatttttattttgagttagtgatttaggttgatgataaagtagtgggaatagttattagggatttttatttattaggtatagtttttaagggttatatatggtttgtttggtaattgttcgtggagaattcgttattatatatatgtagagtagaaggtgtgattaatgcgtttttaaatattattagtattgttgtcgtgattttgaggagttttttaatattaacgagggattgatttttttagttttatataaatagggaatttaagaagtgggtatatggggttagggtatttaaaattttaaggagttttagaaaatgtataatttttgttttagatttatttttttattggttggcgttgtaatatatttagtcgttgagggaatttttgttagttgtcgcggttatttttttttttttgaacggtatttaagattatttttttaaatttcgtaggtaaattttttattgtttattggagaatgagttattttatagggggacgtttatttttttttattttatgtaacgtgttatttttttttttttataggttttcgatgttttttgtgtaggaggagaagtatttgtatttatgttaaggtttagtgacgtttgtaatgtgttagacgttgggcggagtgttttttattatttgttttaattttcgttacgatttcgtttaatttaaaagatagatgaggaaattgaggttcggggtagtaaggagattagtttagtggaaggttataggtttggttttttgtattgttttttttttcgaggtttgggacgtaaaatttgattttaatgtttagttattaggtgattaatggaggaaatgtgagtattttcgtgtagtttattatagttaggtgggttttgatgtttgtaataagttttattcgggtaggatagtggttgaagtttagattatagcggtttaggtaaatgtaatttacgaaagtagaagttggttaagattagtgtttttaaggataagggaggaagaaatgaggtgggcggggttgggataaggaatttttatataggggtattttttttttttttatttatttttgtagagatgggggtgaagatttttgatttcgaattagttttatttgggtttatttcggtttttttgtaggaaatttttattattttttttatattttaggggttaaaggtagtagggtgttagggtgattatgatgaatgttgtttttggatggggtttttattttttaggtttgggattaggataggatgtatttttgtaataaagtatttgtgttttttggtatttagtaggtattagttatatcggtaggcgttttttttttattggggttttaggagatgttagaattgagttattggatagaatagttgattgaggattagtgaggtagtacggttttgttttaattatatttcggtttttaggttaggggttcgaattattgtttcgttatttgtggggaataaatgggaagatttaaatagttaacggtatgatttggtgacggttatgaggaggtaagatatagagttggtttttatttttagtatttgttggtaggaaa

SEQ ID NO: 2240 - DNA, 2498 bp, Artificial Sequence
  chemically treated genomic DNA (Homo sapiens)
ttttttattaatagatgttggagataaaaattaattttgtgttttgtttttttatggtcgttattaggttatgtcgttggttgtttaggtttttttatttgttttttataggtgacgggatagtggttcgaatttttagtttgggggtcgggatgtgattggggtaaggtcgtgttgttttattgatttttagttagttattttatttagtggtttaattttggtattttttaggattttagtgaggaggaagcgtttgtcggtatagttggtatttgttgagtgttagggagtataggtgttttgttgtaggagtgtattttattttggttttaggtttagggggtgaggattttatttagagatagtatttattatggttattttggtattttgttgtttttggtttttgaggtgtaggaggggtgatgaggattttttgtagagggatcgggatggatttagatggggttggttcggggttagggatttttatttttatttttgtaggggtgggtagggaaggaagggatgtttttgtatgggaattttttgttttagtttcgtttattttattttttttttttttatttttgagaatattggttttagttagtttttgttttcgtaggttgtatttgtttgggtcgttgtggtttgggttttagttattgttttattcgagtgaggtttgttatagatattagggtttatttgattgtggtgggttatacgaggatgtttatattttttttattagttatttgatggttaggtattggagttagattttacgttttagatttcggggaggaggatagtgtaggaagttaggtttgtggttttttattggattgatttttttattgtttcgggttttagtttttttatttgttttttgggttaaacggggtcgtggcgaggattaagatagataatgaaaagtatttcgtttagcgtttggtatattgtagacgttattaagttttggtataaatatagatgtttttttttttgtataggaagtatcgggaatttgtgaggggagggggatgatacgttgtatgaagtggagaggagtgggcgtttttttgtgggatggtttattttttagtgggtagtgagagatttgtttgcggaatttaggagggtggttttgggtgtcgtttaggaaagagaaagtggtcgcggtagttggtagaaatttttttaacggttagatgtgttataacgttaattagtgagaaaatgaatttgagataaaaattgtgtattttttggaattttttagagttttaaatattttggttttatatatttattttttagattttttgtttgtgtagggttggaaaaattagtttttcgttagtgttgggaaattttttaaaattacggtaataatgttaataatatttaagagcgtattaattatattttttattttgtatatatatggtgacgggttttttacgggtagttattagataaattatgtgtagtttttaaaagttgtgtttggtgggtaggaatttttggtagttgtttttattgttttgttattagtttgggttattgatttaggataaaaatgatgtattttgtagaatttttttttttttttttttttttttttttttggagatgtagttttatttgtgtggtttaggttggagtgtagtggcgtgatttcggtttattgtatttttcgttttttgggtttaagcggtttttttgttttagtttttttggtagttagtattataggtatgcgttattacgtttagttaatattttgtgtgtgtgtgtgtgtgtatttttagtagagatacggttttattatgttggttaggttggttttgaatttttgattttaagtgatttgtttattttggttttttaaagtgttgggattataggtatgagttatagtgttgggttggatttttattttttttttttttttttttttttttttttttttagaaataaggtttagttttgttatttaggttggagtgtaggggtattattatagtttattgtagtttttaatttttgggtttacgcgatttttttattttagtttttagggtatttaggattataggtgtgtgttattatatttggttaatgttttatgtttttatagagatggggttttgttgtgttgtttaggttgtttttgaatttttggttttaaacgattttttttttttagttttttaaagtgttaggattataggcgtgagatgttgtatttagttagaatttttttttttgtttgcgtttttttttaaatttacgttatggtgagtaaatttatttgatcggaggttttatttcgattttgttttcggaagaaattttttgtgattgtttgttttaagtgtttatttagggtttaattaaataaaggtggggcggtaaagggattgtagggagtaaaattttatttgtagagagtggggaatatttatgtttttttttgcgtttta

SEQ ID NO: 2241 - DNA, 2460 bp, Artificial Sequence
  chemically treated genomic DNA (Homo sapiens)
atttttgaggtagtatttattggttttatcgatttttggtagtttagagtgagggtgaagagatgtttgggtttacgttttaattttattaattatatagtatttttgggtaagttatttatttataagttttagttttttattgtaaaatgtgattataatagaatttgttttaaggagtgagtttgatgattttttttttgtgtgaaatgtttagtgtttaatatagagtaagatgtttataatgattgtcgtttgttgtttcgcgtattgttttgatttgtgagtgttgttgattgtgggtgagcggttggtgaggttgggttttggatggtttttggatgtttttttttttttttatttttaggttcgtggagttatcgtagcgtttttattatttgtggttttattttttttagttgtagtttttagtagttagttatagtttgaaaatattaaagagaaaattttagaaataatttataatttgatattgtatgttattttgagtagggtgatgaaattatgtagcgatgatcgtgatttatttttttgtttagcgttttcgcgttgtaggcgttttcgttcgtgagttattttgtagtttttttggtgattagagagaaaaagtttaatttatagagggtttcgtattattcgcggttttaggaatttacggggggtgtcggagggtaggggttattgtaattttttgtttttcgtgaggtttgtattaggtagttttttgtcggtggtttggttcgggtttttgagattgtttttgaaagggaaagggattttgggtttttgggaattgtttaggaggtagggtagagggatttttagaagttgtagtaagtagttgtattattagttacgaggttgagaattaaggggaggaaggtgagttgttagttgtatggggttatatttgggtggggggatagagatagagtagtatagtttttgttagtaaggttgttaacgaagatttaggtagagagtaatttggggtgagtttataaggtggcggttagttatttatttttttatatttcgtggttatttttaggtgagttgagcgaagtttttggtttcgttatattttttaaggtaaaggtagttttcgttattatttttttgtttttatttgtttagaaatttttagtaggtatttttttttttttttaggaggaatggaatgggattttttgttttgttatcgtaggatttcggcgaggtttgtttaggggttttggtgagagaaaagcgtgataggaagcgtatgttagtaggtatttggagatgtatttttggtgatatgtataggtacggtagtcgttttatttattataggttttcgttcgggatagcggggtatacgtataatatagacgaggtttagagatgtagagatttttaataaattttttttatgttagggagataggagatttagttgggaatgagtttatattatgaagttttttttttaggagtttatatcggagtttaggagttttgttttattttagggttttcgtatttattattttttggcgggagtgagtgttttagtatagggttttataggtaggatttttgatattttttaaattttagagaggttttttcgattttatttatatgattttattttagtgatttgttttatttttttatagtcgtttttatttttaaattgtttttttttttgataggattttgttttgttatttagtttggagtgtagtggtgtaattatgtatggtttattgtagttttgattttttaggtttaagcggatttttttattttagttttttaagtagttgggattataggtacgcgttattatatttagttaatttttaaattttttgtagagataggttttattaggttgttttaaatttttgggtttaagttattttttcgtattagttttttaaagtgttgagattatagacgtgagttattatatacggtaggtaaggaagggttgaggggttgttaatagtaaaggtttagtttttagttaagttaggttgttcgtgagaaaggttttttgtgtatttgggtatatgtggataggtacgggtgtgatgttagtttttatttgtagtttgtaggtgtgtttgtggtattgggtgtttatgtgtgtgttttgagtttgggggaagatagatagattatttttaggggtttttgttttttgcgttttgttattttggttatatttagaattcggtatagagttttggataagtagttaggttcggttaggatattttagattagtaaatttttttttttttgggttggtaggtagcggggttttaggtttagtttaagggatggggaagggaggggataggttgggatttttgtttagttagtatttttattaggacgagatttaattatggagattgataagaggtagtatttaggagatta

SEQ ID NO: 2242 - DNA, 2460 bp, Artificial Sequence
  chemically treated genomic DNA (Homo sapiens)
tggttttttgggtgttgttttttgttagtttttatggttagatttcgttttggtggggatgttgattgggtaggggttttagtttgtttttttttttttttattttttaggttgggtttggagtttcgttgtttattagtttagaaaggaaagggtttgttggtttgagatgttttggtcgagtttggttgtttgtttagggttttgtatcgagttttgggtatggttaggatgataggacgtaaagaataaaggtttttaggggtagtttgtttgtttttttttaggtttaggatatatatataggtatttagtattatagatatatttgtaggttgtaagtggaggttggtattatattcgtatttatttatatgtgtttaagtgtatagaaagttttttttacgggtagtttggtttgattgggggttgagtttttgttgttgatagttttttagtttttttttgtttgtcgtgtgtggtggtttacgtttgtaattttagtattttgggagattgatacgggaggatggtttgagtttaggagtttgagataatttagtgagatttgtttttataaaagatttaaaagttagttgggtatggtggcgcgtgtttatagttttagttatttgggaggttgaggtgggaggattcgtttgagtttgggaggttaaggttgtagtgagttatgtatgattgtattattgtattttaggttgggtgatagagtaagattttgttaagaaaaaaggtagtttagaagtgaagacggttgtgaggaaataaaataggttattgggatggagttatgtgggtggggtcggggaggtttttttgagatttgaaaggtattaagggttttgtttgtggagttttgtgttggaatatttattttcgttagggaatggtgagtgcgaaggttttggggtgggataaggtttttgggtttcggtatgagtttttgagggaggggttttatgatatgggtttatttttagttggattttttgtttttttagtatggagaaggtttgttgggggtttttgtatttttgggtttcgtttgtattgtgcgtgtgtttcgttgtttcgagcggaggtttgtggtgggtggggcggttgtcgtgtttgtgtatgttattaagggtatatttttaagtgtttgttggtatgcgttttttgttacgttttttttttattagaatttttagataggtttcgtcggaattttgcggtgatagaataagaagttttattttattttttttgaaaaaaagaaaaaatatttgttgggaatttttgagtaagtgggaatagggaggtggtggcgggagttgtttttgttttaaaaggtgtgacggagttagggatttcgtttagtttatttggggatggttacggggtgtagaggggtgagtggttggtcgttattttgtgggtttattttaaattgttttttgtttagattttcgttgatagttttgttggtaggggttgtgttgttttgtttttgtttttttatttagatgtagttttatgtagttggtagtttatttttttttttttggtttttaatttcgtagttgataatgtagttatttgttgtaatttttgggggtttttttgttttgttttttgggtagtttttaggagtttaaagttttttttttttttaggagtagttttaggagttcgggttaggttatcgataggagattgtttgatgtaaattttacgggaggtaggaaattatagtagtttttatttttcgatatttttcgtggatttttgaaatcgcggatagtacggaattttttgtggattaggttttttttttttgattattaagagggttataaagtgatttacgggcgggaacgtttgtagcgcggagacgttggatagaggaatgagttacgattatcgttgtatgattttattattttgtttagaatggtatgtaatgttaaattatgaattatttttgaaattttttttttaatatttttaggttgtggttgattgttggaaattgtaattaaggaaagtgaaattatagataatgggggcgttgcggtaattttacgggtttgagagtgagggaggaagggagtatttaggaattatttagagtttaattttattagtcgtttatttataattagtagtatttataggttaaggtagtgcgcgggatagtaggcggtaattattgtgagtattttgttttgtattaggtattgagtattttatatagagaaaaagttattaggtttattttttgaggtaggttttgttatgattatattttatagtaagaaattggggtttgtggatgaataatttgtttagggatgttgtatgattggtggggttgggacgtgagtttaggtatttttttatttttattttaggttattaggggtcggtaaagttaatgaatgttgttttaagggt

SEQ ID NO: 2243 - DNA, 2300 bp, Artificial Sequence
  chemically treated genomic DNA (Homo sapiens)
tttttgttatggggttatggttggtagaggtagtttttttgaatttagggtttgttaggttgatggaggaagttattgtaggataagggggtgatgtattattatggggtagggttatatgattttaaagttgtatttagttttattttagtggtttataggtgggttgtagtaggataatgtttaattttgttaggttagggagggtaaaattttatgtaggttaggttaggttaggaaggagaatagagttatatttattaagggtaggaggatttaggggagtttataaaggttagatgggtgtaggaggtatagttagttatgttttgtagggtgagtagagtatggataggttagagggttatgaggttaggttttggaggttagtagaaggtatgttggggttttttgttttttatatgtatgtttgagttatagtttttagagttatagttttaaatagacggttttgtttttagtggtggtgatttgagtgttaggatgtcgttttgtttatttgtttgtattttaggttgtaagagtgtaggtatcgttgtgatataggttttcgaggttattaggtaagtattagggtttaggttgggtattaggttagaggataagattgggtttttggtttggtaatatttttttttattgttttttttgtagttgattttttagatttaaatatgaggtttttttttaggtttggtttttttttattaattttagttggttagggttttgattttgtaatcgtttgtggttttttagtttttcgttttgttttgttttttatttttgagagttgtaggtttttggtttaggaataaatttacgatgtagtttttgttttatttgttggtttattagtattatattgttagtattatattgttttatgttgggttttttgattttttttatagtttttttgttttataaagattataggatgggtatttattattttttaagttttattttttattagggtggagtttatgtgtagtgaaggtttagtttgcgttagggacgttgggatggagtgaggcggtaagtttaggtgttttttacgttttgaagttttttgtttgagttcggaagtgaggtatgtggttggtgttttttgtaggtttttttgatttttgttagatagggtttagttaagaaataagattaggaaattaggcgtttatatagagattttgttattatttgaggtttattattttttcggtgtttattaaatattagttagtgtggtttttatggtttgttttaaggaatagaggaaattaggaagtttgagtttgaaatgtttgtaaagtaaggggagttttgggtataagtaggggtttgagttgagggaagggtttatattcgggagatgtttgtttgttttgatgaggttgtcgtagtggcggaattttgataagagtgtattgtgaggtatcgtgtttatttttagttgttttgtgagataagtatttgagtttttatgatttttaagttaggaataggaggtttaaagaggtgtttagggtttttaaggtttattgagaggtattagtagggaagtagtttagatattatggaaggggtttttagtgtattgggatagtttgatttattttaggatttacgggggttatagttaggagtgttttatggcgttggataagaagagtggttgttttggttttggagagagggggtttacgtggtttatcggttttttttattgttgttagttgagttttttttatatataggtgttttgtagaggattagtttggtttagatttgaggttttagatgattagtatacgtgaattgttttcgtattagtgaggtggtttttttgtttttttttttatttaaattttattgtttgtttaggaggtgatgggttaagttgggtattaaaattattttaattgttatttttaagtgatttattagggtttagagaggtagatttaggtttagtatttattttgtgtttgtttttttatttttgaatttttaggtttatattttgttggtggttagattacgttttttttaatttcggaggaagttttttattttaaaaggattttgttatttttgtttggttttatttttgtagttttaggatttttattttaagttttattatttggtatgagagttgatgtggatttagggcgcgtttagtaagtgtttgtttagtaaattaataatacgtgttaatggttatatttgttatttaattgatgtaaaatttggggttagaagtatagttttta

SEQ ID NO: 2244 - DNA, 2300 bp, Artificial Sequence
  chemically treated genomic DNA (Homo sapiens)
tgggggttatgtttttgattttaaattttgtattagttaaataatagatatgattattagtacgtattattaatttattgagtaaatatttgttgagcgcgttttgagtttatattagtttttatgttaggtgatggagtttgaggtgggagttttggggttgtaggaatagagttaggtagggatggtagggtttttttggggtagggggtttttttcggggttgggaagggcgtgatttggttattagtagggtatggatttgggggtttaagggtgaggggataagtatagagtgggtgttaggtttgggtttgtttttttgagttttgatgggttatttggggatgatagttgagatggttttaatatttagtttagtttattattttttgggtaggtagtggaatttaggtaagaggaggagtaggagggttattttattgatgcggaaatagtttacgtgtattggttatttgaagttttagatttaaattagattggttttttgtagggtatttgtgtgtagggagagtttagttggtagtagtgggaggggtcgatagattacgtggattttttttttttaaggttaaggtagttattttttttgtttaacgttatgaaatatttttgattgtggttttcgtgagttttggggtgagttaagttgttttaatgtattaggagttttttttatggtgtttaaattgtttttttgttgatgttttttagtggattttggggattttggatatttttttgagttttttgtttttgatttagaggttatggaaatttaggtatttattttataaggtagttggaggtgggtacggtgttttatagtatatttttattaggatttcgttattgcggtagttttattaggatagataaatatttttcgagtgtgggttttttttttagtttaggtttttgtttgtgtttaggattttttttgttttgtaggtattttaggtttaggttttttggttttttttattttttgagataaattatgggaattatattgattaatatttagtgggtatcgaggagatgatgggttttaaataataataaaatttttgtgtagacgtttggttttttggttttgttttttggttgggttttgtttggtaggagttaggaaagtttgtaggaggtattaattatatattttattttcgggtttagataggaagttttagagcgtgggaagtatttgagtttgtcgttttattttattttagcgtttttgacgtaggttgagtttttattgtatatgggttttattttagtaggaggtgaagtttaggagatggtgggtgtttattttgtaatttttatagaataggaaggttataaagaaggttagagggtttagtatgggatagtgtggtgttggtagtgtggtgttgatggattagtaagtgaggtaggagttgtatcgtgggtttgtttttagattagaggtttgtagtttttagagatgggggataagatagagcgggaggttgaagaattatagacggttataaagttaggattttgattagttgaagttgatgagaggaggttaaatttagagaagagttttatatttgggtttgaaagattaattgtagaggaggtagtggggaaaggtgttgttaggttagaagtttagttttgttttttgatttagtgtttagtttgggttttggtgtttgtttggtgatttcgggagtttgtgttatagcggtgtttgtatttttgtagtttggagtgtagataggtgggtaaagcggtattttgatatttaaattattattattgaaaatagagtcgtttatttgaagttgtagttttggaaattgtgatttaagtatgtatatgggaagtaagaagttttagtatgttttttgttggtttttagggtttggttttatagttttttgatttgtttatgttttgtttattttgtaaaatatgattggttgtgttttttgtatttatttggtttttgtgggtttttttgggtttttttgtttttggtggatgtggttttgtttttttttttggtttggtttggtttgtatggggttttgttttttttggtttggtagggttaaatattgttttgttgtagtttatttgtgggttattggggtagagttggatgtagttttggagttatgtggttttgttttatggtagtgtattatttttttgttttgtagtgattttttttattagtttgatagattttggatttagaggagttgtttttgttaattatgattttatggtaaggg

SEQ ID NO: 2245 - DNA, 2300 bp, Artificial Sequence
  chemically treated genomic DNA (Homo sapiens)
ggtgtaaggttggggtattagggataaataatttagatatgttagtgtgttgatttgtaaagtacgttagaaggtagttgaggttttagttttagttatagcgtattttaaggttagagtaaaaagttggttggttttttaggtttttttttgtaaggcggttgggttaaaattaaagattttgttgtataatataggtttgttatttttttggtggtggtattagggattaataagattagtatttttagttatattagttagttttattatagttattttataggatggtattttataaattattaagatgggttagaattgattatgagaagtaagttattgatgtttacgtgatgtataagttatagttagtgaagtagtattgataggtatagaaattttattttttattacgggggtttttttttatttttagggagttatttttagaattttatttttttgttgattttagtgcggtgatggtagtttttttgtttagcgcgtgttatagagaaggttatacgagtaggatgttatgttttaatataggttattttgcgtaggtttcggtgggttttgcggggtagttttttggtgtgttaacgattggtgatttttggaatggatatatattattttattttagcgtttagtattttttattgatttttttttgttatttagtaattattaattatggttgggttatttgagggagtgataagattattttatgtgtattatttataggttttttttgttaagttggataggttttgggggtgttattttgaatttaattttgaatgggtgttttttaaggtatttattagtttaagtttttttatttatagggattgattaatataattttaagtttttttttgtagttattagtaggttataaagagtaaagggtttaggaacgtgttaagaagttgttttttggtttttcgttattttagttatttttgattataaggttgtttttagaaggaaggtagtagagaatggttttatattgttcgattcgggcgttgtatttagcgtttattttgagttttattaacgaatagttgggtttgaaattattttttttttaggtttgtatagtaatttaagttatcgtaaagtttatttttgtagtttttgtttttggttatttcgatgacgtcgattattttattttgtttaaatatttggtttataggtatttgttgtttaagtttttcgcgggtttagtttagtttttcggttatagtgttttcgtttatttggatttttattaggtgggtttttttttggcgtagaggaagtaggcgtatttaggagaaggtagatatagtttagttttagttgttagcgttttttttatagtagaggaattgtagttttatgcggtttgattgatgttaagtatacggtaaaaagttagtaattttgaataagttattgaattttattaagaggaaggaatttttatttttgttaatagtaataatttaattttggatattggtgtttgagttattgttaggatgagcggataagatttatattataggtaaataattagattttagtttttattagtttaatgtttttgtggttgttttttgggttagttttttttggggtattgtagtggttttattttagttatttatatttgttttagtgataagtttgtttttgagagagtataagttttaagtaagaaaatgtattatcgggagcggtggtttatatttgtaattttagtattttgggaggtcgaggtaggtggattatttgaggttaggagtttaaaattagtttgattaatatggagaaatttcgtttttattaaaaatataaaattagtagggcgtggtggcgtatgtttgtaattttagttatttaggaggttgaggtaggagaatagtttgaatttagaaagtggaggttgtagtgagttgagatagggttattgtattttagtttgggtaataagaacgaaattttgtttttaaaaaaaaaaaaatgtatttaagtataaagtttttatttaaggatagtttggtaatgttttgataaaattttaacggtggatatgtatttttattcgtggtggtttttattatatggggttgtatttagtatttgagattagttaggataattagtaataggatagtaagaggtatttattttaattaagttaataaaaagtttgtttagtttattaattaggtttttaggagagtagttagtattttataatcgatttttaggtaggtattttagtgttattg

SEQ ID NO: 2246 - DNA, 2300 bp, Artificial Sequence
  chemically treated genomic DNA (Homo sapiens)
tagtaatattgaaatgtttgtttgaaagtcggttgtgaggtattggttgtttttttggaaatttagttgatgagttgagtaggttttttattgatttggttagagtgggtgttttttgttgttttgttattggttattttggttgattttaagtgttgagtgtaattttatgtggtgagggttattacggatgagagtgtatgtttatcgttgaaattttgttaggatattgttaggttgtttttgagtgaaagttttatgtttaaatgtatttttttttttttagagatagaatttcgtttttgttgtttaggttagagtgtaatagttttattttagtttattgtaatttttattttttaggtttaagttatttttttgttttagttttttgagtagttgggattataggtatgcgttattacgttttattaattttgtatttttagtagagacggggtttttttatgttggttaggttggttttgaatttttgattttaggtgatttatttgtttcggttttttaaagtgttgggattataggtgtgagttatcgttttcggtgatgtatttttttatttagagtttgtgtttttttaaaagtaggtttgttattagggtaagtgtaggtggttgaggtaaaattattgtagtattttaaaaggaattgatttaaaggatagttataggaatattgggttggtaggggttgggatttggttgtttgtttgtggtgtgggttttgttcgtttattttgatagtaatttaggtattagtatttaaagttaagttgttgttgttggtaaaaatgaaagttttttttttttggtgaggtttagtgatttgtttagagttattggttttttgtcgtgtgtttgatattaattaggtcgtatggagttgtagtttttttgttgtgggaggagcgttggtagttggagttgagttgtgtttatttttttttagatgcgtttgttttttttgcgttagaagaaggtttatttgatggagatttaggtgaacggaggtattgtggtcgagaagttggattgggttcgcgagaggtttgagtagtaggtatttgtgaattaagtgtttgggtaggatgagatgatcgacgttatcggggtgattaagggtaaaggttataaaggtgagttttgcggtggtttgagttgttgtgtaaatttgggggagaagtggttttaggtttagttgttcgttgatgaggtttagagtgagcgttgggtatagcgttcgaatcggatagtgtagaattattttttattgttttttttttgagaatagttttgtggttagaagtggttgggatagcggagggttaggggataattttttaatacgtttttggattttttgttttttgtagtttattgataattgtaaaggggagtttggaattatgttagttagtttttgtgaatgggggagtttaaattaatggatgttttaaaaagtatttatttagaattgagtttagggtgatatttttagagtttatttagtttgataggggagatttgtgggtaatgtatatgaaataattttattatttttttagatgatttagttatggttggtaattgttgagtagtaggaaggggttagtgggaggtgttgggcgttgaggtgaagtaatgtgtatttattttaggggttattagtcgttggtatattaagaagttgtttcgtaagatttatcgaggtttgcgtaaggtggtttgtattggggtatggtattttgttcgtgtagttttttttgtggtacgcgttgggtagaaaggttattattatcgtattgagattaataagaaggtgaggttttgagagtggttttttgggggtgggaagaggttttcgtgatggggagtggggtttttgtgtttgttagtgttgttttattgattgtagtttatgtattacgtggatattagtggtttgttttttatggttagttttggtttattttgatgatttgtaaggtgttattttgtagagtggttgtggtggggttgattggtgtggttggggatattagttttattggtttttgatgttattattaggggggtgataggtttgtgttgtatagtaggatttttagttttagtttagtcgttttatagaaaggaatttggagggttagttagttttttgttttgattttgggatacgttgtgattgggattgaggttttagttgttttttagcgtgttttgtaggttagtatattggtatgtttgggttatttgtttttaatgttttagttttatatt

SEQ ID NO: 2247 - DNA, 2487 bp, Artificial Sequence
  chemically treated genomic DNA (Homo sapiens)
ataaaaataaaaataaatagaagatattgataatagttgattttattttttattttaaaagtggtgattttatataatttaatttaatattaaggtatttttgttatattgtattagtttttaaatattatattttttattttatttttatttttaagttattattattataataattaagagaaggtaaatataggttagagatttgatttttgttttttgtatgtatttatttttgtagatttataaataatttatattttgtagttttaaggtttttaattatattagattttgttttttattttatttagagttattgtttttgttgtttgttttttatatgtgataagttaattttttatgttattttttttataatttttatgtaaatttattatttttatttttatttattttttagagatgtatgattgtagaaaattttttttttttgaaatattgtttaatagagattaaatttaatatttagttttatttgtttatttttgaattataggttattgagaagttagaatagatagttatagaagtattttattaaatttatttttttattttttttaatatttgataaatatttattaagtatttattttgagtaagtattggagtaagtttttttataaatatgaagttgtgtaaataaggatgtatgtatttatgtaaatataagtttaatgttggatatatattgttttaagtgtttgatatgtattagtttatttatttttatttaaggggataagtgttattgttgtttttattttaaagatgaggaaattgaggttagagagattatacgaatttttaaaattttaatttttaattatagtatttagaatttatttggttgtagtggaggatttaatgttaaaaaagtaagtgttttttttagattatgaatataatgtgtgataaattagtagtttttttttttgttttaagatagtaaatatttatttaggttaatttgtgtttgttagagaataaagagtgggtttgttatattgtttttttttaagagggtttatttgttttcgtttttttggtatacgttaggggatatatattgtttagtatatttttgtagagttatattttattttatattttattataattttgttgaatgttaggtattattaagaaaatgtttatttatttttttttcgttatgtttaatgtgtgaattgataatatatttaaatttaaagaaaattaatagatattattttaattaatttgaaaagtttggtgatttatttttattttttttacggggtttttgttgggttgtttggtttttcggaattagtttttaggttttttgtagtcggggtgtagtttagtgttcgagttttttttttgttgtttattagatgagtgttgattttttttggtataggtatttgagttgtatttgaattgtagaatatgttgtttttattttgtgttgattgtgattttattttatgtgttttagaggtaggttaaataagtttgttttggaaaaaataatagggaagaagatgttgattttttaatttttagagtaagtttcgttattttggaggtaaagttataatatttaaatatggttcgatttatgttaggttttataaatatatatatatacgtggatgttgaaatcgtgtatgttttgatagttaaaaaaaaagttaaaacgatttattgttttattagtaggataagatttgataggttagtttattagaataaagaatataaaaaatgggtatttaatttttttatatagatatatatatatatatatatatatatatatatatatatatatatataatttgatgtaacgattttaagagagttggttgttttggtaatgaagaatcgtttgtatatttaaggatttttttgtttaaatttaagttagttatttgaatttttcgagtttttttgagtttagttttaggtttttatttttagatagaggtttgatatttatgttagtttttagtaaggtaggaagtttagaagtcggattaaaattttataagttagttagtttggatttgaattttagttttatggttttttagttgtgtgatttgggttagttgtttaattattttgaatttttatttttttatttgtataatgggaataataaaattaaaataaatttgtatgggtttattatgaaaattagattgattgatgatataatatatagtaagtatttagagttgtgtttgatttcgaatgtgagttatttgtaatagtgatttgaaatgggtttatattgtttggtaggaaattatttaatttttttttgtttttgattttaatttttgaagcgtttttattttatttttttttattttgtgtttgtggagaaggaggatgtttagttatttttggagtataattttttattaaaaattattattaagtttttttaagttttttttttgtagtaaa

SEQ ID NO: 2248 - DNA, 2487 bp, Artificial Sequence
  chemically treated genomic DNA (Homo sapiens)
tttattataaaagagaaatttgaagagatttaataatggtttttaataaaagattgtattttaaggatggttaaatattttttttttttataaatataaaataagaagaaatgagatgaaagcgttttaaagattaaagttaaaaataaaaaggaattgaatggttttttgttaggtagtgtaaatttattttaagttattattatagataatttatattcggaattaggtatagttttaaatgtttgttatgtattatgttattaattaatttaatttttataatgaatttatgtaagtttgttttaattttattatttttattgtataggtgaggaaatagaggtttaaggtggttaagtagttaatttaggttatatagttgagaaattatagagttgaaatttaaatttaggttggttggtttgtgaggttttggttcgatttttaagttttttgttttgttagaggttgatatagatgttagatttttgtttggggatggaggtttgaagttaagtttaagaaagttcgagaagtttaagtggttagtttaaatttaaataagaaaatttttgaatatataaacgattttttattgttagggtaattagtttttttgaggtcgttatattagattgtgtgtgtgtgtgtgtgtgtgtgtgtgtgtgtgtgtgtgtgtgtgtttgtgtagagaagttaaatatttattttttgtattttttattttggtgagttggtttattaggttttgttttgttaatgagatagtaagtcgttttgattttttttttggttgttagggtatgtacggttttagtatttacgtgtgtgtgtgtatttataagatttgatatgaatcgagttatatttagatattatgattttatttttagagtgacggaatttattttgggggttggagagttagtatttttttttttgttattttttttaaggtaagtttgtttagtttgtttttggggtatatgaagtggggttatagttagtatagaatgggggtagtatgttttgtaatttaaatgtaatttaaatgtttgtgttaaagaaagttaatatttatttgatgggtagtagagagggggttcgaatattgagttgtatttcggttgtaggaggtttggaggttggtttcggagaattaggtagtttagtaggagtttcgtgagaagggtgggaatgagttattagattttttaggttgattgaggtgatgtttgttgattttttttgaatttagatgtgttattagtttatatattgggtataacgggaagaagatgagtgaatatttttttgatagtgtttgatatttagtagggttgtgataagatgtggggtaagatatgattttgtaagaatatgttggatagtgtgtgttttttagcgtgtattaaaggagcggaggtagatggatttttttgggagaaaatagtgtgataagtttattttttgttttttgatagatataagttggtttgggtggatatttattattttagggtaaggggaagaattgttaatttgttatatattgtgtttatggtttgggaaaagtatttgtttttttgatattgggttttttattataattagatagattttgaatgttgtggttaagagttagggttttaggagttcgtataatttttttggttttagtttttttatttttaagatggaaataataatggtatttatttttttagataggaataaatagattaatatatattaggtatttaaaataatatatatttagtattaaatttgtatttatatgaatgtatgtatttttatttatataattttatatttatgggaggatttattttaatgtttgtttaagatagatgtttagtaaatatttgttaaatattgaaggagatagaagaatggatttagtggggtatttttatggttatttgttttgattttttagtaatttgtaatttaaggatagataggtaaaattgggtgttagatttaatttttattgagtaatattttaaaaaaggggagttttttgtaattatatatttttgaagaatagatggaaatggagatgatgagtttgtatgaagattgtgaaggaaatggtatgaagaattgatttgttatatgtgaaggataggtagtaaggataatgattttaaataaaataaaaaatagggtttaatataattagaaattttaaaattgtaaaatataagttatttgtgaatttataaaaataaatatatataaaaaataggagttaaatttttgatttgtatttatttttttttggttgttgtaataatgatagtttagaaatagaagtaaaatgaaaagtataatgtttaggagttggtatagtatgataagaatattttaatattagattaaattatataaaattattatttttggggtaaaaaatagggttagttattgttaatattttttatttatttttatttttat

SEQ ID NO: 2249 - DNA, 2435 bp, Artificial Sequence
  chemically treated genomic DNA (Homo sapiens)
tatgtaaaaatatgatgataaaatagtaaagtattgttgtgtgtttgagttgttggatagggatgatttagttaagaagatagcgagagaattttttagaaatatgtttttattatttgtatatagagatatgattgtttttttttaaagtattattatttgggagagggagttttggggggtgatgggaggttttgagttatagtttttatatattatatgggtaggaaggcgtaaggtgtattttggtgtatagatacggtgattgggtcgttaggtttttaagagaagagatgaacgagtttggggggtagatggaggtattagttgagggttagaggttggattttgggatttagaggggagggatagagttgaatgttttatttggggttattttggataatcgtgttttgggtaaagttaaggaaggcggtatagaagtttatgtatatagagggattttagtcgttacggttattttggagtaggtagaggaggaggtagaagatgggtagtgggggtggtgggaggagagaaggtaggttgttgttttggatgttagatttgtggttttggtgtttggggatacgggtgggagttgtaatatcgtttttttattttgatatatttaaatatttttatggtaggaaaggttttgagggaagagataaaatcgtttgggttacggaagttagtaataatattcgggatttttgggaggaatgattgagtttattattttaggagtttgtgtttgataggaaaagtaagggattagtgggatttttcgtgtattttttattttgtttttatttttttttttaagttttttttttagtttttaagtttaagttttcgttttgtttatttcgattttgaatttgtagaaatttttttattggttagggttgtgtatttttttggaggttttgagttttatatagtaggttgggggttgtgtggatggggtttgggggtttgtgtagtttattttttttgagaagagtagagggtggttttttaggcggttgcgtagtatagagtagaaggttacgttggtgttaatttttttagaggggtttggggagtttttaggtttgtttgtataaggagagaagtagtagtaggcgtggcgggtttttaatttttgggaaggggaagggggttatgaagtaggggtaatttatttgtatatatgtattgtttaaatttgtattttatgtatataagttttcggaggagcggtggtcgagtaagtttttgggttcgagcgttcggtgtttttattttatttaggtatagtgttttttggaatcgggaggttgttagttgttagtttttttgtcgtttatacggtgtcgttagtagttttgttaggtgttttcgttacgttattatggtttttgttagttagtttggatttttgagaggtaggagttataggttgaaggtttgatataagtattagtgagatgtttttttcgaagaatagttttgttttttttaaggattgatttttatttcggttttggtttttttaattttagagggtaggtacgggtttttagatatattgtttattacgttttgtttatttttttaatcggtttcggtgttttaggagttagtatagtaggtggtttagttttttttggattttttcgtttcggggttggtatcgattcgggtattcgtttttgaggttaaagttggggtttggatcgttagtggggggtgggttatagtagcgtagggttcgggtatttttatggtattggcgttgagtatttagggagaagtagtttagtttcgaagggcgtcggtagaaaggaaagggtttagagtagagggtagggtttgtgggtagagaaggtgttggacgaggtagtttgtttcgaggtttagttatttttgtttttttagttttttttttggtttttttgggatttatgaggttttaagataagtaggggtatagagtttttattttatagaggaggtttggagaaggatgattggtttaggattaagcgagttatttgatcgttaggttttggttttgaaatatttaggttttttagacgttatcgcggttaagtttttattttgtttttttttttgttttttatttattttttttttaggttttttaaatgtagtgaggttaggaaggacgtttgcgtttagattaagaatttagttattttaaagttttttaatttttattttcgtagagttatgacgttatggtaggtacgttagaggtcgaaggatgtaaaagtggttttttgttttcgatgatgtaattatttagcgatagtggcgggtaaatttttttcggggcgggggaggtgtgagttttacgaaggaggttgatattaacgtggttatcggcgtttttttacgtcgttaacgagttttcgggcgtgcgt

SEQ ID NO: 2250 - DNA, 2435 bp, Artificial Sequence
  chemically treated genomic DNA (Homo sapiens)
acgtacgttcggggattcgttggcggcgtggaggggcgtcggtggttacgttggtgttaatttttttcgtgaagtttatatttttttcgtttcgggaggggtttgttcgttattgtcgttgaatgattgtattatcgaaagtagaaaattatttttgtatttttcggtttttggcgtgtttgttatgacgttatagttttgcggaggtggaagttggggagttttgaggtaattggatttttgatttgagcgtagacgttttttttaattttattgtatttggaggatttggagggagggtgggtgaagggtaaggaaagaggtaggatgagagtttggtcgcggtggcgtttgaggggtttgaatgttttaaggttagagtttggcgattaggtggttcgtttagttttaaattagttatttttttttaggttttttttgtagaatggaaattttgtatttttgtttgttttaggattttatggattttagggggattaagagaggagttgagaagatagaggtagttgagtttcggaataaattatttcgtttagtattttttttgtttatagattttgttttttattttgggtttttttttttttatcggcgtttttcggaattgggttgtttttttttggatgtttaacgttagtattatggagatgttcgagttttgcgttattatagtttattttttattaacggtttaggttttaattttgattttagagacggatattcggatcgatattagtttcgggacgaggaggtttaggaaaggttggattatttgttgtgttggtttttggaatatcgaggtcggttggaggggtgagtaaagcgtggtaggtagtatatttggagattcgtatttattttttaaaattaggagagttaaagtcggggtgagaattagtttttagaagaaataagattatttttcgaggggagtattttattaatgtttgtgttagatttttagtttgtaatttttgttttttaggggtttaggttggttggtagaggttatagtgacgtggcgggggtatttgataaaattgttgacgatatcgtatgagcggtaggagggttggtagttggtagtttttcggttttagggaatattatatttgagtgaagtggagatatcgaacgttcgggtttagaggtttgttcggttatcgttttttcgggagtttatgtatatgggatataaatttgagtagtatatgtgtgtaggtgagttgtttttgttttatagttttttttttttttttagaggttgagagttcgttacgtttgttgttgtttttttttttgtgtagataaatttggaagttttttagatttttttggggaggttaatattaacgtggttttttgttttgtgttacgtagtcgtttgggaagttattttttgttttttttaggggaggtagattgtatagatttttaagttttatttatatagtttttaatttgttatgtggagtttaagatttttaaggagatgtatagttttggttaatggaggagtttttataggtttaggatcggggtgggtagggcgagagtttaggtttgaaggttgggaaagggatttggggaggagggtgaaggtagaatggagggtgtacgaggggttttattgattttttgttttttttgttagatataagtttttgaaatggtgggtttagttattttttttaggggtttcgaatgttgttgttggttttcgtaatttagacggttttgtttttttttttaagattttttttattatgaagatgtttgaatatgttagggtaagggaacgatgttgtagtttttattcgtatttttaaatattaagattataggtttagtatttagggtaatagtttgttttttttttttttattatttttattgtttattttttgtttttttttttgtttgttttagaatgatcgtgacggttggaatttttttgtgtgtatgaatttttgtgtcgttttttttagttttgtttagagtacggttgtttaggatgattttaggtgaggtatttagttttgttttttttttttggattttaggatttagtttttggtttttaattgatgtttttatttgttttttaggttcgtttatttttttttttgggagtttggcggtttagttatcgtgtttgtatattaagatgtattttacgtttttttgtttatatggtatgtggaagttatgatttaggattttttattattttttaagatttttttttttaaatagtaatgttttagagggaggtagttatatttttgtgtgtagataataaaagtatatttttaagaggttttttcgttgtttttttagttgagttatttttgtttagtaatttaagtatataatagtgttttgttgttttattattatgtttttatatg

SEQ ID NO: 2251 - DNA, 4136 bp, Artificial Sequence
  chemically treated genomic DNA (Homo sapiens)
ttttagagttttttttatggtttagtaaggtttgagggaagtttatttagatattagtaggttatgatttttgggtttttttttgttaaagtgttggtttaaggtttggttttagttgaatgtggttatatgtagggttagattttttttaagattttgggaatttaggtcgtttagatttttaggtagaaaagttagcgttttgatattttatttaaattttttttgcggttgtttttttagtttttttttattatttttttagtttttatgtttgttgttcgttttttttttttcgagttttaatatatagtgggtatttgaagattttttttttatttttttatttttattaatttattttttattcgaatttgggatttttattttcgtttttttttataatttaatttatttttttttgaaggaattattttggttttgatttttatttttattttttaatagtttgttttcgttttttgtacgttagtcggttttatttttttattattgtttttttagatattcgaggttttatttagttagttcgtgagttttaaggttgttttgatttttttatttgtttttttatttggtttttgtattttttttttttttggattttttgaatttttttaggattttcgtttagttttttttcgtttttaatcgatttttttcgaacgttttttattaatcgcgagagttttttattgcgttttggttatattttttacgtttcgttttcggtttcgtttttgtttttgatcgcgtttgcgtaaggcgggcgttttaaagttttattttattttgttgggaggagggggaaaggtgtacgtaggcgtagtggcgtttaaatttgggtttattaaatgcgtcggagtattttcgcgtttaggcggtttttttttattgcggtaattcgggaaaatttgtgaattaattagaaaaagtggaaggcgggagattttggggcgttgtttaatggcgcggaagagaataaatgagttggttaatcgggaacggtacgggggcgggttcgttcggcgcgaagttcgggttcgggaatttcgaaggaggggtaggcgttgttcgcgcgtagaggtcgcgttttttttggtttcggttttttggttgttaaatagatgtagtaacgtcggtttttgtcgaggagtttaaggggtttcgggattcgtcgtataggttggtattgtttgaagaggaggttattcggagattgcgtcgcgcgggtagattcgaaacggggttggggcggagtgggaaaaggtcgggtatgttttgtatgatcgcggggagtttttttttgtttttattttatttagagaagtcgggaagtaggggtttaggtttaatttgttggagtatttaaggattcgtttgtatttttttttgggggatgatagtggatttattgttttcggaggtttaattagttatgagtgagggattggttagaagatcggggcgtaggtaagtaggagtgttttattaggataagtaagtttgataggaagaagttgttttttttcgaattatatagaggtgatgtgttcgtattgtacgtagacgtgtgtataataggattttttttttcgcgtttcgttatttcgatatatataggagttgtttaaagtatttttgttttgtagattggaggttttttaaatattttgtgatttgaggatttagtttaagtgaggtgttataggacgtgtttttgagtttgtattgtacggagatttttttggaattttttatttgtaagtcggtttaattaattttgtattgagttttaggttgtttgtattttgaatttgggttatttaggtagtgtgtttaaagttgaaatcgtatatagtataatttaagtttgtattagattgggaagcgaatttaagttagcggtgcgtggtttaggagtgggaaaggaaatggatgtttgaagtggaagaggtggtgtagagggggtatcgtttatgttgttttgtttttaattgttgcgtatagggggcggtaggggcggtgatttttatattttttattttttcgtcggggttggttgtatttatcgtttgggttatagggtcgatttgtgtgatgtggttttgcggttttagtaggagtttggttttatttttgggatttacgtcgaattgtatgtcgagtttcggggtgatgattggagggttagtttggaagattatagtagttaaggtgagtattaagtagggtagttttgtttttgggtggttgaagcgttaggttggaatgagtaaggtttttataagattttgttgtttgttttttatatttttattagattggatggatagtcgtggtttagatttttatttttttattagaagtgtgtatagttagaagttttttgttagattgattttttttggtttcgtttagtttatataggatttgggatattattagaaagatattatagtggggatgttttgaggttattagaggttaagtttagatttgatttagtttttagttttgttgaggtattttgtttttgggttagggtagttttatgttgaataatgtttttaataatttgggtatgttttttttcgtgatttgaggtagttagttttagaaagtttagatttatatttgagttttgttattgttttttggtaaagttagttgtaggagtgttatggttattagattatagtagttaatatttatttagtgtttattgttatgagttaggttttattttaagtgtattgaatgtaggtggtattaatattatttttatttatagtaaaggaaaatgaggtataaagaggttaaggaatttgtttagggttgggtatggtggtttatatttataatttagtattttgggaggttaaggtagggtggattatttgagtttaggagttcgagattagtttgggtaatatggtgaaaatttgtttttattaaaaaattaattaattttttaaaaaaagtttgggcgcggtggtttacgtttgtaattttagtattttgggaggtcgagatgggtagattacgaggttaggagttcgagattattttgattaatatgttgaaattttatttgtgttgaaaaaaaaatataaaaattagttaggtgtggtggcgtgtatttgtaattttagttatttaggaggttgaagtagtagaattatttgaattcgggaggcggaggttgtagtgagttgagatcgtattattgtattttagtttgggcgatagagcgagattttattttaaataaataaataaattaaaagtttgtttagggttatataattggtaagtggtagagttaggatttgaacgagttggagttgggggagagtgagtatgtttgaaaattggattttagggcggggtacggtggtttacgtttgtaattttagtattttgggaggttgaggcgggtagattaggaggttaggagtatgagattagtttggttaatatggtaaaattttgtttttgttaaaaataaaaaaattagttagacgtggtggtatatgtttgtaattttagttatttaggaggttgaggtaggagaattgtttgaatttgggaggcggtttaagtttgggtaatagagtaaaattttattttaaaaaaaaaaaaaagaaagaaaaaaaaagaagaaagaaagaaaattggattttaggatagtgagggtagggattttttgtaggaaagtataagaaatatagatttgtttttagttgataaggagtgtattgtttggtatttgttatttgttgaggggtttaggatgtgagggagaatttgattatagttttatatttttttttagaaattatatagatttttttatttttgattttggttatttttgtttttgttttttatatttgtttggtgttttattattaataggtattttggttaataatgttcgatttttaagaggttataggttggaattgagtgatggagattttttgatttttggttttgaagggtttttaggaattagtttttcggagttttattttatgttttaataagtacgagttaagttttaggattttgttgttattattattttacggtttaggggagaagttcgg

SEQ ID NO: 2252 - DNA, 4136 bp, Artificial Sequence
  chemically treated genomic DNA (Homo sapiens)
tcgggttttttttttagatcgtgggatggtaatggtagtaaagttttgaggtttgattcgtatttgttggaatatgaagtagaatttcgaggggttggtttttgggggttttttagggttaaaggttaggaggtttttattatttaattttagtttgtgattttttgggagtcggatattattgattaaagtatttgttgatggtggggtattaggtaaatatggaggataaaaatagaaatgattagagttaggagtggagaaatttgtatgatttttggggaagaatatgaaattgtagttagatttttttttatattttaagttttttagtaggtgataggtattaggtagtatattttttgttagttaggaataagtttgtgttttttgtgtttttttataaaggatttttgtttttattgttttaaggtttaattttttttttttttttttttttttttttttttttttttttttttgagatggagttttgttttattgtttaagtttgaatcgttttttaggtttaagtaatttttttgttttagttttttgagtagttgggattataggtatgtgttattacgtttggttaatttttttatttttagtagagatagggttttattatgttggttaggttggttttatatttttgattttttgatttgttcgttttagttttttaaagtgttgggattataggcgtgagttatcgtgtttcgttttaaggtttagtttttaaatatgtttatttttttttagttttagttcgtttagattttagttttattatttattagttatgtgattttgggtaagtttttggtttgtttgtttgtttgagatggagtttcgttttgtcgtttaagttggagtgtagtggtgcgattttagtttattgtaattttcgtttttcgggtttaagtgattttgttgttttagttttttgagtagttggggttataggtgtacgttattatatttggttaatttttgtattttttttttagtatagatggggttttaatatgttggttaggatggtttcgaatttttgatttcgtgatttgtttatttcggttttttaaagtgttgggattataggcgtgagttatcgcgtttaggttttttttaaaaaattaattaattttttggtagagataggtttttattatgttgtttaggttggtttcgaatttttgagtttaagtgatttattttgttttagttttttaaagtgttggattataggtgtaaattattatgtttagttttggataagttttttaatttttttgtgttttatttttttttattgtaaatgaggataatattagtattatttatatttaatatatttaaaatagggtttggtttataatagtaagtattagatgaatgttggttattatagtttaataattataatatttttatagttgattttattaagaggtagtggtaaaatttaaatgtgaatttaggttttttgaggttaattgttttaagttacggagaaagatatgtttagattattaaaaatattatttaatatagaattgttttaatttaggaatagagtgttttagtaaagttggaaattgaattaagtttaaatttggtttttagtggttttagaatatttttattgtgatatttttttgatgatattttaggttttgtatgagttaaacgggattaaaaagggttagtttggtagagagtttttgattgtgtatatttttggtgggaagatgaaggtttggattacgattatttatttaatttgatgggagtatgggaggtaggtagtagggttttgtggagattttatttattttagtttggcgttttaattatttaggggtaaagttgttttgtttaatgtttattttggttgttgtggttttttaggttgattttttagttattatttcggggttcggtatgtagttcggcgtggattttagagatgaggttaggtttttgttggggtcgtagggttatattatataggtcggttttgtggtttaagcgataggtgtagttagtttcggcgggggggtggaaggtgtagagattatcgtttttgtcgttttttatgcgtagtagttggaagtagggtagtatgggcggtgttttttttgtattattttttttattttaggtatttatttttttttttatttttgggttacgtatcgttggtttaagttcgttttttagtttgatgtaaatttgagttgtgttgtatgcggttttaattttgagtatattatttgaatagtttaaatttagagtgtaagtagtttaggatttaatgtaaaattggttaagtcgatttgtaaatgaaaaattttaggaaggttttcgtgtaatgtaaatttaggaatacgttttatggtattttatttgagttggatttttagattataaaatatttggggagtttttaatttgtaaggtaaggatattttaggtagtttttgtgtgtgtcggggtggcggggcgcggggaaggaggttttgttatatatacgtttacgtgtaatacgaatatattatttttgtgtaattcggagaagagtagtttttttttgttaaatttgtttattttaatagagtatttttgtttgtttgcgtttcgattttttggttaattttttatttataattggttgaattttcgagggtaatgaatttattgttattttttaaaagaaagtgtaaacgagtttttaagtattttaataaattggatttaaatttttatttttcggtttttttaggtgggataaaaataggaaggagtttttcgcgattatgtaaggtatattcggtttttttttatttcgttttagtttcgtttcggatttattcgcgcggcgtagttttcgagtagttttttttttaagtagtgttagtttgtgcggcggatttcgggattttttgggtttttcggtaggagtcgacgttgttgtatttgtttgatagttaagaagtcggggttaggaggggcgcggtttttgcgcgcgggtagcgtttatttttttttcggaattttcgggttcgaatttcgcgtcgagcgagttcgttttcgtgtcgttttcgattggttagtttatttgttttttttcgcgttattggatagcgttttaagatttttcgttttttattttttttgattagtttataagttttttcgggttgtcgtagtgaggaggagtcgtttgggcgcggagatgtttcgacgtatttagtgggtttaaatttagacgttattgcgtttgcgtatatttttttttttttttttaatagagtgaaataggattttagggcgttcgttttgcgtaggcgcggttaggggtagaggcggggtcgggagcgaggcgtagggggtgtggttaaagcgtagtagggggttttcgcggttggtaagggacgttcgggaagagtcggttgggggcgggaaggggttgagcgggggttttgggagggtttaaggggtttaaaggggaagggggtataggggttaggtgaagggatagatgaagagattagaatagttttagagtttacgggttaattgggtgaagtttcgggtatttaggggagtagtggtgggagagtagagtcggttagcgtatagggggcgagggtaggttattgagagatgggggtgagggttaggattagaataatttttttagaaaaaggtagattaggttgtaaaaagggacgggagtagggattttagattcgggtaaaaaatagattaatgagggtgggagggtgggaggaagatttttaagtgtttattatgtgttaggattcgagaaagaggaggcgggtagtaggtatggaagttaaggggatagtagagagaagttgagagaatagtcgtaggaaagatttgaataagatgttaggacgttggtttttttgtttggggatttaggcggtttggatttttaaggttttggggagggtttagttttgtatgtggttatatttagttggggttaggttttgggttagtattttaatagggaaggatttaagagttatggtttgttggtgtttggatgggttttttttaggttttgttgagttatggagagaattttggag

SEQ ID NO: 2253 - DNA, 2460 bp, Artificial Sequence
  chemically treated genomic DNA (Homo sapiens)
cgcgggaattttcggatttatagcggggcgcggtcggggtaggtggggggtttaggcgaggaagttttttttgcgttttgggttgggcgaagggttttgcgatgcgacgggggtagttttagcgcgcgtttagtttttacgtcgttatcgagcggcgttttcgttttagttcggagtttcgtagggtcgtttttatttttgtttattttttcgcgggtcggggtagtttttcgttagttatttcgcgtttttaggaagagggatcggttattatttatttatgtttttttattttattttaatattttttgtaaagttatcgttcgcgtcgtatttgcgtggcggggggcggggtggggcggagttacgtcgcggagtcgtcgtaggtaaatagtttttttttcgcggcgggagcggggtcgtcggttttaggtagggatagtagtcgtcgttcgcgtttcgggtcgggatttcgtcgtcgttttcgtcggaggtacgcgttagggcgggggtcgggttgcggcggaggcgggcggtttcggtgtttttcgtcgtcgtttcggttcggttcgttcgttttttgatttcgggggcggcggcggagcgttttttaaatttcgttgcgggtttcgcgttcggttagtttcgtattcgtcgcgcgttttcggttatttttatttttcggagtttttcgttcggtttcggcgttttttgttattttttttcgcggttcgcggtttcgttttcgtttcgcgtttttacgtttttcgattttcgttttcgcgtcgcgcgttttttttcgttcgcgtttttttcgtcgggtttcgtttcgcgtttttcgtttcgttcgcgtttttcgtcgggtcgcgtttttcgttttttatgtattattttttggagtagtcggcggatatggcgatcgcgttgttggcgggagagaagttgcgggagttgattttgtcgggcgcgtaggacgataaggcgggcgcgttggtcgcgttgtttttgtagttgaagttggagttgtcgttcgatcgggtggttattatcggtatcgtgttggtgtttattttgttggttattttggtttttattaagaatttcgtaggtgaggtcggcggtcggggcgcggggcgcgggtagagggggcgttcgtaggtgttcgggagttggcgtttttcgcgttttcggcggtttcgtttagtcgcgtttatcgtggtttggttgcgttcgcggcgttttaggtattttttatagtcgtttttattttagtaggtgtcgttggtcgtatagatttttcgtttttattttattgttgtttttttttttattcgttcgtttatggtcgcgggtgggattaggtttgtttggatttaggggttttaaatgttatgagatacggggtttggtttggagaatgttataagtagcgtttgaggggatgtagggtggttaggtggggattaggaaaggtcgggatgggtgttgatagtagagagttgattataggggttggtggagttgtcgggtagggtttttaggttggatttgggtggaaggagggtagagagagtttttgagaggtttaggttttttattttttaggtagggcgaggttttttcgggtgtattgggggttttcgaaggtttgaagtaggggggttagtatggggtagggttacgtgttagagtagggagtttggagtttttgtagggagatgggggttggattagggtagggattcgcgttggttagattaggatttgtgggggtatttgaagttatttaggcgaggtaggaagatggatagagtagttagtttgtttgtgagtttttgcggggtggggttttggtgtttttgttttttttaaggagtggggcgagataggtggagtcgagaatttttttttttggggtttgggttaaggtaagggggattagggttttttggtttgtgtggtttagaggtattagtttgtagcggggaggggtgttgggattttggggtttttttttttgtagtttttaaattttagtagattttgttttagtattggcgttttttaaattttttagatgttttgttttaaggagttttcgtggtttggagatattaggtttgagggtggatattggttaggttgtttgattttatttaggggtggaggaggtttttgttggtttttttttcgatattggaggttagatttcggggattagaggatttttggggtgggtatatagtatattttgtagagtagggagtttaggcgtgcggtggggttttggggtaggtttagtatgtttagatattacgtgtgttttttgtgtttgtagtaattaagtatcgtaaattaggtagttttaaatagtagatatttattttttatggtttcggaggttaaaagtttaaaatcgaggtgtcggtagggttttgtttttttttatagttttaggaa

SEQ ID NO: 2254 - DNA, 2460 bp, Artificial Sequence
  chemically treated genomic DNA (Homo sapiens)
tttttagagttgtgggagggagtagggttttgtcgatatttcgattttggatttttggttttcggaattatgagagataaatgtttgttgtttgaaattgtttagtttgcggtatttggttgttataaatatagagaatatacgtggtgtttggatatgttgggtttgttttaaggttttatcgtacgtttgggttttttgttttgtagagtgtgttgtgtgtttattttaggggttttttaattttcggggtttggtttttagtgtcgaagaggagattagtagaggttttttttatttttgggtgggattagatagtttggttaatgtttatttttaggtttggtgtttttaggttacggggattttttaaggtaaggtatttgggagatttgggaagcgttagtgttgaggtagggtttgttgaggtttggaggttgtagaagagagggttttagggttttaatattttttttcgttgtagattagtatttttgggttatataggttaggagattttgattttttttgttttggtttagattttaggggaggaagttttcggttttatttgtttcgttttattttttggggagggtagaggtattaggattttatttcgtagaggtttataggtaggttggttgttttgtttatttttttgtttcgtttgggtggttttaagtgtttttataggttttgatttaattagcgcgggtttttgttttggtttagtttttatttttttgtaggagttttaggttttttgttttgatacgtggttttgttttatgttagtttttttgttttaaattttcggaggtttttagtgtattcggagaggtttcgttttgtttgaggggtggagggtttgggttttttagagattttttttgttttttttttatttaagtttagtttgggaattttgttcggtagttttattagtttttgtaattagttttttgttgttaatatttatttcggttttttttggtttttatttggttattttgtatttttttaggcgttgtttgtgatattttttaaattagatttcgtgttttatgatatttgggatttttgggtttagataggtttagttttattcgcggttatgggcggacgaatggaaggaagaataataataaaatagagacgaggggtttgtgcgattagcgatatttgttaggatgggggcggttgtggaaggtgtttgggacgtcgcggacgtagttaggttacggtgggcgcggttggacggagtcgtcggggacgcgggaagcgttagttttcggatatttgcggacgttttttttgttcgcgtttcgcgtttcggtcgtcggttttatttgcgaagtttttggtgaagattagggtgattagtaggatgggtattagtacggtgtcgatggtgattattcggtcgaacggtagttttagttttagttgtagaagtagcgcggttagcgcgttcgttttgtcgttttgcgcgttcggtaggattagttttcgtagtttttttttcgttagtagcgcggtcgttatgttcgtcgattgttttaggaggtggtgtatggggggcggggggcgcggttcggcggggggcgcgggcggggcggggggcgcggggcggggttcggcgaggggggcgcgggcgggaggggacgcgcggcgcgggggcggggatcggggagcgtgggggcgcgggacggggacggggtcgcgggtcgcgggagagggtggtaggggacgtcgggatcgagcggggggtttcgggggatgggagtagtcggaggcgcgcggcgggtgcggggttggtcgggcgcggagttcgtagcggggtttggggggcgtttcgtcgtcgttttcggggttagggggcgggcgggtcgggtcggggcggcggcggggggtatcggagtcgttcgttttcgtcgtagttcggttttcgttttggcgcgtgttttcggcgggggcggcggcgggatttcggttcggagcgcgggcggcggttgttgtttttgtttggggtcggcggtttcgttttcgtcgcggggagggggttgtttatttgcggcgatttcgcggcgtggtttcgttttatttcgtttttcgttacgtagatgcggcgcgggcgatgattttgtagaaaatattgaaatgaaatgaaaggatatgaatgagtaatgatcggtttttttttttgggaacgcggggtggttggcggggggttgtttcggttcgcgggagggtgggtaggggtgggggcggttttgcggggtttcgggttggggcgggggcgtcgttcggtggcgacgtgaggattgggcgcgcgttggggttgttttcgtcgtatcgtagggtttttcgtttagtttagggcgtagagggggttttttcgtttgggttttttatttgtttcggtcgcgtttcgttgtgggttcggaggttttcgcg

SEQ ID NO: 2255 - DNA, 2474 bp, Artificial Sequence
  chemically treated genomic DNA (Homo sapiens)
tatgggttaggtgagcggggtttggtcgagggtagtcgggtagggggtagtagggtgcggtagtttgtttatcggaattttttagggtgtattttaggggggttgtttatttgaagggaagtgaggacgagggtgtttaaaggtcgttttttttatttttatttttatttttatttttcgtttttcgggatcgttacgttttggagtgagtgtagtcggtttgttttttaaagttttttgtttcggtcgattagttgggtgagttttggaattggaatttggattgtttagtgtgttgattttataatttcgttggggtggatttttagtttggtatttagttgttttttaattttgagcggtattcgtggatgtagtcggtttttggtttagggatgtttatttatttttggtttgtttgaagaaagttgttgtttttaatttttttttttttaagtaagtttaaaatttttatgagtaaaagagtttaaagaggtaagaggatattggcgttttaattgttttttttttttttaattttttttttttttttttttttggttggttttatggattatttgggagataaatttatagtggtttagatttatatgatttagtggatgggtatcgtgaggaggtttttttaggaagtttttaatttggtgattattacggtgggttacgaacggacgagtgtagagtcggttagtcggattttttttaagcgtatttttttttttcgatatttggtttttcggagtcgggaattttttcgtcgtttttttgttcgtagttaatagagattttttttattgaggaaaaggtatatagattcggaatcgttagatattgtaagtttattatgttttaaaaaatattaaaataatattgaaagttttttttttttagtttttttagggagggggttttagatattaaatcggggaagttattttttttagaatagttgttagttaaagtttaggtattttttgttttttgtatttgggaaagaggtacgtagtaataattttttttttttgaagttagttaggatatttttgttggagtcgacgtttgtgtggatagggttagtacgtgagttgggttgaatttgttagttgatttatgtttaagtgtgaatattttaattttcgatacgaaagtttatttttttttttatttttagggtggattagtggtatttgttttatttttttttatttttttaggaagtataagtggcggtgttatgtgtacgttgagttgtagtttttgtcgttttatcgagtttttattggattgttaaggaaagggttttaggagatcgaggtgtggtgggcgagtttgttcgttggtcgtgaattttgggtttggtgtgagtgggttagggagggaggttttgattttttatttaggtaggttcgggagggtttggattgggatagtagggtggaatgatagttaatgattaaaattttggtttgtgttttgttaggcgatagtgtagaaataatcgtaaggtttttttgatgatttggagaggtgggattgggtttagaaagcgaaagtgtttattgtgggggaagtatagtgagtgagtggtagagttaggtttcgaattttaggttttgatttttttatttacggttttttgtagtttagtttttagtagatgttttttttagatttttttaattaatttagggttgtttaggttattgattagatttgagtttaaagagagggtttgttatttttatataggagatttttgttatttgattgtgttggtttagtttatgggagtatttgaggataggcgaagggttaagttagtttttttttttgggttttttttagttaggagtgttatagttattaagggatttagtatttagggaggagttttgagttggttttttttatattcgaggtggtagggtttatagttgttttgttaggtgtaggggtttagtattttttttgttgatttagaggtgtgatttattttaggttacgtagtagttagagtaggtagttgtaaatgtaaggtaggagtcgagtatttgggtatgatacgtgtttcgtttataggacgttttttttatagtgggtttgtgtttttttgtggtttagaataaattagtggggtttggatttatgagatagattttttaatttttggaaggtgtgatttgttatagggaaagaaggttttttatttattttgtttttttttgtgtgtatttttgtttttgtgatgtgtttttttgttttgttttgtttttgtttgtttttttgttatttttgtttttttttagggtatggggttggtgataggtaggttttgttggtatttttttttttttattttggggagtggtgtgattatgggtattggtatgaattttttaggcgttttattttgtgttataggttggtgttattggtaggagtggtttttttag

SEQ ID NO: 2256 - DNA, 2474 bp, Artificial Sequence
  chemically treated genomic DNA (Homo sapiens)
ttggagaggttatttttgttagtggtattaatttgtaatatagggtaagacgtttaggggatttatgttaatgtttatggttatattattttttagggtggggaaagagggatgttaatagagtttgtttgttattaattttatattttgagagagaataggagtgatagagaaataaatagagatagagtaaggtagaaagatatattatagagatagagatatatatagagggagatagaatgaatgaggggttttttttttttgtggtaagttatattttttagaggttggggaatttgttttataaatttaagttttattaatttgttttgggttataaagaagtatagatttattgtgaaggagacgttttgtgaacgagatacgtgttatgtttaagtgttcggtttttgttttgtatttgtaattgtttgttttggttgttgcgtgatttggggtgagttatatttttgggttagtagaggggatattgagtttttgtatttggtagggtagttgtgagttttgttatttcgagtgtagggagggttagtttagggtttttttttaaatgttgggttttttaatgattatagtatttttggttaggaggaatttagaaaaaggggttggtttagtttttcgtttgtttttaagtgtttttataaattgggttaatatagttaggtggtagaagttttttatgtgaaaatggtaggttttttttttaggtttaggtttggttagtgatttgggtagttttgaattaattgggagggtttggggagaatatttgttgggagttggattgtaaagagtcgtgaatggggaggttagagtttggggttcgggatttggttttgttatttatttattgtgttttttttatagtaggtattttcgttttttgggtttagttttatttttttaaattattagaaggattttacgattgtttttgtattgtcgtttagtaggatataggttaaggttttaattattagttgttattttattttgttgttttaatttaagttttttcgagtttgtttgagtaagaaattaaggtttttttttttggtttatttatattaaatttaaggtttacggttagcgggtaaattcgtttattatatttcggttttttaagattttttttttggtaatttaatgaaagttcggtggaacgataaaagttataatttagcgtgtatatgatatcgttatttgtgttttttaggagggtgagaggagatgaggtaggtgttattaatttattttaaaaatagggagaaggatgagttttcgtgtcgggggttggggtgtttatatttaaatataaattaattggtaaatttagtttaatttacgtgttggttttgtttatatagacgtcgattttagtaaaaatgttttgattgattttaggagagaggaattattgttacgtgttttttttttaggtataggggataggaagtgtttgggttttgattgataattattttggaagaagtaattttttcggtttgatgtttgggattttttttttgggaggattggaggggaggagtttttagtgttgttttaatattttttaaaatataataagtttataatatttggcggtttcgaatttgtatgttttttttttagtgaagaaaatttttgttggttgcgagtagagaagcggcggaaggattttcgatttcgggaagttaggtgtcggaaggaggaagtacgtttgaagggggttcggttggtcgattttgtattcgttcgttcgtggtttatcgtggtggttattaaattgagggttttttggaaggatttttttacggtgtttatttattgggttatgtgggtttgggttattgtgagtttattttttaggtaatttatggggttagttaggaggagagggaagaaggaagttagggagggagagagtaattaaaacgttagtgtttttttgtttttttggatttttttgtttatggaagttttgggtttgtttggaggaaaaaaaattaaaaatagtagttttttttaggtaaattaagggtaagtaaatatttttgagttaggagtcggttgtatttacgggtgtcgtttagaattaagaggtagttaagtgttaggttgggagtttattttagcggagttataaagttaatatattgggtagtttaggttttagttttagggtttatttagttgatcggtcgagataaggagttttgaggaataagtcggttgtatttattttagggcgtgacggtttcgaaaggcgggggatggggatgggggtgggggtggagggggcggtttttgggtattttcgtttttatttttttttaggtaggtagtttttttgaggtgtattttgggaggtttcggtgggtaagttgtcgtattttgttgttttttgttcggttgttttcggttagatttcgtttatttgatttatg

SEQ ID NO: 2257 - DNA, 2827 bp, Artificial Sequence
  chemically treated genomic DNA (Homo sapiens)
tcggggtttcgtttcgtttaggttcgtacgcggggttttcgggaatcgtcgtttttttttttcgttttcgcgttcgcgttttttttttcggggtttcggtttatttatttttggtgcggtttcgtcggatttaggagtttcggtcgttcgggttgcggggagggggcgtttcgggtcggttttagaagttattttgtaaagaggtagggggcgcggggtcgcgcggggcgagttcgggattcgcggggaagaagtttttcgggatcgcgtttcggtcgttcgagtttttcgcgttcgtcgttttttatttcggtcgggggtttatttgggagttcgttgttttcggttagtcgttcgcgtgtgtttagggttagtagtacgtataagtgttagcgtacggtcgtcgcgtttatgtttaatgcgggtttcgttgggcgtgcgggcgtgcggggcgcggggattcgatcgatcggtcgttttcgtaggcgttgttcgttgttcgtcgtttcgttatcgttcgggttttcgagtcgtttagttagttcggttgatgagttgatagcgcgcgtttattggttcgtggcgtcggaggggcggggcgtcgtttagggtcggttaatgggcgtcggttttcggtttttcgaggaagaggggggttcgggcgtcgtcggggggattttttttttggggcgggcggtaggtggggggtgtgggtttggtcggtcggttcgttaggcgcggggtttaggttaggttggggttgtttggaggttgcgtttttttttgttcgcggcgtttcggttttcgtcgtcgagagtggacgtttttttggggtaatttttttcggtttagaggtagtttcgggggcggggattttgcgaatcggggatttcgtgaggtcgttcgttattcgtgggtagtgaaacgcgttagcgcgtagagtagattcgtttgcgttgtcgtttgttggacgttttttgagtatttattggggatcgagtgcgggcgaggtagtagcgaaggaatcgggaggggaaatttcgtgaagattatttgaaaattgacgtttaaaataaacgaattttttagtattcgttaaaggatagtggttcgttagtgtgtttgttacggggcggtcgtaggatttgcgtttggaatcgggcgggcgttcgggacggataatgtcgtttggcggtcggtttcgcgggaggttttcgtacggggttaatttcggtcggcgaagttcgttgttcggaatgcgaggtcgaggtttttttttgtgatagatcgggcggggttaggaggaggggtagggcgggtatttcggttcgaagatttaggaattgttttggtttggtttggggtttatatttgacgtttggcgagggttggtttcgggtttggttttatcgggtttgggagggacgggcggttggaaataaatggttttttttagttttaggtaggacgttttaagggacgaaagtttagtaaattttaaggtttatttttttgataattattaataagagttttttttttttttttttgttttttaggtttaatttaaagataatttttttttttttttgtttattttgtttgtattagtttgagtttttttatattagtttttttttttgtttttaatatatatacgtatatatatatatatatatatatatatatatatatatatagttatatatgtagatatatgtttttacgtgtaattatttagatatagttttatatttttatattttttagtatatatacgtttatatatgtttttttacgtttttatttaatttatcgtagacgagttttttagttttggaaggttaaatttgtgtttagttagtttttatattttatttgattttatattagtttgtggtacgggtttggtggttgaggtaaggggttttttatatggggatcgggggtgtggggggtttagagatgtttaaagaagaaggaagcgttgtttgttgtttttattgagtttttattttattgttttagatatttcggtttgtacggttgtttttggttgttggtttaatttgggagatgttgttgataggttttattttgttttcgttaattgtgtagttttgagtttttgtagggggtggggagtttttttagaattatatattattttgtgtattgggtaatagggtaagtagtgtgaggtggtgggggaggtttttttagggggttttgatttatttgaaataatgttttttaatgtgtttggttattaggtattttttcgtttagttttagttaggtgttttttaagtttgatggtagtaagagaagttttttttaggttttatttttataaattaaggtaggaatggaggtaggttattttgtgattttttagtttagaggtagttgttttttgtattaagttgtagtttttagtttgtttttaagcgattgtttaggttaagtttgttggtgaattattattttttaaggtgtgtaggtagagagaaagtggttttttttaggtagttgttgtttatgtggaggatttagcgagtagaggaggagggaaatggagagaagatatatttgtaagttttttataggtgaaggaaaggaggcggtttgtggagtagagaaagaggaggttatttttgttttagggcgtcgttagggaggttttttaggataggtgatttgggttagatatagaatataaagaggatatttgtttaatggatgagaagaataaatagagaatttgttaaggtttatgagtgaaggcgaggattgaataagtgagttagagaatgttttggaagta

SEQ ID NO: 2258 - DNA, 2827 bp, Artificial Sequence
  chemically treated genomic DNA (Homo sapiens)
tgtttttagaatattttttggtttatttatttagttttcgtttttatttatggattttggtagattttttatttgttttttttatttattaggtaaatattttttttatgttttgtgtttagtttaggttatttgttttaagaggtttttttgacggcgttttggggtagaagtgattttttttttttttgttttataggtcgtttttttttttttatttgtgaggggtttataggtgtgttttttttttatttttttttttttttgttcgttgagttttttatatagataatagttgtttagaaggaattattttttttttgtttgtatattttagagggtgataatttattagtaaatttgatttgagtaatcgtttgggggtaggttggggattataatttggtataagggatagttatttttgggttgaggggttatagagtaatttgtttttatttttgttttgatttgtggggatggagtttggaagaagttttttttgttgttattaagtttgaggggtatttggttagggttgggcgggggggtgtttaatgattaggtatattagagggtattgttttaagtaggttagagttttttggaagaattttttttattattttatattgtttgttttgttgtttaatgtataagataatatgtggttttgagggaattttttattttttgtagaaatttaaagttatataattgacggggataaaataaagtttgttaatagtattttttaaattaaattagtagttaggagtagtcgtgtagatcgaaatgtttggagtaatggggtgggggtttagtggagataataggtagcgttttttttttttttgggtatttttggattttttatattttcgatttttatgtaggggattttttgttttagttattaggttcgtgttataagttgatgtgaagttagatggggtgtgagagttggttggatatagatttaattttttagggttgaggagttcgtttacggtaggttggatgagggcgtgaagaagtatgtgtgagcgtgtgtgtgttggagggtgtgagggtgtgaggttgtgtttgagtgattgtacgtgagagtatgtgtttgtatgtgtgattgtgtgtgtgtgtgtgtgtgtgtgtgtgtgtgtgtgtgtgcgtgtgtgtgttgggggtaggaaagggagttggtgtggaggggtttaaattggtgtaggtagagtggataaaaagagaaaagagttgtttttgagttgggtttggagagtaggagaagaaaaaaggagtttttattggtggttgttaaggagatgggttttggggtttgttgaattttcgttttttaaagcgttttgtttggaattgagaggggttatttatttttagtcgttcgttttttttaggttcggtgggattagattcgaagttaattttcgttaggcgttaggtgtagattttaggttaggttagagtagtttttgggttttcggatcgggatgttcgttttgtttttttttttggtttcgttcggtttgttatagggggaggtttcggtttcgtatttcgggtagcgaatttcgtcggtcgaggttagtttcgtgcgggggtttttcgcgggatcgatcgttaagcggtattgttcgtttcgggcgttcgttcggttttagacgtaggttttgcggtcgtttcgtgataagtatattgacgggttattgttttttgacgagtgttaaaaagttcgtttgttttgaacgttaatttttaagtgatttttacgaggttttttttttcggttttttcgttgttgtttcgttcgtattcggtttttagtaggtgtttaagaaacgtttagtaaacggtagcgtaggcgagtttgttttgcgcgttggcgcgttttattgtttacggatggcgggcgattttacgggattttcggttcgtaggattttcgttttcgaggttgtttttgggtcgggaggggttattttagaggggcgtttattttcgacggcgggggtcggggcgtcgcgggtaggggagggcgtagtttttaagtagttttagtttggtttagatttcgcgtttagcgagtcggtcggttaggtttatattttttatttgtcgttcgttttaggggaagggttttttcgacgacgttcgagtttttttttttttcggagggtcggaggtcggcgtttattggtcggttttgggcgacgtttcgttttttcgacgttacgggttaatgagcgcgcgttgttagtttattagtcgggttggttgggcggttcgggagttcgagcggtggcggagcggcgagtagcgagtagcgtttgcgggagcggtcggtcggtcgggttttcgcgtttcgtacgttcgtacgtttagcggggttcgtattgagtatgggcgcggcggtcgtgcgttggtatttgtgcgtgttgttggttttgggtatacgcgggcggttggtcgggggtagcgggtttttaggtaagttttcgatcgaggtggggggcggcgggcgcggggggttcgggcggtcgaggcgcggtttcggagggtttttttttcgcggatttcgagttcgtttcgcgcggtttcgcgttttttgtttttttgtaaagtaatttttagggtcggttcggggcgtttttttttcgtagttcgggcggtcggggtttttgagttcggcggggtcgtattaggggtgggtgggtcggggtttcgggaggggaagcgcgagcgcgggagcgaggaagaaaggcggcggttttcggggatttcgcgtgcggatttgggcggggcgggatttcga

SEQ ID NO: 2259 - DNA, 2265 bp, Artificial Sequence
  chemically treated genomic DNA (Homo sapiens)
gttagtgggttatttttgtttattatgtagtatggtatttatttgtttagtattttatataatatcggaggtaggggagtttattatagaattttttattaagaaggtttttattatggagaaattgaggtattggaggcggggtttttgtagttacgttgggttacgtgttttagttagttaagttgtagcggttattaagggtgtttagggtttggtttgttggttatagtgttgattttatggtttgaaatgggttttttttgtttagataggttttagtttattattatttatttgttttagttttggtgggtagggagtggttgggagattttgttttttatattttgggttttgcggtatttaacgagtttttaatatatattttagggtttttgttttagattaggttatagtttgtttaggtatataaggggtatttatattttggaggtaaagagatatgtttatgtgttcgtaggtatatatgattacgcgtatagatatacgtgtagatgtatattaagttatatatacgtatataagttcgaggcggggatttttaggatacggaggtaggtaggtagaggtggggtttaggatgttttgtttttgtttgtgggtttggtttttttatttaatagacgagtatgtgggtgcgggagtggttattgcgaaaggggttttagtatgtgttattcgtggagattatagtaggtatgtcgcgtgtatgtatgtgtggtcgtgggtgtgtaggcgggggcgaggatatagatatgtatttttagagttcgtgtgtgtatttagtgtttgtgtatgtgtatattggggcggcgttggtttgtatgtgtattagaggtgtgtaagtgtgtagttcgtgtagataagtgtacgtgtaaggaaacgtgtgtgtagtttgcggtattatggatattagtagggtagtttgggtgggtatttggggagtattttttaggcggggtatgtttaatttatatggagtttatttttttttgttcgtatcgcgggattttatagtcggtggggcgggggagttttacgagggttgttagggaggggttgttgattgttttatcgtttttgatttttttagttaagttttttaatgtttttcgggttgtagatggtgggcgttgttgtttttttttatcgttcgttttggaggtagcgttgggataattttgttttttacgttttttattgtcgttaacgtttttatttattttattgtggattgatttcggagaaacgggaggttttgagtttagatcgtgaggttggggtggaggcggttcgatatttttatttattttcggtatttacgtttttgtaaaaattcgttcgttaattttttggtggtcggggcgtttcgaggtcgggtttcgtttttttagtttacggttttcgttttcgatttggtttagtatcggggattttcggatcgttattttcggttttgtcgaagtcgttaattttttcgggaagcggtaattttttttgtcgttttcggtttcgttttttcggggtcggggcgttagcggttttagtttggcgcggtattgcggtggttttttttgtcgttcggttacgtttttttcgtttcggtagttcgggacgggttttgcggtttcggggagggggcgagtcgttttttttcgcgtttcgtcgtcggtcgggttcgggtgtagcgcggatatttatttttagcggacgttttttttatcgtaggggttgggcggggcgcgtcggggattgaaagtcgtttcggggcgggcgttcgttttttcgcggtcgggttcgtatttaggcgtcgtcgttacggttcggtttcggttcggtcgcgggacgaggttcggcgcgtttcgtttcgttcggttttggttgggttcgggtcgcgggtgcgtagggcgcgtagggcgtatagggcgagggcggcggcggcgcgggggttggggcgtgggcggcgcggcgggtcggggcgcgtaggtcgggtcgtaggaggcgtttagttcgttcggtgtatcggcgtcgcgcggttttagataaaggcggcgtatttttgaagaggcggcggtttttgtaggcggcggaggggatggcggttcgggtcggagtcggtcggggacgcgggttcgagggtgtggcggtttaggttggttcggtttttaagcgggtaagggttttgtttcgaggtttaggaatggtttttgtttgatttattttttttttggttttacgaaa

SEQ ID NO: 2260 - DNA, 2265 bp, Artificial Sequence
  chemically treated genomic DNA (Homo sapiens)
tttcgtgaggttaggaagggagtgggttaggtagaggttatttttaggtttcgggataaagtttttgttcgtttggggatcgggttagtttaggtcgttatattttcgggttcgcgttttcggtcggtttcggttcgggtcgttatttttttcgtcgtttgtaggggtcgtcgtttttttaggaatgcgtcgtttttgtttgggatcgcgcggcgtcggtgtatcgggcgggttgagcgttttttgcggttcggtttgcgcgtttcggttcgtcgcgtcgtttacgttttaattttcgcgtcgtcgtcgttttcgttttgtgcgttttgcgcgttttgcgtattcgcggttcgagtttagttagagtcgggcggagcggagcgcgtcgagtttcgtttcgcggtcgggtcggggtcgggtcgtagcggcggcgtttggatgcggattcggtcgcggggagacgggcgttcgtttcgaaacgatttttagttttcgacgcgtttcgtttaatttttacgatgaagagggcgttcgttggaggtgagtgttcgcgttgtattcgagttcggtcggcggcggggcgcggaggggggcggttcgtttttttttcggagtcgtagggttcgtttcgggttgtcgaggcgagggaagcgtagtcgggcggtagggaaagttatcgtagtgtcgcgttaggttggggtcgttggcgtttcggtttcgggagggcggagtcggaggcggtaggaaaagttgtcgtttttcgggaaagttgacggtttcggtagggtcgagggtggcggttcgagggttttcgatgttgggttaagtcgagggcgggggtcgtgggttggaagggcggggttcggtttcggagcgtttcggttattaaggggttaacgagcgggtttttgtagaaacgtgggtatcgagggtgggtgggggtgtcgggtcgtttttattttagttttacggtttgggtttagaatttttcgttttttcgaggttagtttatagtgggatgaatgggggcgttggcggtagtagagggcgtgggggatagggttgttttagcgttgtttttagggcgggcggtgagaggaggtagtaacgtttattatttgtagttcgagggatattgagaggtttggttgggggaattaggggcggtggggtaattagtaatttttttttagtagttttcgtgggattttttcgttttatcggttgtgaggtttcgcggtgcgggtaagggagggtgggttttatgtgagttgggtatgtttcgtttggagggtgttttttaggtgtttatttaggttgttttgttgatgtttatggtgtcgtaggttgtatatacgtttttttgtacgtgtatttgtttatacggattgtatatttgtatatttttggtgtatatgtaagttaacgtcgttttagtgtgtatatgtataaatattgggtgtatatacggattttgagggtgtatatttgtgttttcgttttcgtttgtatatttacggttatatatgtatgtacgcggtatgtttgttgtggtttttacgggtggtatatgttggggtttttttcgtaataattattttcgtatttatatgttcgtttgttgagtggggaggttaggtttatagataggggtaagatattttgggttttatttttgtttgtttgttttcgtgttttgggggttttcgtttcgggtttgtgtgcgtgtgtgtaatttggtatgtatttgtacgtgtgtttgtgcgcgtgattatgtgtgtttgcgggtatataggtatgtttttttgtttttagggtgtgggtgttttttgtgtgtttagataggttgtggtttaatttggagtagaggttttggaatgtgtgttgggggttcgttgaatatcgtaaagtttagggtgtgaggggtagggttttttagttattttttatttattagggttgaggtagatagatgatggtgggttggaatttgtttgggtagggaagatttattttaggttatgaggttaatattgtgattaataggttagattttgggtatttttggtggtcgttgtagtttggttgattggagtacgtgatttagcgtgattgtagaggtttcgtttttagtgttttagtttttttatggtgaggatttttttggtgaggggttttgtggtgggtttttttattttcggtgttgtgtagggtgttgagtagatggatgttatgttgtatgatgggtaagggtggtttattagt

SEQ ID NO: 2261 - DNA, 2459 bp, Artificial Sequence
  chemically treated genomic DNA (Homo sapiens)
ggtattttttaggtttattaagattagttttttgtgtattgtgttttttgattatattttgggtttttgtaacgtggttagtattttttggtatttttttatttattatgtttttggtaagtagttgaattgtaaggtttttagggttttggttcgtgatagggtcggagtatttagttgttttgttggtatatttattgtttgtagtgaagatgattagcgtttttttaagtagttttaggttttttatggttgttattagggtttttatagttgtatttagttttattagggagtttttaaatggttcgcggtttgaacgttttgtaaagttttgtttattgaattgagggtagtgggtgtgttgggggtaaagattggagttagtattgggtaggggttacgggtagttagggggttgggttaagattatttacgtgagaggtatagtataggaagaaggggcgattttggcgttgggcgtcggttatgaggttatgggcgaaagttatgtagcgggtttttagttcgggtagttaggggggttgcgtttttacggataggttggttaatagtgggatggggattaggttttggttatagttatcgtcgtaaggagtggtcggcgggaagtaggttaggttttggtaggggttttgaggcgggtagttgtcgtgagggttgggttggtaggtggggttgcgggagtattaagggttgggggattttgggaggtgggagggtggttgagggttcgggtggtttttatttggtcgtgggagtacgggatgtttagaaatcgatggaagttttgatgggggggtaggaaggtttttttaggttttattttaaggtgttatttgtcggttatttttgtgaggtagtttcgggtagttaggatttcggttacggttattttttttaggggtaggttttttcgggagttgggtattaggacgttagggtatatgtttattcgaatcgggagtcggtcggttaggagggcggttttgcgggataagttatagagtttttgagatagatagaaatgtggttttttttagagagagagatagacgtttttttcgtttttttgtaatttattgggaggaaagggatggagggtcggggcggggaagaggcgcggttttttttttatttagagggtgtgtatagagatataggtacgtagaagtttgtgaatcgtagttttttcgtcgttagttggtttaggttgggagtggtagagttggggtgtttatagtagtttaggtttttatagtcgaggtcgtcggtaaagattagtacgatgttgggcggacgggtaacggttaggttagtagttagggttaggaggagggatcgcggtgtttttatggatatgggatcgaggggtttgttttaagagagggagggttatttggttttagtaggtttttttcgatatcgtagatttaggcgtcgtttttttttgagatttcggatttaaatatttttcgattttgacggtcgttttttgaagttttagagggtcggggttcgatagtatcgggagatcgcgggttgggacggaatttttttaggattagggtatttttagattttcgagcggagatttgatttttttcgtttagcggttcgggtttagggtcgggggcgtaagttatttggcgttgattagcggagtcgggtcggggggaaggcgttagagggagtttaggaggagtcggtatcgggttgcgggcgttttcgtttcggtttcgtttcgtgatttgtgatttttgcggggcggggtcgggggcggggtcgggggcggggtcgggggcgggtcggggcgaggggcgttgttgcgcgtgttcgtttcgaggtcgtcgtgtgcgtttgaggttgttggttgcggttttgaaacgggttttgggagttttttttgcgcggtcggttttggttgaggcgtttcgggttgcgcgcggggttcggcgttgcgtagtgttcggtgttttttcggttcggagtttttttagaggaggagcggttcgtgcgtttttagattttcggtattgggagattcgggtttttttgtaagagatttgagcgcggagcgttatgggtattcggtgaatgagtaaatggtagggaaaatcgtgtagttttatggattgcgggttttttttttacgattagtaaaagttttgatatttttttttttgcgtacgcgtgtttgtgtgcgtgtaagttgtggttgggtgcggggggttgtgtacgtgtttgtgtgtggtgtgtgtggagtgtttgaggtaggtgtgtggtgttttaggtgtgtgtgtatgtgtggtgtttgaggtgtgtgtgtgtgtttttgtagtgtttgagggatatgtgtgtgtggtgtttgaggtgggtgtgtggtgtttgaggggtgtgtgtgtgtggttgaggggtgtgtttggtgtttgaggggt

SEQ ID NO: 2262 - DNA, 2459 bp, Artificial Sequence
  chemically treated genomic DNA (Homo sapiens)
attttttaaatattaaatatattttttaattatatatatatattttttaaatattatatatttattttaaatattatatatatatattttttaaatattataaaaatatatatatatattttaaatattatatatgtatatatatttgaaatattatatatttgttttaaatattttatatatattatatatagatacgtatatagtttttcgtatttagttatagtttatacgtatatagatacgcgtacgtaggagaaagggtgttaaagtttttgttagtcgtgaaggaagagttcgtagtttatggggttgtacggttttttttgttatttgtttatttatcgggtgtttataacgtttcgcgtttaggttttttataggagggttcgagttttttagtatcggaggtttgggggcgtacgagtcgttttttttttggagaagtttcggatcgagaggatatcggatattgcgtagcgtcgagtttcgcgcgtagttcgggacgttttagttagggtcgatcgcgtagaggaagtttttagagttcgttttaagatcgtagttaatagttttaggcgtatacggcggtttcggagcgagtacgcgtagtaacgtttttcgtttcggttcgttttcggtttcgttttcggtttcgttttcggtttcgtttcgtaagggttataggttacggggcggggtcgaggcggaagcgttcgtagttcggtatcggttttttttgggttttttttagcgtttttttttcggttcgatttcgttggttagcgttaagtgatttacgttttcgattttgagttcggatcgttaggcgaggaggattagattttcgttcgagaatttgaaggtgttttggttttggaggagtttcgttttagttcgcggtttttcggtattgtcgggtttcggttttttggagttttaggaggcggtcgttagggtcggggagtatttgggttcggggttttagggaagggcggcgtttgggtttgcggtatcggaaagagtttgttggagttaagtagtttttttttttttgggatagatttttcggttttatgtttatgggggtatcgcggtttttttttttggttttggttgttggtttggtcgttgttcgttcgtttaatatcgtgttgatttttgtcgacgatttcggttatggggatttgggttgttatgggtattttagttttattatttttaatttggattagttggcggcgggagggttgcggtttatagatttttacgtgtttgtgtttttgtgtatattttttaggtaaagagggggtcgcgtttttttttcgtttcgattttttatttttttttttttaatggattgtaggggggcgggaaaaacgtttgtttttttttttagggaaggttatatttttgtttgttttagggattttgtgatttgtttcgtagggtcgtttttttgatcggtcggttttcggttcggatgggtatgtattttggcgttttggtgtttagttttcgggggggtttgtttttggaggaggtgatcgtggtcgaagttttggttgttcgaggttattttataggaatggtcggtaagtggtattttggggtggggtttgagggggtttttttgtttttttattagggtttttatcgatttttaggtatttcgtatttttacgattaggtaggaattattcgggtttttagttatttttttattttttaaagttttttagtttttgatgttttcgtagttttatttgttagtttagtttttacggtagttgttcgttttagggtttttgttagaatttgatttgtttttcgtcggttattttttgcgacggtggttgtgattagggtttggtttttattttattgttggttaatttgttcgtggaggcgtagtttttttggttgttcggattagaggttcgttatatggttttcgtttatgattttatggtcgacgtttagcgttaggatcgttttttttttttgtattatgttttttacgtaagtgattttggtttaattttttggttgttcgtgatttttatttagtgttaattttagtttttgtttttagtatatttattatttttagtttagtgggtagagttttgtagagcgtttaggtcgcgggttatttggggattttttgatggagttggatgtagttgtggggattttgatgatagttataggggatttggggttgtttgaagagacgttggttatttttattgtagataatgggtatgttagtagggtagttgggtgtttcggttttgttacgggttagggttttggaggttttgtagtttagttgtttgttaagaatatagtgggtgagggggtgttaggagatgttggttacgttgtaggggtttaaggtgtagttaggagatatagtgtatagagagttggttttggtaggtttgggaggtgtt

SEQ ID NO: 2263 - DNA, 2731 bp, Artificial Sequence; identical to SEQ ID NO: 1681
  chemically treated genomic DNA (Homo sapiens)

SEQ ID NO: 2264 - DNA, 2731 bp, Artificial Sequence; identical to SEQ ID NO: 1682
  chemically treated genomic DNA (Homo sapiens)

SEQ ID NO: 2265 - DNA, 2499 bp, Artificial Sequence
  chemically treated genomic DNA (Homo sapiens)
ggggttcggggttagtggggagagttaaggttatatgggtttcggatgcggtgaggggtgagggaaggagggtattttttagttaagatgaaattattatttttgagcgtcggtagtttttttaggttgttgatttgtaagaattttttgtttttgtgttgttttgaagaggaagaagttagaaaaggtttttagaataaaaacgttgtatttttatattttttttttttttttttaagcggagttttatagttttgagaaatagtaaggtttgggattagaggtttggattagttttattttttggttgggtttttttgttttgttatatttcggggtagttggggggttttggtgggtggggttaggtgtagtaggtggataaagagaagttttttagtcggattttggtgggttaggggaggggaggtaaattggggtggtttatttttttttattttttaatttttataatagtatgttttttttttcgaggttttttgggttttgtgaatttatatgcgtgtattttacgtaagaattttgttaattttatttagtattttttttttatttttatagagtagaaggtaacgttatttttttttttagaaggtaagttaaggtttagagaggttgtgatttttttaaggttatttagtttatagtattttttggtggtagacgttgtaggaggaggtgagggggttgtgcgggcggcgagacgtttagggtagagtagggcgggggtttgggggtgtattgggtttgtggatacgcggggaaacgggttgggtttatttttgattaaatttacggtgcgtagttttaaggggatgttattttttttggcgaagatgtagacggcgcggttgggttgggatattaggttaagaaatagttttaggtttatggcgggggcggtaaggatagcggggatggtagtgaaggcgttgagcgcggtgtgggtagtagttgtggtaggatttcggcgcgtcgggaaataggggattaggttttattttttggggatagtatttaattggagcgtattattttcggattcgtttcgttttttcggtttttgtttagttttgtcggttaagattttattattagattcgtgcgtttttatagggagggcggtcgttatgaacgtatagttgggagggtggagttggagttggggattttcgattggtagggaggacgcggatgtagggggtcgattgtaaggggaaggggaatcggttggatagggagaagtaggtttgtttttcgggatttcggtgttagggattttgtttagttttaggcgtcgttttgatttagaaacgattgggcgtcgtcgttttggaaaggttttagcgtacggatatttgagggttcgtttagagttttgtttttcggcgttgtatggtggcggaagggagggagcgaatgggattttttaaaagggattttagagttttatttagtgggatgtgatatttgtaggtgttttaaattggtgggaattttgattggaaggttggggttaaggatgaattttttgtcgtttagattgttttttgtagagtagttgttgttagatagcgggagttgttagatagcgggagtttttatttcgtgtataggatgggggtagggagttcgtagtcgcgggaggtaggaatgattgttcgggaatttttttttttttttttgaattttagttttggtattttattagggggtatagtgatggtttagggttgggttcgggattttagttgaattttttagagtattttatttttttggttagtggtttaagcgagtgaattagaatgtttttttgggagttttgaaattggaattggagagaggagttttttatggggaggtaaacgggagttggggttatttgtagtgatattttttgagttcgaggagtagacgagattgagagagaaaagttgatttagagaaagggagtgataatagggtatgttggtttatatttgtaattttagttatttttacgggatttgtttttttgatgtttgggtatgaaaggattttttaagttttagaatagtgggagaatttaataaagaaaaaattaatatatatataaggttattttgtggaggaaaaaatggattaattttaagtaaaaaattgggaaggatttcggtaaaagatacgttagaaggaagtaatgttttttaagatgtttttagaaatttattagataggtggggtgtggtggtttacgtttgtaatttttgtattttgggaggtagagatgggcggattagttgaggttaggagtttgagattagtttgggtaatacggtgaagtttcgtttttattaaaaatataaaaattagttgggtgcggtggtatattcgggaggttgagataggagaattatttgaattttggaggtagaggttttagtgagttgagattatattattgtattttagtcgggttattgagcgagattgttt

SEQ ID NO: 2266 - DNA, 2499 bp, Artificial Sequence
  chemically treated genomic DNA (Homo sapiens)
agatagtttcgtttagtggttcggttggagtgtagtggtatgattttagtttattgaaatttttgtttttaaggtttaagtgatttttttgttttagtttttcgagtgtgttatcgtatttagttaatttttgtatttttagtagagacggggttttatcgtgttgtttaggttggttttaaatttttgattttaattgattcgtttatttttgttttttaaagtatagggattataggcgtgaattattatattttatttgtttgatgggtttttaagaatattttaaaggatattatttttttttgacgtattttttatcgagattttttttagttttttgtttaaggttaatttatttttttttttataaagtaattttgtatatgtattggttttttttttgttgagtttttttattgttttgaggtttagaaagtttttttatatttagatattagagaaatagatttcgtgagagtaattgggattgtaggtgtgggttagtatgttttgttattattttttttttttgagttagttttttttttttagtttcgtttatttttcgaatttaggaaatgttattataggtggttttagttttcgtttatttttttatagggagtttttttttttagttttagttttaaaatttttaaggaagtattttggtttattcgtttgggttattggttagagggatgggatattttgaaagatttagttagagtttcgggtttagttttggattattattgtgttttttggtgagatgttagggttgggatttagggagaagaaaggaggttttcggatagttatttttgtttttcgcggttgcgggttttttgtttttattttgtgtacgaagtgggagttttcgttgtttggtagttttcgttgtttggtagtagttgttttgtaggggatagtttggacggtagaaagtttatttttaattttagttttttagttaaggtttttattagtttgggatatttgtaagtgttatattttattgggtgaaattttaagattttttttaggggattttattcgttttttttttttcgttattatgtagcgtcgagaaatagagttttgaacgaatttttagatgttcgtgcgttggggtttttttaggacggcggcgtttagtcgtttttgggttagggcgacgtttggaattgggtagggtttttggtatcgggatttcgaaaagtagatttgtttttttttgtttagtcggttttttttttttttgtagtcggttttttgtattcgcgttttttttgttagtcgagggtttttagttttaattttatttttttagttgtgcgtttatagcgatcgttttttttgtagggacgtacggatttggtggtggagttttggtcggtaggattggataggaatcgaaggggcgaggcgggttcgggggtggtgcgttttaattgggtgttgtttttagggggtggggtttgattttttatttttcggcgcgtcgggattttgttatagttgttgtttatatcgcgtttagcgtttttattgttattttcgttgtttttgtcgttttcgttatgggtttagagttgttttttgatttggtgttttagtttagtcgcgtcgtttatattttcgttaagaagaatggtatttttttagagttgcgtatcgtggatttggttaaaggtgggtttagttcgttttttcgcgtgtttataaatttagtgtatttttaggttttcgttttgttttgttttgagcgtttcgtcgttcgtatagtttttttatttttttttgtagcgtttgttattagagaatgttgtggattgagtggttttgaagggattatagtttttttgaattttagtttgttttttgaaaaggaggataacgttattttttgttttgtagggatggaaagaaaatattgaatggagttgatagagtttttgcgtggaatgtacgtatataaatttataaagtttagaagatttcgggaagaaggatatattgttgtgagaattaagagatgggaagagatgagttattttagtttgtttttttttttttggtttattagagttcggttagaaaatttttttttatttatttgttgtatttggttttatttattaaaattttttagttgtttcggaatgtggtagggtagggaggtttagttagggagtgaggttgatttaggtttttagttttagattttgttgttttttagggttgtggggtttcgtttggggaggaggagggagggtgtagaggtgtagcgtttttattttgaagattttttttgatttttttttttttagggtagtataagagtaaggagtttttgtagattaatagtttggggaaattgtcgacgtttaaggatggtgattttattttgattgaaaggtgtttttttttttttattttttatcgtattcggagtttatgtgattttggttttttttattggtttcgggtttt

SEQ ID NO: 2267 - DNA, 2299 bp, Artificial Sequence
  chemically treated genomic DNA (Homo sapiens)
ttttttttaaaaagtattaaggttatttatttaataaataggaagaaattttaaagtgaaaatatagaggggttagggatttttttattaagagtttaagattaggttgggtttagtggtgtatgtttgtaattttagtattttgggaggtcgaggtaggtggattataatggaaggggttcgagattagtttttattaaaatataaaaattaggtgtggtggtgcgtatttgtaattttagttatttgggaggttgaggtaggagaattgtttgaattttggaggtggaggttgtagtgagttgagattgtattattgtattttagtttggatgatagagtgagattttgttttaaaaaaaaaaaaaagagtttaatattaattttttgaaagttagaggaagtagaatgtatcgtaagtaataaggagaaataagattgattttagcgtcgtataaagggaaattattaattttgaaagtaaattatgtgaagggttttttgtgggttttttttatattttaagttttagggtatatgtgtataatgtgtaggtttgatatataggtatatttgtgttatgttggtttgttgtatttattaatatattatttatattaggtattttttttaatgttattttttttttagtttcgattttttcgataggttttggtgtgtgatgttttttttgaagggtttttttaaagattaggttaaagttaaagattaagtttttttttttaaacgttttagttaaaagtaggagttaatttttatattttcgaaggtggttttaggattttaagttatattttggtaagggtgtggtagttggtagaggattgtaggtttttgttaggtagaatttgtcgggttttggggagtggagatttagattttgaggtggaagtagagataagagttgggtatatttatttggatgtggggttgggagcggtgaattagagtttagttagattttggaggttggtagtaggttttgtagaggtgtaggggtattttatttagaaggggttatttattggttttttgtggttaaaattagttttaagtaggattttttatggttggagtcgtttttaaaggggcgtcggtttttatttaggtgtgattttgagcgttgtttagttgaaaaggcgtgatgatagggagtatacgtgaggttattcgggaagaatattttgttaagtgtagaggtcgtaaaaacgtggaatatggttttgttttttatgttttattgaaaatgattattagaagtagaaattgggtttgtgtttagaatttgaaaatttgtagggtagaaaaataggataaaggtattttttagtgattgtaaaattaaattttaatagaaagatgtttgaagagataggtggattatgattttagaattggagataggagaggtttttagaattaaagattatttatggttatataaatatttgagaggtatttttattaaaatatttttttttttatattaatattatgaattatatgttatgtataatttataatagagtatagtagagttattagtggtttaaagtgttgtatatatgattgttatatgaggtaaataagattttttgatttagagttaagaaaatggaaataataattgttaaggtatattaagaattatatatgtatgtgtgtgtgtatatatatatatatatatatatatatatatatatatatatatatataatatttaatttttatagtaatatatatttataaatgagtatatataaatatgtgtgtgtatgtgtgtgtgtgtatatatatttatttaatttttgtagtaattttataaggtagggattattgtaatttttatttgagagaggcgtattttgaagtatttggtagtaaggtaatttgtttaaggttatatagttagtaataagtatagtacggttttgtaggtttaggtgggttttattatatcgttttttttggtagtaagaaaatggaaggtttttgaagtagtgggggagttatcgggtataaggaagtagatttttggaggaatatataattagtaaaagtggagtttaggaatagacgttattaggtataagtgatttttttagatattgggaatttgtgttttgaaatattaaagtatttttaggaagtagaaaagttagtttttttattgaattgttatgtggttttgaagaaaatgttttaatatttataaaatttaaagttttaatttgtaagaaggaaaaaatgttatgtgttttttattaagttttttttt

SEQ ID NO: 2268 - DNA, 2299 bp, Artificial Sequence
  chemically treated genomic DNA (Homo sapiens)
aaaaaaaaatttagtaggaggtatatgatatttttttttttttgtagattaaagttttgagttttatggatattaggatattttttttaaaattatatagtagtttaatgaaagagttaatttttttgttttttaaaaatattttggtgttttaaaatataagtttttagtgtttggaaaaattatttatgtttggtaacgtttatttttgggttttatttttgttaattgtgtgtttttttagggatttgtttttttgtgttcggtgatttttttattattttaaaaattttttatttttttgttgttagggaaagcggtgtggtggaatttatttgggtttgtaaggtcgtgttatgtttgttattagttgtgtgattttgggtaagttattttattgttaggtgttttagggtacgttttttttaagtggggattgtaatagtttttattttataagattgttgtaaggattaaatgagtatatatatatatatatatatatatatatatatttgtatatatttatttataggtatgtattgttgtagggattaaatgttatatatatatatatatatatatatatatatatatatatatatatatatatatatatatatatatataatttttaatatgttttagtaattattatttttatttttttaattttgggttagagaattttatttattttatataataattatatatgtagtattttaaattattggtaattttgttatattttgttataggttgtgtatagtatataatttatgatattggtgtgaagaaagggatgttttaatgaaaatattttttaaatgtttgtgtagttatagatgatttttaattttgaaaattttttttgtttttaattttgaggttataatttatttgtttttttaggtatttttttgttgaggtttagttttgtagttattaaaagatgtttttgttttgtttttttgttttgtagatttttaggttttgaatataagtttagtttttgtttttgatgattatttttaatagagtataaaaaatagagttatgttttacgtttttacggtttttgtatttggtaaaatatttttttcgaatggttttacgtgtgttttttattattacgtttttttagttaggtaacgtttagagttatatttgagtggaggtcgacgtttttttggaggcgattttagttataaaaagttttgtttggagttggttttagttatagagggttaataaatggttttttttgaatgaggtgtttttgtatttttgtagagtttgttgttagtttttaggatttaattgggttttgatttatcgtttttaattttatatttaggtaagtgtgtttagtttttgtttttgtttttattttaagatttgagtttttattttttagaattcggtaggttttgtttgataaggatttgtagttttttgttagttgttatatttttgttaaggtgtgatttggagttttggagttattttcggagatgtgaaaattagtttttatttttagttaaagcgtttggaaagaaaagtttgatttttagttttgatttggtttttaaaaaaattttttaaggggaatattatatattagggtttgtcgggggggtcggggttgggggagggatagtattaggagaaatatttaatgtaaatgatgtgttgatgggtgtagtaaattaatatggtataggtatatttatgtattaaatttgtatattgtgtatatgtattttagaatttaaagtataaaaaaaatttataaaaaattttttatatgatttatttttagaattggtggtttttttttgtgcggcgttggaattaattttgtttttttttattatttgcggtgtattttgttttttttaatttttaaaaaattagtgttaaatttttttttttttttttgagataaaattttattttgttatttagattggagtgtaatggtgtaattttagtttattgtaatttttatttttagggtttaagtaatttttttgttttagttttttaagtagttgggattataggtgcgtattattatatttaatttttgtattttagtaggggttggtttcgaattttttttattgtgatttatttgtttcggttttttaaagtgttgggattataggtatgtattattgagtttagtttagttttgaatttttgatgagggaatttttgatttttttgtgtttttattttgggatttttttttgtttattaaatgaatgattttggtattttttggagaaaa

SEQ ID NO: 2269 - DNA, 2270 bp, Artificial Sequence
  chemically treated genomic DNA (Homo sapiens)
gttatattttatgttttttgagagtgttattaacggaattgagaaaataattatttagacgggttatttgggggttgatttttattttggaatttttttggaaggtgaacggtttatgttatgtagttgttatgtaagaggtattatgggatttttttttttgggcgtttatggagtcgcggtagagttttgggtgatttagtagtagttgtttgttgtgtggttgtttttattgtttttttttataattgttgttgatttttttgtattgattttgtagatgtttttttggtttcgtggtgtttttttggatttttaagggatttttgtgtatttattttagttttttttttgttagtaatgtttatttttttagtttttttaagtagttttataaaaaatttttagtgaaaaatattagttaagaaggcgaaggtatttggaaaatttttagatttggttattgtgtgttgtaattttagtttttttttatagttatgatatgtatattaatgtaggtgtttttgagatttttgtaggttcgagaaagtatgatatgtttttagaattttggatttggattttattttggatagtatatgataaggacgaggatttttattttagttagttaaagttggatagaatttttaaaagtaatgaagttagttttttggatatatttacgggttttgttttgagaaggaattgagtaggtagtgagaagagtcgagtgaagtttggttcgtgagtgttttaataattgagatgaacgtcgattcgtttgtaggtaagttgttagtaagtatttattaaatatttatcgtgagttttgtattttgtttagttattaagaaattaaaagggggaaaaatagttttatttgtttagagtttataataaatttgtattgtgaatatagaatatagaaaaattggattttagtgaggtgttagaaagagtgtattgtttagttgagatagtagatgaaggaaaaatatttttggtttttttttgttatgtaatcgtatcgggagggtggagtgttggtgtttttagtttatttaatttggatggagttgcgggtttattagtttggggattggttttatcgtttgttttgtttagtagtcgcgttttttcggattttttgttttagtttgaattttttttttgttttggttttattttaagacgaagattgtgtaatttagaaaatgtagcgtaagtaattatgtttagtgtgatgttaaatattttttaaaggtagcgtagatttgtagaaattgtagtttgggagaagtgatggtgtttttttttttattattttagtttgttttgattatttttatttatatgatttattgtgatgtttttataatgtagtttggttattatttgggaatttgttggaaatgtagattttggtatttcgtttaagattttaaattgaagaaggttttagtttttttttgtaattagtaatagatgtaatttgtatggttttgatgtaaattgatttggaagaatggttttggtatttatattttggtttttagatgtaggtaatttgagttgaatatttttaaatttgaggtatagtatagaaaaaagaatataaatagtttatataaagtaaaaaaattttttagaaaggatttaagttggttggggcgcggtggtttatatttgtaattttagtattttgggaggttaaggcgggcggattacgaggttaagagatggagattattttggttaatgtgaaattttatttatattaaaaatataaaaaattagttaggcgtggtagtaggtgtggtagttttagttattcgggaggttgaggtaggaaatttatttgaatttgggagatggacgttgtagtgagttaagattgagttagtgtattttagtttgggggatagagtaagattttgtttttaaaaaaaaaaaaaaaaaaaaaaattaggtttaggtaatataatgaggttttatttttataaaaaaataattgttttaattagttaggttgatggtgtgtatttgtgattttagttatttaggagggtgaggtgggtggatcgtttgagtttaggagtttttttttgggatgtttttatttttgtttgtagttttatttgttattttgtgtagatttattttgtttttgttttgttttgttttgttttgtttttgagatagttttgttttgttatttaggttggagtatagtggtataatttcggtttattgtaaatttcgttttt

SEQ ID NO: 2270 - DNA, 2270 bp, Artificial Sequence
  chemically treated genomic DNA (Homo sapiens)
gggggcggagtttatagtgaatcgagattgtgttattgtattttagtttgggtgatagagtaagattgttttaaaaataaaataaaataaaataaaataaaaatagaatgagtttgtatagagtgataaatgaggttgtaggtagaaataagagtattttaagggagggtttttgggtttaagcgatttatttattttatttttttgagtagttgggattataggtgtatattattaatttggttaattaaaataattatttttttgtagaggtggggttttattatgttgtttaggtttgatttttttttttttttttttttttggagatagagttttgttttgttttttaggttggagtgtattggtttaattttggtttattataacgtttattttttaggtttaagtgagttttttgttttagtttttcgagtagttgggattattatatttgttattacgtttggttaattttttgtatttttagtatagatggggttttatattagttaggatggtttttattttttgatttcgtgattcgttcgttttggttttttaaagtgttgggattataggtgtgagttatcgcgttttagttaatttaagttttttttaaaaaatttttttattttatataaattgtttgtatttttttttttatgttatgttttaggtttgaagatgtttagtttagattatttgtatttaaggattaaaatgtaaatgttagggttatttttttaggttagtttgtattagaattatgtaggttgtatttgttgttagttataagagagagttaggattttttttagtttaaggttttaggcgggatgttaaaatttgtatttttagtaagtttttagatgatggttaggttatattgtgagaatattataatagattatgtgagtgagaatgattagggtaggttgaggtggtggggagaggaatattattattttttttaagttgtagtttttgtagatttacgttgtttttgggaaatgtttagtattatattggatataattatttgcgttgtattttttgaattatatagttttcgttttagagtggagttagggtaaaagaggaatttaagttggaataaggagttcgagaagacgcgattgttggatagaataagcgatgaagttagtttttaaattgatgagttcgtagttttatttaaattaaatgggttgagaatattaatattttattttttcggtacgattgtatggtagggaggaattaaaaatattttttttttatttgttattttagttaagtagtatattttttttagtattttattagagtttagtttttttgtattttgtatttataatataggtttattatgaattttgagtagatgaggttattttttttttttttggttttttagtaattaggtaaagtataaggtttacggtgggtatttaataaatatttattgataatttgtttgtaagcgagtcgacgtttattttagttgttgaggtatttacgggttaggttttattcgattttttttattgtttatttagtttttttttaaagtaaagttcgtggatatatttaaggaattggttttattgtttttaaaaattttgtttagttttaattggttagaataggggttttcgtttttgttatatgttgtttagaatgaagtttaaatttaggattttgggagtatgttatgttttttcgaatttgtaggagttttaagggtatttgtattgatatgtatgttatggttgtagaagggggttgggattgtagtatataatagttaaatttggggattttttagatgttttcgtttttttggttagtattttttattgaaggttttttataaaattgtttaaggaaattaggggagtgagtattgttagtagaaaggggattaaaatagatgtatagaggttttttaaaagtttaaaggaatattacgaggttagggaaatatttgtagggttaatgtagagaaattaatagtagttgtgggggaggatagtgaaggtagttatatagtaggtagttgttgttgggttatttagggttttgtcgcggttttatgagcgtttagaaggaaaggttttatgatattttttgtataataattgtatgatataggtcgtttattttttaggaagattttagggtaaagattagtttttaaatagttcgtttggatggttatttttttaatttcgttggtagtatttttagagaatatagagtatagt

SEQ ID NO: 2271 - DNA, 2471 bp, Artificial Sequence
  chemically treated genomic DNA (Homo sapiens)
taggttgtgggggtggtttttgtgtggtgttaagaggaagtcgggaagttaagtttttatgttttatgtatgttgtgttttaggttttgatgttggtttatatataggtggatatttttgagttatttaagataaagtttaaagaggaaatagttttagtggttggggtaagatttagacggattttttttttgggtttcgttttatttgttatattataaggttttaggtagatttgtggttattttttttggtatttaggtataatagttgtttggttgtgggatttttaggtttagcgagtttttttttgtgtttgttggtttttttggttatgggtaggatttttgtggtgtagggagggatacgttagagtttttagtattttatttttaagagagggatagagaattatttagaggggttggggacgttaaaggggtatatgaagattttaatttttagttttttagggttgtagtttagaggtagtttgttttttttttaaaattaaatttaaatttaattgtatttagaagtttttgtattgggaggcgtttgtttaggatgttttagtttggttttgtttttttagatagttagggatttaggttataattggttaatttagcgggcgaattcgagttcgtagtagtgttggttgattgtttttatttagcgttgtaatcggtatatttgtagataggaaattttttttattgaagtttttagtttattatttgagatatttggtgtgggcgggtgatttagagataaataatgagcgggggttttttgtatagtaattaattgttttaattgttaatatgtttaatttattacgtggagattaaggttgcgtcgaggaaggggttttggtttttttttgtttttagattgtagggtttatttcgtaatgttaatgtttatggttttcgttagttgcggttaggcgttaggtatacgggtaacgggtagggttagtattcggttttatacgggagttttgtgtagtatttgggttttttttgtgtgtgtgtgtatcgggtacggaggtattttttttttttgtcggagtttagtttgtgcggacgtagtgtatattcggtataggaagtagagtcggagatgttggtattgttagttgtgtcgtttttagggcgttttattttaattttttagagtggattattttttattgtaagtagaaataaagtttggttaaaggtttatcgtataaattagtagaaaacgttcgtagttgttgatttgggaagtggtttttgaatgtttataaaatttggttttgagtagtagcgaagttagtatatgttcgagcggtttttagtaggcgcgtagaagtcgcgtcgttttcgggaagtagggttagaggttaaggattgtgaaaagtttttatttttagtattaattatgttaggtagattgtttgggggatgtttattttgaaagtataaaaaaataaaatagatttttagtaagggaggatgggcgtgtaggttacggtagttttgttgagtagggaggggtttcgtttgttgtttgttaggttgacgtttcggtttttcggggatatagttttcggtttattggtttgttatatttttatgggtttggtcgagggttgtttttcggtttaatggtaatagtttttttatgttgtgggtgaacggaggtgttagtagatagaggaggagggttagggcgcggtgggagggagaaattcgttattttttttttagagtggagtttatttgggaatgatagtaggaggataaattttgaaagaaaaataaagtggagtttaggatgagaattattagtatattttagagtttaaaatgttatttaatttttcgtagtgtttattataataaatttatttaaaatttatttttataacgtggttgagaatattgtttttgttgattgattattttcgggttaagagttttgcgtgcgtttaggtattttaggtttttttcggttattatttttgcgtttgtgtttattgtataaaagtgaagttttagtcgttttaggttggttttttttttgattttttatttcgagtgattgttttagaagtgtattattttatgatatagtttgtgtttttgggagtttttttttaggagatattgatttttggttagttttacgtaagttcggttagttgatggaggtggaggtaggtgatttgagagggattttggttttgattttgggttttcgtaggggataacggattaggtttagtatagaaaggtttcggagaattaataatattgattaggttgttttcgtttttaatatgtaagttgatagggtgattgggaaaattaggagtttaaattagacggttaggtatcgaggtgggtaggatatttgagtaggtatgttgtgtgtgtcgttatttattttgacgaggattcgtagttttttttgcggcg

SEQ ID NO: 2272 - DNA, 2471 bp, Artificial Sequence
  chemically treated genomic DNA (Homo sapiens)
cgtcgtaaggagggttgcgggttttcgttagggtgggtggcggtatatatagtatgtttgtttagatgttttatttatttcggtgtttggtcgtttagtttaggtttttagtttttttaattattttgttaatttgtatgttgaaggcgggagtaatttagttagtgttgttagtttttcgaggtttttttgtgttgagtttggttcgttgttttttgcgagagtttaagattagagttagggttttttttagattatttgtttttatttttattagttaatcgggtttgcgtggggttggttaggggttagtgttttttgggggagggtttttagaggtataagttgtgttatagggtgatgtatttttgaagtagttattcggaatgggaaattagaaaggaaattagtttggagcggttgaggttttatttttgtgtagtggatataagcgtagaggtgatgatcggggaggatttgagatgtttgagcgtacgtagggtttttggttcggaggtgattagttagtaagagtaatgtttttagttacgttgtaaaagtagattttaagtaagtttattatgataaatattacgaaggattaggtaatattttggattttggagtgtattgatggtttttattttaaattttattttattttttttttaaaatttatttttttattgttatttttaaataaattttattttaaaggggaggtggcgagttttttttttttatcgcgttttagttttttttttttgtttgttgatattttcgtttatttatagtataagggagttgttgttattgaatcgaggggtagttttcgattaagtttatagggatgtagtagattaatgggtcgggggttgtgttttcggaaagtcggggcgttagtttggtaggtaataagcgaggtttttttttatttagtagagttgtcgtggtttgtacgtttatttttttttgttaggagtttgttttatttttttgtatttttaaaatgagtattttttagatagtttgtttggtatgattgatgttgggggtggaagttttttatagtttttggtttttgattttgtttttcgagggcggcgcggtttttgcgcgtttgttgggggtcgttcgggtatgtgttgatttcgttgttgtttagagttaggttttgtaaatatttaggagttattttttaggttagtaattgcgagcgttttttgttggtttgtacgataagtttttaattaagttttatttttatttgtaataaaggatgatttattttgggaggttaaaataaagcgttttaggggcggtatagttggtaatgttaatattttcgattttgttttttgtatcgggtgtgtattacgttcgtataagttgggtttcgataggaaggggggatgttttcgtgttcggtgtatatatatatagaaggggtttaggtgttgtatagagttttcgtgtggggtcgagtgttggttttgttcgttgttcgtgtgtttggcgtttggtcgtagttggcgaggattatggatattggtattgcgaagtgggttttgtagtttggaagtagaggaggattagagtttttttttcgacgtagttttgatttttacgtggtggattaaatatattagtagttaaagtagttaattgttgtgtagggggttttcgtttattgtttgtttttgaattattcgtttatattaggtgttttagataatagattgggaattttagtgaggaggattttttgtttgtagatgtgtcgattatagcgttgagtgaagatagttagttagtattgttgcgggttcgaattcgttcgttgagttaattagttgtggtttgaatttttggttgtttaggggagtagggttaggttggggtattttgagtaaacgttttttagtgtaggggtttttaagtgtagttaagtttagatttggttttaaagaagggatagattgtttttggattgtagttttgaaaaattggaagttgagatttttatgtgtttttttggcgtttttagtttttttggatggttttttgttttttttttgagggtgagatgttgaaggttttggcgtatttttttttgtattataggagttttgtttatggttagaagagttagtagatataggaggggattcgttaaatttgggggttttatagttaggtagttgttgtgtttgagtgttagggagggtggttataggtttgtttggggttttgtgatatggtaggtgagacgagatttagggaaggaattcgtttggattttattttagttattgaagttattttttttttgggttttattttagataatttagagatgtttatttgtgtgtaaattagtattagagtttgaaatataatatgtatggagtatgggagtttggtttttcggtttttttttggtattatatagaggttatttttatagtttg

SEQ ID NO: 2273 - DNA, 2343 bp, Artificial Sequence
  chemically treated genomic DNA (Homo sapiens)
ttgttcgtataagtttatgaggtgtgggtgggtttttgggagcgtgtttttagggttaagggtgggttttttatggtattgattatttatttttatttacggttttttattgtttttagaataaagttttttcgtcgtagtttatttggtattgtatttttgatttttgtcgtttgcgcgggtttttttttttgttgattttattcgtttttttgtgttttaggcgtatttagttttatgtatttatttatttatttttgtaggttggggtataggggttgaagattggataggggagtttgagttttagttttatttttgtcgtgtattgaatttaaatttcggtttttttttttagtagattgtatatatttgattgtttggtttgggggtttttgcgaaggttaaaggagtgaatgtttattagtgtgttttttgttatatatttttttagtatcgagttttattgttttagtttggaattcgtttattgttttttatttataggttttcgtttgagttaggttattgaaggggtttaggatacgttattttagaatatattattttggtatattgatttttttgtattaaaggtattttagaaatagtaggtgtagaaagggggttttgatttttttttttttttttgaaagtaggagttaaaacgttttgtgaaagacgttttttttatgttaggaggaggaaagatattattagataaggagagtcgaggttaaaagaaatttgtatgaatagattttttaatttttatttttttagttatataattgttattttatgtttaatttggtataaaagtttttatgtttagttatttttttgggttttggttatttgggcgggaggcgggggggtttttttgtatatgtaaatgaaatttgtatgttttttttttgttgatttgttttatgttagtttaattttttagtttagttagagattttaagatagtaaagaagggtttttttttttttattttattattattttgtatttttttgtttttattttcgttttttatttagtagagagagtgagtttattataaatataagttattttagttgtttttttgagaattttttatggttatttgtttttcgttaaataaaatttatagtttcgatcgcggtttagggattttatgtaacgagttttagtttgcgttttcgttattcggtttttttttcgttttaaagtattagggtttttatttgaaatttatcggtgtcgcgagtttttagtaggttatttcgggtttttttttttatttttagtttggttaggtattttttgttttggtagttttttttagagttttttttttttttaatatttttttttttaggattttttatttgtaatgtaatgattttttaatttgtttttattttattaaagtattgtttgtaagtaaatttagaaattagtagaatagttttcgttttatgttttttatgtttcggtgtatatattttaatattttgagtggatgtttgaattcgtggattatagtgaatttgtatatatatgttattatttttttttgtatgatgttttatatatttatggtaattttttttttaaaagaaatagggtttttttatgttggttaagttagttttaaattttaggttttaagtaatttttttattttagttttttaaagtattgggattataggtatgagttatttcgtttagtttgataattttttttttttttttgagacggagtttcgcgttgttgttcggattggaatgtagtggtgcgattttggtttattgtaatttttattttttaggtttaagcgatttttttgttttagtttttcgagtagtagggattataggttgataatttttttttaaataaaagattttatttatgtattattgaatttagtttattagtgtagagtatatgaataaagagaaaaagtatttttttaattaaatatgtttagttgtttagatagtggtgatatttttagtttgttatggtaatatgattataattttgatataatatgaatatgtgtagtattttatgtttaattttttatagatttagtttggttttttttaatatttttttttggagttgtatttgatgttattattagtttttatatagatttattggggaatgggataattttgtttttgttttttgtgtaggaattatttgattttgaaagttttgtgagaagttgtggcgagaaacggagttaattatatattacgatggtggagaaagataatgtttaatttataaattaggtatagttaagagacgaatagtaataattaataatat

SEQ ID NO: 2274 - DNA, 2343 bp, Artificial Sequence
  chemically treated genomic DNA (Homo sapiens)
gtattattaattattgttgttcgttttttaattgtgtttaatttataagttaaatattatttttttttattatcgtggtgtgtggttgatttcgtttttcgttatagttttttataagatttttaggattaagtgatttttgtataagaaataaaagtaaaattgttttattttttagtggatttgtatgaaaattggtaataatattaggtatagttttaaaaggagatattggaaagaattaagttgggtttataaggaattgagtatgagatgttatatatatttatgttgtattaaggttgtgattatattattatagtaagttgaaaatgttattattatttggatagttggatatgtttgattgggaaggtattttttttttttgtttatatgttttgtattagtaggttgggtttagtaatatataggtgagattttttatttaaaaaaaagttattagtttgtaatttttgttattcgggaggttgaggtaggagaatcgtttgaatttgggaggtggaggttgtagtgagttaagatcgtattattgtattttagttcgggtaatagcgcgagatttcgttttaaaaaaaagaaaaaaattattaggttgggcgaggtggtttatgtttataattttagtattttgagaagttgaggtgggaggattgtttgaggtttggagtttgaggttagtttggttaatatagggagattttgttttttttaaaaaaaaaattattatgggtatgtaaaatattatataggaaaaaataatagtatatatatataggtttattataatttacggatttaggtatttatttagggtattgggatgtatgtatcgaggtataaggggtataaagcggggattattttattggtttttaaatttatttgtaaatagtattttgataaaataaaagtaaattaaaaaattattgtattatagataaggaattttgaaggagggagtgttggagaaggggagggttttggagaaggttgttagagtaggggatgtttaattaggttgaaggtgaagagggggattcggagtggtttgttagggattcgcggtatcggtgagttttagatggaggttttggtgttttagaacgagaagagggtcgagtggcggaagcgtaggttgaggttcgttatatggggtttttaggtcgcggtcgggattgtggattttatttgacgaagaataggtggttataggaggtttttaaggaggtagttgggatgatttatgtttgtaatggatttattttttttgttgagtagggggcgagggtggaagtaggggagtataaggtgatggtggggtggaggaggaaaaatttttttttattgttttagggtttttggttgggttgaagaattaaattgatataaggtagattagtaggagaaaaatatatagattttatttatatgtataagggagttttttcgtttttcgtttaaatgattaagatttaaagaagtgattaggtataaaggtttttgtattaggttgaatatagaatggtaattgtgtaattaggaagataaggattaaaagatttgtttatatagattttttttggtttcgattttttttatttggtaatgttttttttttttttggtatagggagggcgttttttataaggcgttttagtttttgtttttaggaagaaaaggggaggttagagttttttttttgtatttgttgtttttgaagtgtttttagtgtagagaaattaatatgttagagtggtgtattttggggtggcgtgttttgaatttttttagtggtttggtttagacgggagtttgtggatggagagtagtggacgggttttaggttggagtagtaaggttcggtgttggggaggtgtgtggtagggggtatattgatgagtatttatttttttaattttcgtaagaatttttaggttaggtagttaggtgtgtataatttattgaaggagaaaatcgaagtttaagtttagtgtacggtaggggtagagttggggtttaaatttttttgtttagtttttagtttttatattttaatttgtaggaataagtgaatgaatatatgaggttgggtacgtttggggtatagaggagcgagtgaaattagtagaggaggaggttcgcgtaggcggtaggaattaaggatgtagtgttaggtgggttgcggcgagagagttttattttgagggtagtgagaagtcgtgggtaggggtgggtggttagtgttatggaaaatttatttttgattttgaggatacgtttttaggagtttatttatattttatgaatttgtacggataa

SEQ ID NO: 2275 - DNA, 2399 bp, Artificial Sequence
  chemically treated genomic DNA (Homo sapiens)
tcgtaggatatataggcggttaggttgagtttttaggaggtgaaatggttttgtttatattggttatggttttttttttttttgttttgttagtttttcgtcggtttggggtttttatatatgtttgttggtatagttttgttttttttgaattttttttttttttttttttgttgatttagtgttttttttcgtttgggtcgtgtaaggattttgggttttgtttttttattttttttcggtttgtttttagtttttatggtgatgtttttgttgggtggaagttagttttttggggtgaatttaggtttttgttgttttagtgtttggttattttttgttggatatatttatttatatttttttgggatatttttttttttatttttggtttttgaagttggggaaatattttttttggtaggtgaggtttgagtgatttagattcgagtagttttggatattatatttttttagttatatagagatggacgtgaggattgggtatatagaggggatatacggaaatgttggttagggttttggttttttttttgaatttgttattgagaggatagaaagtttttggtttttgttattattttgttagtagagggtatttagatattttatattggaagttggaaagatagcgtgtgtgtttttattaagttatatttgaagtttggtttgtatttggatttgttatttttgtgggttgataaaggtttttttgttttagtgagtttttaattgtatttgtacgagtattagttagtataggttatttaaattatagatttgtaggttgggaaggaggtttattttttttatttgttttttagaagtatttttttagttgaggtatagttttagggaagggtcggtggggatagattatgggttaggattgttttgggttaggatttgggattttgttgtagttttgttgatttgtagagaaatgtttggtttgtgtaggtttttagtaattatgttgtagaagtgggtttggtttattttgaagatttttttttgttgtggtattttttggtgttggaggaatgagtgttagttggtgttttttgtttggtttgaaaggttgatatgaattgtgtatttgattttggtagttgattgtgttgattttttagttttaattataatgagtatgagtatgaatgttttgaaatatagacgtatacgagttgttaaatacggtgagttattatatttttaatttttaggtaagtttaggtgttaggggaagcgatttatatattaaagagatgaagttttggtttttgcgggcgggggcggggagagggttggggagttgttggttttggggtgggagcgtatatttttgtttgttagattagaggatgtttgagaggtgatagagatggggttttttagttttgtgaaattcgagataggtttgataaattattttaataaaaagttttttgaagagaataattgggggaattgggtggagttttggtagtttttataggttggtaggtgtcgagggataggcgatattattattttacggggagtgtaggtacgtgtgcgtgagcgtgaatacgtgtgtaaatgtgtgtgtagttagtgtgtgtatgtgagtgtgtatgttgtgaggatgtgtgtgtgaagggtgtttgtatgtgaacgtgtgtgtgttagtgtgtgtatgtgagtttgtgtgttgggtgtgtgtggagggtatataagtgtgtgttagtgtaagtatgtatgttgtgggggtgtgtgtgtgggtggagggtgtataagtttgtatgaatgtgtatgtgaatatgttagtgtgtgtatgtgtgtgtgttgtggcggtgtatgagtgtgtgtggagggtgtataagtgtgtatgagtgtatgtgtgtgttttgtggggtatatgtgtgtggagggtgtataaatgtgtatgagtgtgtatatgaatatgtgttaatgtgtgtatgtgagtgtgtgttggggtgtgtgagttgtgttgagggtttataagcgtgtatgagtgtgtgtatggatatgtgtgttagtgtgtatgtgagcgtgtgtgtggacggtgtgtaagtgtgtatgtgtgtgtaaatatgtgtgttagtgtgtgtatgtgtgtattgtgggagtgtgtgtggagggtgtgtgtgaacgtgtgtgtagtgtgtgtatgtaagcgtgtatgtttgtgagtgtgtgaagggtgtataagtgtatgagtgtgtgtatgcgaatatgtgtgtgttagtgtgtgtatgtgagcgtgtgtgttgtggggggtatgtgtgtggagggtgtgtgtatgtgaacgtgtgtgtagtgtgtgtatgtaagcgttggtgttgggtgtgtgtgaagggtgtgtaagtgtgcgt

SEQ ID NO: 2276 - DNA, 2399 bp, Artificial Sequence
  chemically treated genomic DNA (Homo sapiens)
acgtatatttatatattttttatatatatttaatattaacgtttatatgtatatattatatatacgtttatatatatatattttttatatatatattttttataatatatacgtttatatgtatatattaatatatatatgttcgtatatatatatttatgtatttatatattttttatatatttataaatatgtacgtttatatgtatatattatatatacgtttatatatattttttatatatatttttataatgtatatatgtatatattaatatatatgtttgtatatatatgtatatttatatatcgtttatatatacgtttatatgtatattaatatatatgtttatatatatatttatgtacgtttataaatttttaatataatttatatattttaatatatatttatatgtatatattaatatatgtttatatatatatttatgtatatttatatattttttatatatatatattttataaaatatatatatgtatttatgtatatttatatattttttatatatatttatatatcgttataatatatatatatgtatatattaatatgtttatatatatatttatgtaggtttgtatattttttatttatatatatatttttataatatgtatgtttatattaatatatatttatatattttttatatatatttaatatataagtttatatgtatatattaatatatatacgtttatatataaatattttttatatatatatttttataatatgtatatttatatgtatatattaattatatatatatttatatacgtgtttacgtttacgtatacgtgtttgtatttttcgtggggtggtagtgtcgtttgtttttcggtatttgttaatttgtgggagttgttaggattttatttaatttttttaattattttttttagagaattttttattaagatgatttgttaggtttatttcgaattttataggattaaaaagttttatttttgttattttttaggtattttttgatttgatagataggaatatgcgtttttattttagagttaatagttttttagtttttttttcgttttcgttcgtagaaattaggattttatttttttgatgtataggtcgttttttttggtatttaagtttgtttgaaagttgggaatatgatgatttatcgtatttggtagttcgtatgcgtttatattttaagatatttatgtttatgtttattataattagggttggagaattagtatagttaattgttaaaattaagtgtataatttatattaattttttagattagatagagagtattagttgatatttatttttttagtattaggaaatgttatagtagaagagagtttttaagatgggttagatttatttttgtagtatggttgttgggagtttgtataggttaggtatttttttataggttagtagagttgtagtaagattttaggttttgatttaaggtagttttgatttatggtttatttttatcggtttttttttggagttgtgttttagttggggaggtatttttggaaggtaggtggaggaggtaagttttttttttagtttgtaagtttgtggtttaggtggtttatattaattgatattcgtataggtgtaattgagaatttattgaggtaaaagggtttttgttaatttatagaagtgataagtttaagtgtagattaggttttaggtatggtttgatggaggtatatacgttgtttttttagtttttagtgtagggtgtttgggtgttttttattgataagatggtagtaggagttagagattttttgtttttttagtgataagtttagagggaaagttagggttttggttaatattttcgtgtgttttttttgtgtatttagtttttacgtttatttttgtgtggttggaggagtgtaatgtttagagttgttcgggtttaaattatttaggttttatttgttaggaaaggtgtttttttagttttagggattagaagtggggggaaggatgttttaggaaaatgtaggtggatgtgtttagtaaagagtaattagatattggggtagtaaggatttaggtttattttagaaggttggtttttatttaataaagatattattatgggagttagagatagatcgggaggaggtgagaggatagagtttagggtttttgtacggtttaggcggaagggggtattgagttaatagaaaggaagaaaaagggagtttagaggggatagggttgtgttagtagatatgtgtggggattttaggtcggcgaggggttggtaaggtaggaaggagggaggttatggttagtgtaagtagggttattttattttttgggagtttagtttgatcgtttgtgtgttttgcgg

SEQ ID NO: 2277 - DNA, 2431 bp, Artificial Sequence; identical to SEQ ID NO: 1667
  chemically treated genomic DNA (Homo sapiens)

SEQ ID NO: 2278 - DNA, 2431 bp, Artificial Sequence; identical to SEQ ID NO: 1668
  chemically treated genomic DNA (Homo sapiens)

SEQ ID NO: 2279 - DNA, 2497 bp, Artificial Sequence
  chemically treated genomic DNA (Homo sapiens)
ggtagtttttttgtttatagtatgggttattaggttaaattttgttattatcgtggggaatttgattcggagttttatggttattcggatggattttgcgatgatagttatatttttggatttgtgagatagatagagaagttaggagatagtgtttagtatcgatagagtataaattttagagtatatttttcgtgtagggttgggttagttttaagtgtgtaggtttcgttttttaaatttgaggtatttttgtttttttgattttattttgattaggttattgtgatttttgagagatatgtagtttaaatttatttttattaaagatttttgttggttttgggggtatttgtagtttttgaaaagtagatggggttagaggatttacgggaatagttttatttgtttgcgtttagaggaggttaggtggttttgtttttagttttttttgtatttttgtcgggggtgtagatatggatgtagtttaggggtagttttttgtttattgtatatttgtaaagggttataggttatttaagtttttgatgggtcggttggatttagtaattatatggttttttgttgattaagttagtaagattttgggtattgtagaattttataggggtaaggtaggtagtatgataataaaagttttaaaatatagggtttggcgtaagtttacgataggtttaaggtttttgttttgttattggtttttttgttttaattttcggttttgtggggataaagtttttttggtttgttttatttatggtttttttttagagtttaggtaaatttgggggtattgatgtatttagtttagtttttatatttttttgttattggttttgggaaggggtatttggtattagggagtttttgagtagaacgtgggtttattttgtaagtttttttttagggggatcggtataaagttagagtttagtttttttaggttttaggttttatggaagggaaggggatttaggaagattgggtatgggaggaggtttttggggagttagtgttttttagagtttaggttcgtgggtgagttgagtagagggagtcgttgtcggattttttcggtgttcgtttcgtgtttgatttcgagggattttattggttgttgtttttgtagttgcgattatggataggttttagttttagattggttgttttttaaagtgaggggaggggttttgtttggtaaagttagaaggataattaagttgtaaagttttttgtgtttttttgggaaaaagagtgggttttttatttacgtgttaggttacgtatatggtattattggaggtttttatacgtagatttgagttagtgttatttagggtgttttcgtgattaaggatttatatataattatatatagaatttagaggtaaattgaaattaaaaacgggttaattatttaaatatttaggtaaaattattatgtttataaatgagttattaggttaatgtggggttatagtcgagaattatttgggaaatttatatattttttattttagtttgggggtgaagatttgaattagaagtggttttaggtagtaatttattgttgggttatcgtatttatttaggattgtgtttttatataggtatagtatagttttttggtattagtgttgggtttttttcggttttttagtttcgttttttatttttttttttttagtttagtagttttgtttgtattttagttttttaattcgagttttttagtaatatttttttttatttgtgattcgaataaatgattttgattttaataaatttagggtgagtttttataaatttttgagttattttttggtaagtttttattgattatttttcgttatggtgttttttattgagtttatatatttgggaagaaagtataattaggagtcgttaggtgagtagtgagagacgttattttttttttagttatttttgtttagttatttttggttagttatttttgtttaattattttttttttagttatttttttttagttatttttgtttagttatttttgtttagttatttttgtttagttattttttttttagttaatttttttttagttattaacgagttttgggaaaagtagatggggttaggggatttataaaatagttttatttgtgtttggattaggttaagtggttttgtttttaaaagtttagttaggttggatttgtgttttttttgtttaggttttttacggttttgggtattgtttttgttgttgtatggggaatttttagttggttttgggataattttgatgttgatgtttatttgttttttttattgttgggttattgtatttaaaatagtatatggtatacgcgagggtaggtgtttattaagtatttgtataatggttgaagagtaggttacggggggagaggatgaaagttagaaagagtgatttgagaatgacgttattttttattatttgtttattttttta

SEQ ID NO: 2280 - DNA, 2497 bp, Artificial Sequence
  chemically treated genomic DNA (Homo sapiens)
tggggaggtgagtaggtagtggggaatgacgttatttttagattattttttttagtttttatttttttttttcgtgatttgttttttaattattatgtagatgtttaatgggtatttattttcgcgtgtgttatgtgttgttttaagtgtagtgatttagtaatgaaggagataggtgggtattagtattagggttattttagagttagttaggaattttttatgtagtagtagagataatgtttaaggtcgtagaggatttgaataagggaagtataagtttagtttggttggatttttgggaataaggttatttggtttaatttaaatataaataaaattgttttgtgggttttttgattttatttattttttttagagttcgttgatggttgggaaggagttgattgggaaggaggtggttgggtaagggtggttgggtaggggtggttgggtaagggtggttgggaaggggtggttgggaagggggtggttgggtaggggtggttggttaggggtggttgggtaggggtggttgggaagggggtggcgttttttattgtttatttgacggtttttggttgtgttttttttttaggtgtatgagtttagtggagagtattatgacgaagagtggttagtgaagatttattaggaagtagtttagaagtttgtggaaatttattttgagtttattggaattaaaattatttattcggattataggtgagagagaatattgttgaaaagttcgggttgggaggttgggatgtaggtagagttattaggttgggaggggaggggtgagaagcggggttgggaggtcgggagaggtttagtattggtgttaaggagttgtgttgtgtttgtgtgagagtatagttttaggtaagtgcggtgatttaataatgaattgttgtttgaagttatttttagtttaggtttttatttttaaattgaaatgaagaatgtgtgaattttttagataattttcggttgtgattttatattggtttggtgatttatttatgagtataatggttttgtttgaatgtttggataattggttcgtttttggttttaatttgtttttgggttttgtgtgtggttgtgtgtgagtttttgattacggagatattttgagtggtattggtttaagtttgcgtgtggggatttttagtagtattatgtgcgtggtttggtacgtgggtgaaagatttatttttttttttagggaagtatagaaagttttgtagtttaattgtttttttgattttattagataagatttttttttttattttaaagagtagttagtttaaggttgggatttgtttatggtcgtagttgtaagggtagtagttagtggggtttttcggagttaggtacggggcgggtatcgaagggattcggtagcggttttttttgtttagtttatttacgagtttgggttttggagggtattgattttttaggagtttttttttatgtttagtttttttgagttttttttttttttatggggtttggggtttggaggagttaagttttggttttgtgtcggtttttttaggagggagtttgtaggatgggtttacgttttgtttagaggttttttggtgttaggtgtttttttttagggttagtggtaggagggtgtgagggttgagttgagtgtattagtgtttttaggtttgtttaggttttggggagaggttatgggtggggtaggttaggaaggttttatttttatagagtcgaggattggagtaggagagttagtggtagggtaaagattttgagtttgtcgtgggtttgcgttagattttgtgttttggggtttttgttgttatgttgtttgttttgtttttgtagggttttgtagtatttaggattttgttgatttaattagtaagaggttatatggttattgggtttagtcgatttattagggatttgggtgatttgtggttttttgtaggtgtgtagtggatagagagttgtttttgagttgtatttatgtttatattttcgatagagatgtagggagagttgggaataaggttatttggttttttttaaacgtagataaataaaattgttttcgtgggttttttgattttatttattttttagagattataggtgtttttagagttagtaagggtttttgataagaatggatttgggttatatattttttagggattataatggtttggttagggtggggttaggagggtaggggtgttttaggtttgggaaacgggatttgtatatttggggttggtttagttttgtacggagggtgtgttttggggtttgtgttttgtcggtgttgggtattgttttttggtttttttgtttgttttatagatttaaagatgtggttgttatcgtagaatttattcgaatggttatggggtttcgaattaagttttttacggtggtggtagggtttgatttggtaatttatgttgtgaatagaagggttgtt

SEQ ID NO: 2281 - DNA, 2272 bp, Artificial Sequence
  chemically treated genomic DNA (Homo sapiens)
ttgaggttaaatatttgagattagttagagtaatatagtgatattataatttcgataaaaaaaaaaaaaaaaaaaaaaaacgtgaaaaaattagttacgtatgatgttttatgtttgtagatttaattggttgggagattaaggtaaaaggatggtttggatttaagagtttagggttgtggtgaattatgattaaattacggtatttttgtttcgataataaagattatattttaaaaaaatataaaataattttataaataaggattttaatgttataagtttttttataggttgtaaatgttttatgttaatttgaattgtattttaaaaagtaatgatttttggggtaaaggttatagaatatagttttaagaaataaatttatatatttattttataagaaataaatttatatttttgtgttataagagtttttgaaggagatattaaacgtagaaaggaaaaattagtattagttattataaaaatatatcgaattgtaaagattattgatattataaagaaattgtaaattaatgggaaaaataaaaagttagtaatattatgataggataaattttatatgtaataatattaaatttaaatgtaaatgggttaaatgttttagttaaaagatatagattggtaagttggataaagagtaaagatttattgttgttttgtatttaggagatttattttatgtgtaaagatatatataggtttaaaataaagggatggaggtatatttattaagtaaatggaaagtaaaaaagagtagggtttgtaattttagtttttgataaaatagatattaattgaaaaagattaagagagataaagaatagtattataaagtagtgttatttgtttttttttaggtttttgttttattagttattaggtggtagttatttaggatgttggaatttggttatttttgttttttttagtgggtgaggttggtggttgttttatttgttttaggtatatttttaatagaggtggttgtttgttttttaagttagtttggttttgtttggtatgtataggtttcggggatcgatatgttgttttgattgagatcgttttgattttgttaaattttacgtttggtttgggttatagaagtataagttttttgggtggtattattggttgttttttggattggaatataaagttttttttaagatgatttgtggtttgttttttggtaattaataagttcgtagtgttatacgatttatgagatatggattgaaggtttaaagggagtgtatattatgttttagagttagttgttttttttttttatatggttttatttgtagtatagttgttgtattgaggtttgtgtatgttgggtaagggtaagttggtttaaagggtaattagttatttttgtacggatgtgttagtagtaggtagattagttattaattttatacgttgttagttaggttaaattagtttttttattataaaggtagggttatagtgttatttggtttttttaaggtttttgtttttttagttattaggtggtatttatttaggttttgggaatttggttatttcggttttttggagtgggtgagttggtggttgttttatttgttttaggtgtatttttgtagaggtggttggttgttttttgagttagtttggttttgtttggtatgtatagattttagttacggatacgttattttaagtgagtttgttttgtttacggttaaattttaagtttggttagggttatagaaggtagagtttcgagggtggtaattttggttgttttttgtatttgaatataaagttttttttaagatggtttatggtttgttttttggtaattaagaagtttatagtgatataagatttttgaggtaaggattggagtttttaaaggtagtatatattttgtttttgagatggttgttcgttttttttatatggttttatttgtagtatagtagtagtattgaggtttgtgtatgttgggtaaggttaagagggtttaaagagtaattagttatttttgcgagggtgtgttaggagttgggggtatagttattaattttattcgttgtaggatatggaatattagtttttttaataaaaaggtagggttaagggttatttgttttttttaaggtttttgttatattagttattaggtggtagttatttaggttgtgggaatatggttatttatttttttgattgggtaaggttggtggttggtttattttttttagacgta

SEQ ID NO: 2282 - DNA, 2272 bp, Artificial Sequence
  chemically treated genomic DNA (Homo sapiens)
tgcgtttggaggaggtggattagttattaattttatttagttaaggaagtggatggttatgtttttatagtttgagtggttgttatttgatggttgatatagtaaaggttttaggaaaagtagatggtttttggttttatttttttgttagaagaattgatgttttatgttttgtagcgagtgaggttggtggttgtgtttttagtttttggtatattttcgtagaggtgattggttgttttttgagtttttttagttttgtttagtatgtataagttttagtgttattattgtgttataaatggagttatataggggaaacgagtagttattttaggagtaaggtgtatgttgtttttgggggttttagtttttgttttaagggttttatgttattgtgggttttttggttgttaagaggtagattataggttattttgagaaggattttatgtttaagtgtagaaagtagttaggattattattttcgggattttgttttttgtggttttggttaaatttagaatttggtcgtagataggataagtttatttggagtagcgtgttcgtagttggggtttgtgtatgttaggtaaggttaagttggtttaaagagtaattagttatttttgtaagggtgtatttagagtaggtggagtagttattagtttatttattttaggaagtcggggtagttaggtttttaaagtttgagtgggtgttatttaatggttgaagaaatagaggttttaggaaaattagatggtattgtggttttatttttatggtagaagagttgatttagtttgattggtagcgtgtgaggttgatggttggtttgtttgttgttggtatattcgtgtaaagatagttggttgttttttgagttagtttgtttttgtttagtatgtataagttttagtgtaataattgtgttgtaaatggggttatatagaggaaaggagtagttggttttggagtatggtgtgtattttttttgggtttttagtttatgttttatgggtcgtatgatattgcgggtttgttggttgttaagaggtagattataggttattttgaggaggattttatgttttagtttagaaagtagttagtggtattatttaggggatttgtgtttttgtggtttaggttagacgtagaatttgataaagttaggacggttttagttagagtagtatgtcggttttcggggtttgtgtatgttaggtaaggttaagttggtttaaagagtaagtagttatttttgttaagggtgtgtttggaataggtggagtagttattaattttatttattgaaagaagtagggatggttaggttttaatattttgagtggttgttatttgatggttgatggagtagaggtttgaggaaaagtagatggtattgttttgtagtgttgttttttgttttttttgattttttttagttaatgtttgttttattagagattaggattgtaaattttgtttttttttgttttttatttgtttggtaaatatatttttatttttttattttaagtttatgtgtgtttttgtatatgagatgggttttttgaatataggataataatgggtttttattttttatttaatttgttagtttgtgttttttaattggggtatttagtttatttatatttaagtttagtattgttatatgtgaaatttattttgttatgatgttgttagttttttattttttttattagtttgtagtttttttatagtgttaatggtttttataattcgatatgtttttgtagtggttggtattggttttttttttttacgtttagtgttttttttaggagtttttgtaatataagaatgtggatttattttttgtaaggtaaatatgtggatttattttttgggattgtattttatggtttttattttaagaattattattttttaaaatgtaatttaaattagtataaaatatttatagtttatggaaaggtttgtggtattagaatttttatttataggattattttgtgtttttttgagatatggtttttgttatcgaggtagaagtgtcgtggtttgattataatttattatagttttgaatttttgagtttaagttatttttttgttttaattttttaattagttggatttataagtataaggtattatgcgtggttaatttttttacgttttttttttttttttttttttttgtcgagattatggtattattatgttgttttggttgattttaaatgtttgattttaa

SEQ ID NO: 2283 - DNA, 2313 bp, Artificial Sequence
  chemically treated genomic DNA (Homo sapiens)
taggtaggggttttaggtttaggggtttttgagtagggaagattttagtaggaggtagggagggtgtttttttttacgtatagtattgtaggggtgcggtggggagggggtttttttttacgtatagtattttcggggtgagtttgaggggagttagtattaaaggttattgggatttagggttttggtagaggaagcgaggtttggggtagaggggatttggtttgggcgggggaggggttgcgattaagtttagggtattaggtggaggagggtagagttcggagatggttattattattcgggagtcgtttttgtttttagtttcgaggtagacgtttgttttggtggggtatgtttaggttacgggaggtgggtaggattattgtgggtgttgtaggggttgtcggcggaggttagggtatagggaggggagaaattatagtttggattttatttttagtttaagttatacggaatcgggggtttttgtatagaggtttgttttgtagtatggttttgagtagttgtatatatttaggtttaagtggtttttttaattatttttgtgtttacgattgtgtagggaatggttaggattttagggaaatttttcggatatttggcgttgttcgtttattttagatttgtttttttgttttttagtttttttttagtcggtttttgaggttttttttaggaggaggaggtttttgaggttttttttgtgagggtcgatttgaaggtttgagacgtttttttttatttttgtaggtgattttttagaggattttgggtttttagagtcgagggttatggagatttttggggtttatttatggttttgggattgtttttattttggtgggattaagttataatttggagtagtttaaggttggtataatagatatttataaattaataaaaataattgtgaaaatataagtaaaataagttcgtcggtatttaagagttttgtagtagtagggttagtttgagagttgttttttttgttttatttggggttttagggcgttgtagttcgttattagagggattagatgttcgtggttttttaagggtttagtgtggagttatttatttttattagtatagagaagatttacgttttgtggttgaagtaggggggtagttttttcgatagttgtaggtcgttcggtttcgcgtttggggtatagttggcggggttttgtcggtttcgttttagcgtgggtattcggttataggttagtttttttttgaatggtttttgggttatggtatttggggatattatagttgtgttgaatgtatagttacgtgttattagttttttatttggaataaaattattatcggttttggttattttgaggaaattttaataagttgtttttaagaaatattttttaataaaagaaatattgtttatattgaagtgttttaaatttgaagaagaaaatgagtatttgaatttaaaagtgaaaaagaaataatttttttagaaaaacggatttgaatagtttgggtttagggtgagattttatattttaaatgttttattgatttatttgggttttttaggtgtaatatttgataatatttatcggtaatttcgtttatgaatatattacgtcggggatttaagtacgttaaattgttttaattggtagttaaacgagagattgtaaaatatgtttttatttaacggtttaatgtttgagtatttatttttttcgttgttttgtcgttgggagtattggtttttgggtgagggatttttagtaagaagtatttataaatgaaataaaagtttagtaaatttgagttgaaggtaggggaaggagagttgttttttgaatattaatgaggggaggaatcgggtggatcgtagaaatgtttcgtgttggttgtgtaaattattgtttcggagttgttagaatttaattaggaaaggaaggggttttgtttgtgttattcgttatagagttcgggttttttagaagaaagaagcgtttttaagaatagaattttattaagtatatattttgagtaggttttgtttttgaaacgtaattgtttattcgaaggttttttatatttttttaagtagtttttttttattttttatagttatacggtgggaattttttttatacggttatataagtatttacgtattcggtttagttgtgtggttttgggcggtttcggattcggttttgtggtttgcgtgggtagttcggatggttggtgggttcggttttgttgttttttttatttttgtttattaagtagagaaaaattata

SEQ ID NO: 2284 - DNA, 2313 bp, Artificial Sequence
  chemically treated genomic DNA (Homo sapiens)
tgtggtttttttttgtttggtgagtagagataaagggggtagtaggatcgggtttattagttattcgggttgtttacgtaaattatagggtcgaattcggagtcgtttaaggttatatagttaagtcgagtgcgtgaatgtttatgtgatcgtgtgaaggaggtttttatcgtgtggttgtgggggatggaaaaaggttatttggaaagatgtagaagattttcgagtaaatagttacgttttagaaatagagtttgtttagaatgtgtatttggtgggattttatttttagggacgttttttttttttgagagattcgagttttgtggcgagtggtataggtagggttttttttttttttagttgggttttgatagtttcgaggtagtggtttatataattaatacgaaatatttttacgatttattcgatttttttttttattgatatttaggaagtagtttttttttttttgtttttagtttaagtttgttgagtttttgttttatttgtgaatattttttgttggaagttttttatttagagattagtgtttttaacggtagagtagcgggggaggtaagtgtttagatattaagtcgttgagtagaggtatgttttgtaatttttcgtttagttattaattggagtagtttaacgtgtttgagttttcggcgtgatgtgtttatggacgaagttgtcgatggatgttgttaggtgttgtatttggagggtttagatggattaatgaggtatttaaagtgtagaattttattttgaatttagattatttaggttcgtttttttaggaaagttattttttttttatttttagatttaagtgtttatttttttttttaaatttagagtattttagtatgaataatattttttttgttaaaaaatattttttggaaataatttattgaagtttttttagagtggttaaagtcgatgataattttattttagataaagaattggtgatacgtggttgtatatttagtatagttgtggtgtttttaagtgttatgatttaggagttatttagagaggagttggtttatgatcggatgtttacgttggagcggggtcggtaagatttcgttagttatgttttagacgcgaagtcgagcgatttgtagttgtcgaagagattgtttttttgttttagttataagacgtgggttttttttgtgttgatgggggtgagtagttttatattaagtttttggagggttacgagtatttggtttttttggtgacggattgtagcgttttggagttttaggtgggatagagagagtaatttttagattaattttgttgttgtagaatttttggatgtcgacgagtttgttttgtttgtgtttttataattatttttattaatttatgggtgtttgttgtgttagttttgagttgttttaggttgtggtttagttttattagggtagggatagttttagggttatgaatgggttttaggagtttttatgattttcggttttgggggtttagggttttttgaggggttatttgtaaaggtgggaggaggcgttttaggtttttaggtcggtttttatagagagaattttagggattttttttttttagggagggttttaggggtcggttgggagggagttggggaataaaggaataggtttggggtggacgggtagcgttagatgttcgagggatttttttggggttttggttattttttgtatagtcgtgggtatagagatgattggaggagttatttgggtttgagtgtgtgtagttgtttagagttatgttgtaggataggtttttatgtagggattttcggtttcgtgtagtttgggttgagaatgagatttaggttgtgattttttttttttttgtgttttggttttcgtcggtagtttttgtagtatttatagtggttttgtttatttttcgtggtttgagtatgttttattaagataggcgtttgtttcggagttggggatagaggcggttttcgggtggtggtggttattttcgggttttgtttttttttatttggtgttttggatttggtcgtagtttttttttcgtttaggttagattttttttgttttagatttcgttttttttgttaggattttgggttttagtgatttttgatattgattttttttagatttatttcgggggtgttgtgcgtgagagagagttttttttttatcgtatttttgtagtgttgtgcgtgagagagagtattttttttgttttttgttagggttttttttgtttaggagtttttgggtttggagtttttgtttg

SEQ ID NO: 2285 - DNA, 2492 bp, Artificial Sequence
  chemically treated genomic DNA (Homo sapiens)
tttatttattaagtagggtggttattttttattttataggtgggtggtgtgaggtttttaggtgaaagggttttgtatataggaggcgtttaataaatgtttgtggcggttgtaataatttttcgggggtgaagtaggaagtttgaggggtttagaaatgagagagatagagatagggagagatagagagagagagagagatagagagagagagagatagagagagagagagatagagagagggagagagagagggagagagagagagagagagagagagagagggagagatagagagagagagggagggtttttttttatttttaggtcgggtagttaggttttttttatttagatttaattttttttattttgggttttgggtttttttttgttttgtttagtatttgggagttgggggttttcgttgtatggttgagtgttttcggggatttttattttcgtatttatttttggtttagtttggttttaggtttttttttttaggatatttgtagtttcggttggtttttcgttttttagagcgggtttgatttttgtgttttgggaggaggggtttaggtttggtttggttatttatgtgtttattttgtagatggttatggtggatttgtaaaattggtttatttcgggggttatggaggggttgtttcgggtttgagtaggaggttgggagttggtggcgatggtatagtcgggagtagtggtaggtagttttttaggtgtttacgatttagttggtagcgaggaagtttcggagagggatttggagatggaggtttgttttagaggagtggtagtttaattatttattaattcgggatgttagaatgtgatttggggcgtaattagattcggtagggaaggtattttgtgtcgggtaggttcgtgtgatttgttttttaattatttattttttggagttgtgggttgatataagtgtttatgtggatgagtttttttttgggttattttttttttaaggattttaattttggggggtttcgtttttttatttgtttatattaggtattgtttattttattgggcgggcgttgttcgatgtttttttttaggattttttttgttagatttagtagtagtagtttttggaggggaacgtcgttttattttttattgtttttaggtttgcggtttatagtggggttacgttttttgagtttggtttttatagtcgttttggttcgtttagtttttttatttgtcggagtaggagtagtataaacgttggagttgtttagttttgggtagatttcggttttgtatacgcgttgtttgtttacgcggagttttcggtttttttgggtgataaatggggttttttttggttttttaagatgaagttgaagattgtggttttttttgggtttgtcgggggtatgtgggtttggtagttgtttttgtatattttaagggtcggtttaggggaggtttagaggaaagaggaggtgtttttgtttagggattttggaaaatagagtgttcgggtataaaggaaaagttcggttaaggttaagggttaaggtcgaggggagtcgggggttaggggaataggtggattttatattattgtatatataatataggtgaatttgaatttaaatgatttattttagttttggtttttaagttatttttattgggaagaagaaatttttaggagtgatttttgagagttgagggttttcggggtggggtagtgtgaggggttgggttagtgtgaggggtaaagtttaacgggtattttatttttgcggtttgggtttttttagttgatggggtgggggatatttatttttttagttttagtttttagggaacggagtagagggtagagggagtgggttgtatttattaggaagtttgggagtgtttttgttgggggttggggtagaggtagttcggtaggtttttagggaggttggggttgggggtaggggtacggttgtgttcgggtatttttaatgtttgagttgatgggggagttagttgtttttgatagttagggaaaggggttaaagggggttttagatttttttagtttggaatgatagaaagtgttggaaggcggggttagtgggagataggtttttaggattagtttcgggtaggtagtttggtatttttttaggtttggtttatggatttagaggtgtttgggtttagatttgttcgggagggtagtggttgggtttggtttggtaggggttgaatggacgaggttagttggggtcggtgagaggttggggatttttagggtgagagtagtagttggatgagtttttggaatttttcgcggtgtttatagatgtagatttcggttttttagagggcgttgattagtattgtgttattgattttatttagtatgatgttcgtttttagttgggggtttaatttgttcgggttagggaggagggggttattttaggatgtttaggttgggtagg

SEQ ID NO: 2286 - DNA, 2492 bp, Artificial Sequence
  chemically treated genomic DNA (Homo sapiens)
tttgtttagtttgagtattttagggtgatttttttttttttggttcgaatagattgaatttttagttggggacggatattatgttggatgaggttagtgatatagtgttggttaacgttttttgggagatcgaggtttatatttatgagtatcgcgaggagttttagaagtttatttagttgttgtttttattttgagggtttttagttttttatcggttttagttgatttcgtttatttagtttttgttaggttaagtttagttattgttttttcgggtagatttgggtttaggtatttttgagtttatagattaggtttgggagaatgttaagttgtttgttcgaggttggttttgaaggtttgttttttattaatttcgttttttagtattttttgttattttaggttgggaaagtttagagttttttttggtttttttttttgattgttaaggataattgatttttttattagtttaaatattaagggtattcgggtataatcgtatttttgtttttagttttagtttttttgagggtttgtcgggttgtttttgttttagtttttagtaagggtatttttaggttttttggtgggtgtagtttattttttttgttttttgtttcgttttttgggggttgggattaaagaaatgggtgttttttattttattagttgggaaagtttaggtcgtaggagtgggatgttcgttggattttgttttttatattggtttagttttttatattgttttatttcgagaatttttagtttttaaaggttatttttgggagttttttttttttaatggaagtggtttaagagttaaaattgaaataaattatttggatttaagtttatttgtgttgtgtgtgtagtggtgtgagatttatttgtttttttgattttcggtttttttcggttttgatttttggttttgatcggattttttttttgtattcggatattttgttttttaggatttttgggtagggatatttttttttttttttaggttttttttaaatcggtttttagggtatgtagaggtagttgttaggtttatatattttcggtaggtttaaggagggttataatttttaattttattttggaggattagggagagttttatttgttatttagagaggtcggggatttcgcgtggataggtagcgcgtgtgtagggtcgaggtttgtttagggttgggtaattttagcgtttgtgttgtttttgtttcggtaagtggaggagttgggcgggttagagcggttgtgggagttaagtttagagggcgtggttttattgtgagtcgtaggtttgaggatagtgagaagtaaagcggcgtttttttttaggggttgttgttgttgggtttggtagagagagttttgggggagggtatcgggtagcgttcgtttagtaaggtgggtaatgtttggtataggtaggtgggagggcggggttttttagggttggggtttttgaggagggggtgatttaggagggggtttatttatatgggtatttgtattagtttatagttttaaggggtgaataattgaagggtaggttatacgagtttgttcggtataggatgttttttttgtcggatttggttacgttttagattatattttgatatttcgagttggtgaataattaagttgttatttttttgaggtaggtttttatttttaggttttttttcgaggttttttcgttgttagttgagtcgtgggtatttgagggattatttattattgttttcggttgtgttatcgttattagtttttagttttttgtttagattcgggatagtttttttatggttttcgagatggattagttttataggtttattatggttatttataaggtgagtatatgggtggttaagttaggtttgagtttttttttttagggtatagaaattaggttcgttttggaggacggagggttagtcggggttatagatgttttggaaagggaagtttggagttaggttgggttaggggtgggtacgggggtaaggattttcgagagtatttagttatatagcgggaatttttaatttttagatgttggataaggtaggagggagtttaaggtttagggtggggagagttgagtttggatgagaagggtttggttgttcggtttgggaataaagaaagattttttttttttttttttgtttttttttttttttttttttttttttttttttttttttttttttttttttttttttgtttttttttttttttgtttttttttttttttgtttttttttttttttttgtttttttttgtttttgttttttttatttttgagttttttagattttttattttattttcggggggttgttgtagtcgttatagatatttattgagcgttttttgtgtgtaggatttttttatttggaggttttatattatttatttgtgaggtggaaaatgattattttgtttgatagatgag

SEQ ID NO: 2287 - DNA, 2410 bp, Artificial Sequence
  chemically treated genomic DNA (Homo sapiens)
ttataaaagtaatacgaaaatattaatgttgtcggtttttattttttgggattaattaagagtaatagaataatttggatagattagaattatatatttaaagagatttggttttttaagaaatgttatttatagaaataaaattattttattatattttagttgttttaaattttattttcgttagtttagtaaggggaagaaatatgtatttttttttttttttttttttttttttttttttttttgtttttgttttaatatttttagttatttgtttttttttgttttagttatatatgggtaaattgttgtttgtttagatgtgggtttaatgtaggtagttttgagttattatttttagtatttgtgatgttattttggtttgtgatgtgggtgtgggtgggtgttatattattagattttatagttaaattatgtgggaagaagttttatacggttttgtttttagttttagaaatttttgaagtttttattttttttaaaatggtttggatgaattttgaagatttttatgtttttaagaagtatgttttgtaggaaatgtagttaaatatgtagattagatttggggatatgggtagtgagatgtatttttatatgtgtaaaagtgtttttttttatgtatataaaggaggtattgttaagtttttagaatagttgttaaggttagggattaggaatgaaagaatacgtttttgtagatttgggtatttttttttgtatgtttttttcgggaagattatatggtttttggaatgtgggttttttttatattttatggtaaatgtagtaattagagttgttagtagtgttaagggtttgaaaggagaataaagtcgtttttttttgggaatttttgggtaatgttttattgtttattaggtgttcgttttgttggtgggtttgatttttttatttgtaaaatgttttaggagttttttttttgagggggaggttagtgaaatgatggaaaaatagagtatgaatttggtaggggtttttggaatcgtatgtgttgtttgtttgcgtttttaagtgttgtttttggagtgaattagagtttgtaggcggatcgtattataggttgtggtggaattatttttaggtttatggtagttggatttatagatagttgagaggataattgtttttttttagtggcgagttttggttttattttttaagagttgggtcgattttagagtagggttttggaaagggtttgtttttgggaagagtttgcgaatgtttggagattgggtaggtaagagtttttttaaagttggttagttttggaaaaatggtatcgggtttttgggttatttggaaattattatttgtttttattttgtaaagtagggataggagggaaatgttaagtaaaaaaaggtataataggagtaggttatttgttttttttttttttttttttattttgagtttggtttttttgtattttatttttttatatatttattcgttagatttattttgttaggttttttatttaatgattttgtttggttttttatttattttgttttttaggttggagtgtagtggtgcgatttcggtttattgtaattttcgttttttggggtttaagtaattttcgtgtattagttatttaagacgttgggattataggcgcggattattaagtttagttaatttttgtatttttagtagagatgagtttttattatgttggtttagttggttttaaatttttggttttaagtgatttatttattttggttttttaaagtgttgggattataggcgtgagtttgtgtttagttttaattttttttttttagtagagagttgtttatatgggtagtatttgatatatattttttaagttttattaaattttgttttttttgtttttattgtaatttattttaattgattatgttataataggtaatttttagttttttttagaattaatttagggtattttgttttaagttattttttttatgttaataaaattaatatttattgaatgttttttgaaggttaggtattgttttagttattttattagtattatgttatgaaatgttattaattattttatgagtttgagtattgttttttgttttatagataaagaaattgaggtataagttgtttaagtattatgttttaagtaattaataaaggttgaatttaattaaagtttatattgtttttgtttttgtttttgtttttgagacggagttttatttttgttatttaggttggagtgtagtggtacgattttggtttattgtaatttttattttttaggtttaagggatttttttgttttagttttttaagtagttgggattataggtacgtattattatgtcgggttaatttttgtattttt

SEQ ID NO: 2288 - DNA, 2410 bp, Artificial Sequence
  chemically treated genomic DNA (Homo sapiens)
aaaaatataaaaattagttcggtatgatagtgcgtgtttataattttagttatttgggaggttgaggtaggagaattttttgaatttgggaggtgggggttgtagtgagttaagatcgtgttattgtattttagtttgggtgataagagtgaaatttcgttttaaaaataaaaataaaaataagggtagtatagattttggttgggtttagtttttgttggttatttgaggtatgatatttgagtaatttgtgttttagtttttttatttgtaaaatagggaatagtgtttaaatttataggatggttggtagtattttatgatatgatgttaataaagtggttagaatagtgtttggtttttaggaagtatttaataaatattagttttattgatataggagaaatagtttagaataaagtattttgggttagttttaaggaaggttgagggttatttgttgtggtatagttaattgaagtgagttataatgaaggtagagaaggtagaatttgatagaatttgaagagtatgtattaagtgttgtttatgtgaatagttttttgttggaagaaggagattgaggttgagtataggtttacgtttgtaattttagtattttgggaggttaaggtgggtggattatttgaggttaggagtttgagattagttgggttaatatggtgaaaatttatttttattaaaaatataaaaattagttgggtttggtggttcgcgtttgtaattttagcgttttgggtggttgatgtacgagaattgtttgaattttaggaagcggaggttgtagtgagtcgagatcgtattattgtattttagtttgggggatagagtgagtaaaagattaagtagagttattgagtaaaagatttagtagagtaaatttaacggatgagtgtgtggaaagatgaggtgtaggaaagttaaatttaagatggagaaggagaaaagagaaatagatgatttatttttattatgtttttttttgtttgatattttttttttgtttttgttttgtagagtaaagatagatggtaatttttaggtagtttaggagttcggtgttatttttttaagattgattagttttgaaaagatttttgtttgtttagtttttagatattcgtaaattttttttaaagataaattttttttaaagttttgttttaaaatcgatttagtttttaggaggtgaggttagggttcgttattgaaagggagtaattgtttttttaattgtttgtgggtttagttgttataggtttggaggtggttttattatagtttgtggtgcggttcgtttgtaggttttgatttattttagggataatatttaaaaacgtaagtaggtaatatatgcgattttaggagtttttgttagatttatattttgtttttttattattttattggttttttttttaggagggaggtttttgaggtattttataaataaaagaattaaatttattaataggacgagtatttgataagtagtgaggtattgtttaagagtttttaggaagaggcggttttgttttttttttaagtttttgatattgttaatagttttaattattgtatttgttatgggatgtaaaagaaatttatattttagaaattatgtagttttttcgggagagatatgtagggaaaggtgtttaggtttgtaggaacgtgtttttttatttttggtttttaattttggtagttgttttgagaatttaatagtgttttttttatgtatatgaaggagggtatttttgtatatgtagggatgtattttattatttatatttttaaatttggtttgtatatttgattatattttttgtaaaatatattttttaagaatatgaagatttttaaaatttatttaagttattttgggggaaatgaggattttagaagtttttgaggttagaagtaaaatcgtatagaatttttttttatataatttaattataaaatttgatgatgtaatatttatttatatttatattataaattaaagtgatattataaatattagagataatggtttaaagttgtttgtattgagtttatatttaaataaatagtaatttgtttatatgtgattaaggtagagaaagataggtgattagaaatattaaaataaaaataaaaaaaaagagagagagagaaaaaggaaagagaaaatatatattttttttttttattaagttagcgaaaataaaatttaaggtaattgaaatatggtaaggtgattttatttttatagatgatattttttagaaagttagatttttttaaatatgtgattttaatttatttaaattgttttgttgtttttagttggttttaggaaatggaggtcggtagtattaatgttttcgtgttgtttttatgg

SEQ ID NO: 2289 - DNA, 2327 bp, Artificial Sequence
  chemically treated genomic DNA (Homo sapiens)
taggtcgggcgtagtggtttatgtttgtaattttagtattttgggaggttgaggcgggcggattacgaggttaggagattaatattattttggttaatacggtgaaattttttgtttattaaaaatataaaaaattagtcgggcgtagtggcgggcgtttgtagttttagttattcgggaggttgaggtaggagaatggcgtgaatttaggaggcggagtttgtagtgagtcgagatcgcgttattgtattttagtttgggggatagagtgagattttattttaaaaaaaaaaaaaaaaaaaaaaaaaaaagtttggtagggagtaggatatttggattttattttgttgtttttttggttgtgtgatatttaggttacgttgtttttttgggtttcggtttttttatttgtttaagaggggttgatagtcgtatttgtttttttagtttttttttaggaaggtggtagttataattagtatttgttgaggttgattttgtattaggtttaggataggcggggtttagggaggttcgtttttcgttacgtttttttgttaggggagtttcgaggtttttttagtgttatttttatgttatattttgttttagttttgtgcgttttaagttagggtattgagtgtgttagtattcgtagggataggtattggattttgggtggatttgagggtttgtgattatttttttagttgtttttttttagaggttattttttttaaggaaggaaagaattttttcgttattttttgtagtgcggttagtttaggttagtttgtatagtagggttagaattagggtttttggggagggatgtttgtttgtttagtgggaggagacggtacgttcgtgaagtcgttatttagttagtttgggggttacgagtgttgtttttggtggcgttgtgcggggagggagggggtcgagtagggtgggtattcgtatgtttgtgttttgttggttttcgatagatgatagttttttttttagggtttttagtgtagagttttttggggatattatggttatttttgtttagatgagagggagtcggttgtttgtgatagcgtcgtaaaatgtcgttagggttttttttttttttttttttttttttttttcgtttttttttggttggtggttttttgtaggttttcgtttttgttggtgttggttataatgtttttatttttagggtttcggcgttttagttttttgcgtttatcgcgtttgttcgttagaatttttgtgtttttggtgcgtgtggtttgtcgagtttcgagtttttgttttttttagtttttttttttttcgcgtttttaggaggtgtttttggaagttacggagttttatcggtattaagatcgattgttttttggggtgaggtagtaggttgtatagtttggggttttgttttgttatgggataattatataatttattgttttttttgaagtggttgtaatatttgcggtggatagagcgtttggaattttggttgggagcgggtagggttaggtttgggggtagttttggtagtagtcgggggtaggggtcgtttatattgagaagtttgataggtttaggtgttatttgttgtgtgattttggataggtttttgatttttttgggttttagtttttttttttgtaaaatggaggtaaatgaggatggaaggagatgtagtgtggagtatcgagggtagaggagagttgagtcgattttattttttgttttagtcgtattgagagaggcgatttacgtagttgtttgtttgatttttgttttttaatattttttaatatttttttcgttattaggtttaggtttatgggtggttttgagtcgtattttttattgagtattaggagaaggtatcgtggggttaggggtggtcgagacgtttggaggttatagggttgcgagtattggcgttgtttattattttaggtttttagtacgtgttttagtttggttagtttagtggtagggtttttgtttgtggaggaagggaggttaaggtattttttttgagtaggaagtgagaggaatagttttgtatatattgggttttatatggtataatttgaaggtagatagtggtttttttgtatttggggaaattgaggtttagagagttagggattttttaagattagttagtagtagttgtttttttttggggtgttattttttttgttttttttgttttgcgtttgtttagtttttttgttttggtgattgaggatcgttaggtaggggttggtgttgggcggggggcggcgggttttttcgtagtgtaaggtcgggtt

SEQ ID NO: 2290 - DNA, 2327 bp, Artificial Sequence
  chemically treated genomic DNA (Homo sapiens)
ggttcggttttgtattgcgggagggttcgtcgtttttcgtttagtattagtttttgtttggcggtttttagttattagagtaggagggttgggtaggcgtagggtaggagggataggggagatggtattttaggaaggggtagttgttgttggttggttttgggaagtttttggttttttgggttttagtttttttaggtatagaggagttattgtttgtttttagattgtgttatgtgggatttagtgtatgtagagttgttttttttattttttgtttaggaaaggtgttttggtttttttttttttataggtagaggttttgttattgagttggttaggttggggtacgtgttgggaatttggggtgatgggtaacgttaatattcgtagttttgtgatttttaaacgtttcggttatttttggttttacggtgtttttttttggtgtttagtggagggtacggtttagggttatttatgagtttgggtttgatggcggggggagtgttggggagtgttgggagatagaggttagataaatagttgcgtggatcgttttttttagtgcggttggggtagagggtggggtcggtttagtttttttttgttttcgatgttttatattgtatttttttttatttttatttgtttttattttatagaggaggaaattgagatttagagagattaggggtttgtttaaggttatatagtaagtggtatttaggtttgttagattttttagtgtaggcggtttttgttttcgattgttgttaaggttgtttttaaatttggttttgttcgtttttagttagggttttagacgttttgtttatcgtagatattatagttattttaggaaagatagtagattgtatagttattttatagtagggtagagttttaaattatataatttattattttattttaaagggtagtcggttttggtgtcgatgggatttcgtggtttttagaggtattttttggggacgcgggaggaaagagggttgaggagaataggggttcgaggttcggtaggttatacgtattaagggtatagggattttggcgggtaggcgcggtgggcgtagggggttgggacgtcgaaattttgggagtggggatattgtggttagtattagtagggacgggagtttgtaggaaattattaattagagagggacgaggaagagagaaaggaggagggagggaaagttttggcggtattttgcgacgttgttataggtagtcggtttttttttatttggataggagtggttataatgtttttaaggaattttgtattggagattttaggaggagggttgttatttgtcgaaggttagtaagatataggtatgcgagtgtttattttgttcggtttttttttttttcgtatagcgttattagaagtagtattcgtggtttttaggttggttgagtagcggttttacgggcgtgtcgtttttttttattgggtaggtaggtatttttttttaggggttttggttttggttttgttgtgtaggttggtttgagttgatcgtattgtaggaggtggcgggaaggttttttttttttttgagggaagtggtttttaggggagagtagttgggggggtagttatagatttttaggtttatttagggtttagtgtttgtttttgcgggtgttggtatatttagtgttttagtttgggacgtatagggttgggatagagtgtagtatgaggatgatattgagagggtttcggggtttttttagtaggggaacgtggcgagagacgggtttttttaagtttcgtttattttgggtttggtgtagggttagttttaataaatgttaattgtggttattatttttttggggaaaagttgagggggtagatacgattgttaattttttttaaataggtgaggagatcgaggtttagagaggtaacgtgatttggatgttatatagttaagggggtagtagagtgaggtttaaatgttttgttttttgttaagtttttttttttttttttttttttttttttgagatggagttttattttgttttttaggttggagtgtagtggcgcgatttcggtttattgtaagtttcgttttttgggtttacgttatttttttgttttagtttttcgagtagttgggattataggcgttcgttattacgttcggttgattttttgtatttttagtagatagggggttttatcgtgttagttaggatggtgttgattttttgatttcgtgattcgttcgttttagttttttaaagtgttgggattataggtatgagttattgcgttcggtttg

SEQ ID NO: 2291 - DNA, 2426 bp, Artificial Sequence
  chemically treated genomic DNA (Homo sapiens)
taattttttcggggttgttagatcgtcgatatatacgtatatatatatagagtgtatatatatgtatatacgtgtagtcgtattttttggtgcgtttgttgtgagggtataggggtgggtaggttggtaggtacgtgaagttgttattagtttcgagggatcgtgagcgagttgggatttgggggagaaaaaaatgggggcggacgttagttttttgggcggtcgtcgttatcgttttcgttttttcgaggttttttttgtatttttgggtagcgaagtttttcgttaagacgggggttgatgttatttcgggttgtttagttaggggattcgggggttttggtggttgttttcggaagtgagttagtcgtttgtcggtcgataggtttggaatttttagttagaggatagaaaatttgtatgggttaggtgagcggggtttggtcgagggtagtcgggtagggggtagtagggtgcggtagtttgtttatcggaattttttagggtgtattttaggggggttgtttatttgaagggaagtgaggacgagggtgtttaaaggtcgttttttttatttttatttttatttttatttttcgtttttcgggatcgttacgttttggagtgagtgtagtcggtttgttttttaaagttttttgtttcggtcgattagttgggtgagttttggaattggaatttggattgtttagtgtgttgattttataatttcgttggggtggatttttagtttggtatttagttgttttttaattttgagcggtattcgtggatgtagtcggtttttggtttagggatgtttatttatttttggtttgtttgaagaaagttgttgtttttaatttttttttttttaagtaagtttaaaatttttatgagtaaaagagtttaaagaggtaagaggatattggcgttttaattgttttttttttttttaattttttttttttttttttttttggttggttttatggattatttgggagataaatttatagtggtttagatttatatgatttagtggatgggtatcgtgaggaggtttttttaggaagtttttaatttggtgattattacggtgggttacgaacggacgagtgtagagtcggttagtcggattttttttaagcgtatttttttttttcgatatttggtttttcggagtcgggaattttttcgtcgtttttttgttcgtagttaatagagattttttttattgaggaaaaggtatatagattcggaatcgttagatattgtaagtttattatgttttaaaaaatattaaaataatattgaaagttttttttttttagtttttttagggagggggttttagatattaaatcggggaagttattttttttagaatagttgttagttaaagtttaggtattttttgttttttgtatttgggaaagaggtacgtagtaataattttttttttttgaagttagttaggatatttttgttggagtcgacgtttgtgtggatagggttagtacgtgagttgggttgaatttgttagttgatttatgtttaagtgtgaatattttaattttcgatacgaaagtttatttttttttttatttttagggtggattagtggtatttgttttatttttttttatttttttaggaagtataagtggcggtgttatgtgtacgttgagttgtagtttttgtcgttttatcgagtttttattggattgttaaggaaagggttttaggagatcgaggtgtggtgggcgagtttgttcgttggtcgtgaattttgggtttggtgtgagtgggttagggagggaggttttgattttttatttaggtaggttcgggagggtttggattgggatagtagggtggaatgatagttaatgattaaaattttggtttgtgttttgttaggcgatagtgtagaaataatcgtaaggtttttttgatgatttggagaggtgggattgggtttagaaagcgaaagtgtttattgtgggggaagtatagtgagtgagtggtagagttaggtttcgaattttaggttttgatttttttatttacggttttttgtagtttagtttttagtagatgttttttttagatttttttaattaatttagggttgtttaggttattgattagatttgagtttaaagagagggtttgttatttttatataggagatttttgttatttgattgtgttggtttagtttatgggagtatttgaggataggcgaagggttaagttagtttttttttttgggttttttttagttaggagtgttatagttattaagggatttagtatttagggaggagttttgagttggttttttttatattcgaggtggtagggtttatagttgttttgttaggtgtaggggtttagtattttttttgttgatttagaggtgt

SEQ ID NO: 2292 - DNA, 2426 bp, Artificial Sequence
  chemically treated genomic DNA (Homo sapiens)
atatttttgggttagtagaggggatattgagtttttgtatttggtagggtagttgtgagttttgttatttcgagtgtagggagggttagtttagggtttttttttaaatgttgggttttttaatgattatagtatttttggttaggaggaatttagaaaaaggggttggtttagtttttcgtttgtttttaagtgtttttataaattgggttaatatagttaggtggtagaagttttttatgtgaaaatggtaggttttttttttaggtttaggtttggttagtgatttgggtagttttgaattaattgggagggtttggggagaatatttgttgggagttggattgtaaagagtcgtgaatggggaggttagagtttggggttcgggatttggttttgttatttatttattgtgttttttttatagtaggtattttcgttttttgggtttagttttatttttttaaattattagaaggattttacgattgtttttgtattgtcgtttagtaggatataggttaaggttttaattattagttgttattttattttgttgttttaatttaagttttttcgagtttgtttgagtaagaaattaaggtttttttttttggtttatttatattaaatttaaggtttacggttagcgggtaaattcgtttattatatttcggttttttaagattttttttttggtaatttaatgaaagttcggtggaacgataaaagttataatttagcgtgtatatgatatcgttatttgtgttttttaggagggtgagaggagatgaggtaggtgttattaatttattttaaaaatagggagaaggatgagttttcgtgtcgggggttggggtgtttatatttaaatataaattaattggtaaatttagtttaatttacgtgttggttttgtttatatagacgtcgattttagtaaaaatgttttgattgattttaggagagaggaattattgttacgtgttttttttttaggtataggggataggaagtgtttgggttttgattgataattattttggaagaagtaattttttcggtttgatgtttgggattttttttttgggaggattggaggggaggagtttttagtgttgttttaatattttttaaaatataataagtttataatatttggcggtttcgaatttgtatgttttttttttagtgaagaaaatttttgttggttgcgagtagagaagcggcggaaggattttcgatttcgggaagttaggtgtcggaaggaggaagtacgtttgaagggggttcggttggtcgattttgtattcgttcgttcgtggtttatcgtggtggttattaaattgagggttttttggaaggatttttttacggtgtttatttattgggttatgtgggtttgggttattgtgagtttattttttaggtaatttatggggttagttaggaggagagggaagaaggaagttagggagggagagagtaattaaaacgttagtgtttttttgtttttttggatttttttgtttatggaagttttgggtttgtttggaggaaaaaaaattaaaaatagtagttttttttaggtaaattaagggtaagtaaatatttttgagttaggagtcggttgtatttacgggtgtcgtttagaattaagaggtagttaagtgttaggttgggagtttattttagcggagttataaagttaatatattgggtagtttaggttttagttttagggtttatttagttgatcggtcgagataaggagttttgaggaataagtcggttgtatttattttagggcgtgacggtttcgaaaggcgggggatggggatgggggtgggggtggagggggcggtttttgggtattttcgtttttatttttttttaggtaggtagtttttttgaggtgtattttgggaggtttcggtgggtaagttgtcgtattttgttgttttttgttcggttgttttcggttagatttcgtttatttgatttatgtaggttttttgttttttggttggagattttaaatttgtcggtcggtaggcggttagtttattttcggaggtagttattagggttttcgggttttttggttgagtagttcgggatgatattagttttcgttttagcgaggggtttcgttgtttaggaatgtaggaggggtttcggggaggcggaggcggtggcggcggtcgtttagggagttgacgttcgtttttattttttttttttttaagttttaattcgtttacggtttttcggggttgatggtaattttacgtgtttgttagtttatttatttttgtgtttttatagtaagcgtattaggaaatgcggttgtacgtgtgtgtatgtgtgtgtattttgtgtgtgtgtgcgtgtatgtcggcgatttggtagtttcgggaaggtta

SEQ ID NO: 2293 - DNA, 2397 bp, Artificial Sequence
  chemically treated genomic DNA (Homo sapiens)
aatattttgaggataattgattagagggaggaggggttgtatcgttttttagtaggttgagttaattattagtttgtattagtatttgatttgtggtatgtgttaatttattattgttaattgtagggatttagtgattttttcgaatttttgttatttttgttacggtttttgttttgtggaggtttgtggaatgggaagtggggaggggaaggagaagggggcggagttagtcggagttttttggttaggtttggagttattttgttttgttatagtttttatgggtttagagtgggttttggggtagagggtttgtaaggataggggtgggtggttttgtcgagggcggtgttttgagtaggttttattttttagtttgtttagtttggttttattttagttttgttgttttgttattttgtttttttgtgtttattttttattttttgtcggggatattttaaggtttgttaaggttggagtaggggtgggatttagttatttaataaacgtttttttggttatgtagggttgggtattggggtggggggttgatttggattttttaagatattagattgtttaattgtttagtttttattggggtaagtgtttcgttgagggtgaagggggttgtgagtgtttattagggagtttggataggtttcgttttttatagttgttttattttttggagttgttttggtggtagatggtattgttttagaaaggtgaggttggagttgttttttttattaggggtggttaaggacgtttttagggttttttatgtaggtttttagggttattttgggcgtggttgagggtatgtagattacgttgtgtttttttttattttttatgttcgtcgtttgtttgatatgttttttagttgttttgtttcgtagaagttgtgtggttttttttgtgagtagagtcgggttttatgatttttcggagtagcgttagggattttttttaggtataattttaaagggggttttaggatttgttaggtttacggaagtggtttttgtaattttttttttggtggtagtttttggtgtatttcggtaggggtagtttttttttattatagggattttgtgtgttaggttttagttgcgttgtcgttgaattatggatttaatagtagagaagttttgtaggtcgtttgtgttggttcgggaaatcggggtttagtcggggtttgttacggttttggtgtcgttttgttttttgtcggcgttacggagtaagcggagagatttattttttcggttttaagaggtattaacggaggaggttgagaggtaggagttgaataattgatggttttttttggtttaggatttgttgaaaatgatacggtgtaaggtagaggggttgagagtgttgattataaaatgttgagaagttattttagggcggttacggttagaaggaggatttttatttaggacggggttataggtatttggggcgggtgttagaggtttttgttttgggttattttagggggttaggatatttagaagttgggtttagaggtttatagggttggtttatttttattttttttttatacgtttgttattatcggtgttttagtttagtaattttatggttcgttggtttcgtttatagtttttattgttttttgtgtgttgggcgtgggtttttgagttttatttttagtttttttagttttaggagaggagtggaggataggggtttaacgtggggtgtggtgcggagcggggagggttgtggcgtttttttagtttttttttttttaatagttttagttttttttttggagaattttttatttgttgggtatatttggtttttttttattattttgtttttagtcgggagatttttatttagtgaaatagtgaaataggaagggttttttggttatttcgcgtagggcgtagggtatgtagcgggggagtggttcgtttttttagtgttttatcgtttatatttttaggggagtatatagacgggtaggttgtggggttttgattttatggtagtgtttgggggtgaatgtttatagtttttgaaattttagtgggagtgcgttatcgggtggttttttagtttagcggtttgtaggtggttggtgagagtgagtttaattagatttttgttttataataaggatagaggaatttttgtattttagggttttttgttttggtgtattaaaaaattggattatacgtgggtttggagaatgagtgtaaggttttattgagtggaagtagtttttagtagatgggggagttagaggggagatggtttttttttggagttaggtaatattttcgggatgtttagtagtttgtttttttttattagtgtgtttttttttttatatag

SEQ ID NO: 2294 - DNA, 2397 bp, Artificial Sequence
  chemically treated genomic DNA (Homo sapiens)
ttgtgtggggagaggaatatattggtggaagaagataagttgttggatatttcgagaatgttgtttgattttaggggaaaattattttttttttggtttttttatttgttgagagttatttttatttaataaaattttgtatttattttttaagtttacgtgtgatttaattttttggtatattaaggtaagaaattttgggatatagaaatttttttgtttttgttataaggtaggggtttaattgagtttatttttattagttatttatagatcgttagattaaaagattattcggtaacgtatttttattggggttttaagagttgtaaatatttatttttagatattgttatggggttagagttttatagtttgttcgtttgtatgtttttttagaggtgtgagcggtggggtattgaagaagcgagttattttttcgttgtatgttttgcgttttgcgcggggtaattagggaattttttttgttttattgttttattgggtagagatttttcggttggagatagaatggtggggagaggttagatgtgtttagtaggtaggggattttttaggggggaggttgaggttgttaggaaaggaggggttgagggggcgttatagtttttttcgtttcgtattatattttacgttaaatttttgttttttattttttttttggggttaaggaggttgagagtagagtttagaggtttacgtttagtatataggaggtagtgggggttgtggacggggttaacgagttatggggttgttgggttgaagtatcggtgatggtaggcgtgtgagagggaagtgggggtgagttagttttgtgggtttttaggtttagtttttgggtattttggttttttggaatgatttagggtaggagtttttgatattcgttttaaatgtttgtgatttcgttttgagtgggggttttttttttggtcgtgatcgttttggagtggttttttagtattttgtggttagtatttttagtttttttgttttgtatcgtgttatttttagtagattttgagttagagaaggttattaattatttagtttttgttttttagtttttttcgttagtattttttaaagtcgggaagataaattttttcgtttgtttcgtggcgtcgataggaagtagggcggtattaggatcgtgataggtttcggttgggtttcggtttttcgagttagtataggcggtttgtaaggtttttttgttattaaatttataatttagcggtaacgtagttggggtttggtatatagggtttttgtgatgaggaggggttgtttttgtcggaatgtattagaggttgttattagggagagagttataaggattattttcgtggatttggtaggttttagggttttttttaaaattgtgtttggggagagtttttggcgttgtttcggaggattatggagttcgattttatttataggggagattatatagtttttgcggggtaagatagttgaggagtatgttaggtaagcgacgggtatggggggtgggggggagtatagcgtggtttgtatgtttttagttacgtttagggtgattttggaggtttgtatggaagattttggaagcgtttttggttatttttggtggaagagatagttttagttttatttttttaggatagtgttatttgttattaaggtagttttagagagtgggatagttgtgagaggcgggatttgtttaggttttttgatgggtatttatagttttttttatttttagcgaggtatttgttttaatgaaaattgagtagttggataatttgatgttttggagggtttaggttagttttttattttaatgtttagttttgtataattaaggaagcgtttgttgaatggttgagttttatttttgttttaattttggtaggttttggagtgttttcggtaggaagtggagggtgaatatagggggataaagtaatagggtagtagagttggggtggggttaggttgggtagattggggaatgagatttatttagaatatcgttttcggtagagttatttatttttatttttgtaaattttttgttttagggtttattttaaatttatgagagttgtggtaggatagggtgattttaggtttggttaggaggtttcggttgatttcgttttttttttttttttttttttattttttattttataggtttttatagggtaggggtcgtgataggggtgatagaagttcggagaggttattgagtttttgtaattagtagtaatgagttgatatatgttataggttaagtgttaatgtaggttgataattaatttaatttgttaggaagcggtgtagttttttttttttttgattaattatttttaggatgtt

SEQ ID NO: 2295 - DNA, 2354 bp, Artificial Sequence
  chemically treated genomic DNA (Homo sapiens)
agatattttgtataggtgtgcgtttttattttggttgttgtgtgagttgaggataaaattttggttgttgtgggagttgagtttgtgggtaggttgagttaggggtgggagtgagagggaggggtgagaggggtttgagtatttatttagcgtatgttttatagaattagtttgttttaggaagtttcggtgtttagtgttataatgtatattttagttttgtgtttgtatattagatttcgggttcgttttatatgggtgttttgagttgattttttttgttggagttgttgaagggttttgtaggttttaatttatagttagtttttaattttgttattagtaggggttttagtttatagtaacgtagttgtttttattgtaggttaattttgttatagcgttgttaatttgaaatatttagtttagagtgagtttttggggaggcgggaggttgtttaagtattttatttgttgtgtgggtaagaagcggtttgtattttattagagtttggggatttaggatttagatttgttgtttcgtagttgtgtgattttgggaaggttaggttttattttgggtgtgttttttttttttgaagatttaattcggtttgtgtgttaggagtggagggtttgttggagtttgaggaagatggtagttgggtcggtagtagggtgagtagggtttgagtggggttaggttttttatattggataatgatgtttattgtaaagtttatgttttggatttttgataaatattttagtaatcgatttgatattttattatgtttaagttgatttgtttttatgttggatatgtgtttattaggacgtgtttttggttgttattggtagggtttggaatgaggatatttgttgtgtattttgttttggagttttagataggtaaaaaaatatttatgtggttttatttaggttatttttttgtttgtatgaattttaggttatttttagaaagggttttatagtttcggtgttttattttttgatttttgttaagtcgtttttagtagtagttggaattttttgaagtggttgttatagatgttggtaaagttcggtttgggatgtttttattttgtattaggtacggggttgtttttgttgtatatttatttggaaattatttatatgttaagtatcgtagaggtaaggggagtttgttattggattgcgtttaatacggttgtagggatatagataagtatattttttggtagaggtacgggttcggttggttggagttgtagtagttgtgtgtggttatagagtttttaaatgagggagatggatggtttcgttttatagtgtgtttagagtatgtttacggtgtttgggaagattagggatttattatgttcggttttggttttttttatagtgaagtttttttgttggtaggatttatggttaagtatgggggtaggggttgggggagttttgttagtgatttttcgtaggtagtaaggtttttgggagttggttaggaaaatagaaattttattttggagtaggtgcgtaaattaatagtttagaaattaataaggtttttattaaggattatgagttatttgtgttgttttgtttgttttggtatttgcgtaggatacggggtggggggcgggggaagtatatgttaatagggagttggtggtcgttttgagagttagttttttttttataatttgtttgaaatttttttttttgtagaagatggaatttagtatatttcgagagtttattgtataggttaggtgtatttatgtttattgtttttattagtaaaagagtaaaattaaaattaaataaacgaagattttggtaagattgtttgattttgttttgaggtgagtatatagtagtatcgggaaagtgcgtaatttataaagatggtgtagtttgtaggttaggaggggttggggtttgtcgagggtagttggggttttgtagtttgatttataatattgtatttagagcggggaggtgttgtttttaggtttatttgtgatttttgaggtataggtagagggtcgggcgtgtatgatattgtataggagtttttttcgtagtgtggaatttatttacgtcgtttgtttttttagtttttaaatgtatttggggtttgagattagaaatagtagaagttttggtggttagtggaatagttatttaagtggatttttattttttgggtattttttgagtatttttttgttaggtattgttttaggggttggtgacgggaagtttattttgtttatgaggttttttcggtatagaggtggatattgagggatcgttggtttatacgtatgttgaaatatgtg

SEQ ID NO: 2296 - DNA, 2354 bp, Artificial Sequence
  chemically treated genomic DNA (Homo sapiens)
tatatattttaatatgcgtgtgagttagcggttttttagtgtttatttttgtgtcgaaagagttttatgggtaaggtgggtttttcgttattagtttttgaaatagtgtttagtagggaggtgtttaaagaatgtttaggagatgagggtttatttaggtaattattttattaattattagagtttttgttgtttttgattttagattttagatgtatttggggattgagggagtaggcgacgtgggtgggttttatattgcggagaggatttttatgtagtgttatatacgttcgattttttgtttgtattttaggagttataggtgggtttggagatagtattttttcgttttgagtgtagtgttgtggattaggttgtaaagttttagttgttttcgatagattttagttttttttgatttgtaggttgtattatttttatgagttacgtattttttcgatgttgttgtgtgtttattttaaggtaggattaagtaattttgttagagttttcgtttgtttgattttggttttgtttttttgttgatagaaatagtaaatataaatgtatttgatttgtgtagtgggttttcgagatgtgttgggttttattttttgtaaagagaaggattttaagtaagttatgagaaaggagttggtttttagagcggttattagttttttgttgatatgtgtttttttcgttttttatttcgtgttttgcgtaagtattagaataaataggatagtataggtggtttatggtttttggtgggaattttgttaatttttgagttgttggtttgcgtatttgttttaggatggagtttttgtttttttggttagtttttagaggttttgttgtttgcgagaagttattgatagagtttttttagtttttgtttttatgtttggttatggattttattagtaaggaggttttattgtgagggaaattagagtcgggtatggtgagtttttggtttttttaggtatcgtggatatgttttgggtatattgtgaagcgaggttatttattttttttatttggaagttttgtgattatatatagttgttgtagttttagttagtcgggttcgtgtttttgttagggaatgtgtttgtttgtatttttgtagtcgtgttgaacgtagtttaatggtagattttttttgtttttgcggtgtttggtatgtggatgatttttaggtgaatatgtagtagaggtagtttcgtgtttggtgtagggtggaggtattttaggtcgggttttgttaatatttgtggtagttattttaaagagttttagttgttgttgaagacgatttggtaaaggttagagagtgagatatcggggttatgagattttttttaagggtggtttgaggtttatataagtaaagagatgatttgggtgaagttatatggatatttttttgtttgtttggggttttaaagtaaggtgtataataagtgtttttattttaggttttgttagtggtagttaagagtacgttttggtagatatatgtttagtatggaaataaattaatttggatatagtggagtgttaggtcgattgttaagatgtttgttaaaaatttaggatatgggttttatagtggatattattgtttagtgtgggaagtttggttttatttagattttgtttattttgttatcgatttagttgttattttttttagattttagtaggttttttatttttagtatataggtcggattgaatttttaggaaagaagagtatatttagggtgggatttgatttttttaaggttatataattgcggagtagtagatttgggttttggatttttaaattttgatgagatgtaggtcgttttttgtttatatagtaggtaagatgtttggatagtttttcgtttttttaaaaatttattttgggttggatgttttaggttggtaacgttgtggtagagttagtttgtagtgaaaatagttgcgttgttgtaagttggggtttttgttgatgatagggttgggggttgattgtagattgaggtttgtagaattttttagtaattttagtagagggaattagtttaaggtatttatgtggagcgggttcggggtttggtgtgtaggtatagggttggagtgtgtattgtggtattgggtatcggaattttttggagtaggttagttttgtgaagtatgcgttgagtaggtgtttaggttttttttattttttttttttatttttatttttggtttagtttgtttataggtttagtttttatagtagttaggattttgtttttagtttatatagtagttaggatagagacgtatatttgtgtaaagtgttt

SEQ ID NO: 2297 - DNA, 2382 bp, Artificial Sequence
  chemically treated genomic DNA (Homo sapiens)
ttttagttttataattaattaaaataaagaataagtaaatataggttttttttaaaaaaggtttaaatgtaaatatattatatgatattaagtttaaattttgatataaaatatttggaataattatttagaaaattataaattttaaaaaataaattttattttataaaataaaaagtgtgtatatattattaattagtgtattaggtttattaagattatgattattagtaaattatatttaagttttattaaaattttaagagtattgtgtgttgttagaggtaaagtattgtgtgaaatgtttgttgagaattgttattttttaagaaggttattaattttattttttgggaattttttatttaatgttattttttgaatagtttttatatatgtttgaaattattaattgtaatagtgtttgtgatgttgattagatggtatacgtgggttatttaattttttttagaatatattttgggggtataaatattttaaaaagttatatttatagtagtttgtattatatagaaattaagattttttttgggagtgagaaattataataataaagtataatatattaggattatagaaggtaggattcggatgatggatgtgtgaatagagatgatggatggtgaattatagagataggttgggtttttaggtttttgggttacggaaggagtgtgttttgtaattagtataggatatagtttagtaagaattatatattttaaggagttcggggtttggagttgggttttgtgtttattgatggggatttagtagttgtgttttttttggtttggtagagttttttgagtagggatttgtgtatggttttagtaggtgtttttttttagggtttttttaaggcgggaagtaaattttttttttttttaggttgtagtgtgagttgagttttagttttagggtttagggaggggttgggtagttttttgatggaaatatatttgtatgagtagttttttttttgtagagggtggggaagaaaaggatgtttggggtagtttagttttacggtgtggtggggttaggggttgtgtttattatggatttgattttttttttttttgtgattttgttttattgtacgtgtcgggacgggttttaaagattagtttatattagaaattttgattgaggtttttgagaaatgttattttgaattttgttttagtatttggatgtgtttttttatttgatagagttataaagatttttttagttaaaaataaaagtaaagttttgttagattcgtgttcgtggttttaaatttgttttagttattgagtaggagttgagagggaagagagagagaagaatataagatttatatggggaaggatttttatgagggtgtggtagtgagagcgggtggtaagttgttaaagaggtttaagttatagaagtgggttttatgtgggattttcggaatgagtaggagggcgatgggtggagggtgagggttagaagattttaattagaggtgagaatttaaagatgagttattggttatttaagttaaatagtgaaattattttggtttgtgtttttagttagtggagtagggaaggggttaggatgtgttttttgtaggtgttattggaaaggggttttgatttagattttaagagagggtttttggattttatgtaagaaataatttgggaggagtttataaagtggaaataagtttattaagatagtaaatgaataaaggaatggttattttatagatagggtagtattaaatattgttggtcggttatttgtatagatagtttttgattatatgttaaataaggagtggattatttattagttttttaggaattttttttaaaaatatagattatataaggtaatttgtggatgttgttatagtatttttaattgtgaggataattagaggttattttttttatcgttttggttttagtaggttttggtcggtttttttagcgtattttgttttattagtagggtttttatgatttgtattttgtgattttagtttggttgattttttagtttattttgtgattaagaatgtttaattttttggaaatgtaggttagtatgtttaagttttatttaattaagtttttatttaatatggagttattttggttttaatatttttgatttagggtggttgtagagttggaggtgtagattggggtagattagttttttgagaaaagtatatagagttattgcggggttgtgaggtgggagagatgaatttatattggtatttgattagtgattttttagttgtaatgagaatagaatggagaggtttgggataggaagataggatgtggttgtttatgttattttggtggg

SEQ ID NO: 2298 - DNA, 2382 bp, Artificial Sequence
  chemically treated genomic DNA (Homo sapiens)
tttattaggatggtatgagtaattatattttgtttttttgttttaggtttttttattttatttttattatagttggagagttattgattaaatgttaatgtgagtttattttttttattttatagtttcgtagtggttttgtgtgttttttttaggaggttgatttgttttaatttgtatttttagttttgtagttattttaagttagaggtgttagaattagagtgattttatgttgaataggggtttgattaaatgaggtttaggtatgttggtttgtatttttaggaggttaggtatttttagttataggatgagttaggaagttaattagattgggattataagatataggttataaagattttgttgataagataggatacgttaaagaagtcggttaaaatttattgaaattaagacggtgaggaaagtgatttttggttgtttttatagttagaaatgttatggtaatatttataagttattttatgtggtttatatttttaaaaagaatttttgaaaagttaataaataatttattttttatttagtatatgattaaggattatttatataaatagtcgattagtagtgtttggtgttgttttgtttatggagtagttatttttttatttatttattgttttaataaatttgtttttattttatagattttttttaaattattttttgtatgagatttaagaatttttttttgggatttgaattaggatttttttttagtaatatttgtaggaagtatattttggttttttttttgttttattgattggaggtataggttaaggtaattttattgtttgatttgaatgattaataatttatttttgggtttttatttttgattagaattttttgatttttattttttatttatcgtttttttgtttatttcgaaagttttatatgaaatttatttttgtggtttaggtttttttggtaatttgttattcgtttttattgttatatttttatagaaatttttttttatatggattttgtgtttttttttttttttttttttttagtttttgtttagtggttgaagtagatttggagttacgaatacgagtttggtagagttttgtttttgtttttaattgggaaaatttttataattttattaggtgaaaagatatatttagatattaaggtagagtttagggtaatattttttaggggttttagttaaagtttttgatgtaggttggtttttgaggttcgtttcgatacgtatagtgagataggattataaggaggggaggagttaagtttatggtggatatagtttttgattttattatatcgtggggttggattgttttaggtattttttttttttttattttttgtagaggaggggttgtttatgtaagtgtgtttttattaggggattgtttagtttttttttgagttttggagttggagtttagtttatattgtagtttgaggaggaggaaggtttatttttcgttttgggagggttttgggaggaagtatttgttgagattatatataggtttttgtttaggggattttgttaggttagaaaggatatagttgttgagtttttattagtgagtatagggtttagttttaagtttcgagttttttggagtatatggtttttattgagttgtgttttgtgttggttataggatatatttttttcgtggtttagagatttgagagtttagtttgtttttgtagtttattatttattatttttgtttatatatttattattcgaattttattttttgtgattttgatatgttgtattttattattgtagttttttatttttaaaaggagttttggtttttatgtggtataaattgttgtgaatgtaattttttaaggtgtttgtatttttagagtatattttggaaaaagttgaatgatttacgtgtgttatttggttagtattatagatattgttatagttgatggttttaaatatgtgtaggggttgtttagggaatggtattgaatggaaaatttttaggagataaggttggtggtttttttaaaagatggtaatttttagtaaatattttatataatgttttatttttaatagtatataatgtttttagagttttgatagggtttagatgtgatttattaatagttatggttttggtaggtttaatatattagttaatagtgtatatatattttttattttatgaagtgaggtttattttttaaagtttgtagttttttaaatagttgttttagatattttatattagaatttggatttagtgttatataatgtgtttatatttaaattttttttaaaaaaaatttgtatttgtttattttttgttttggttaattatgaagttaaga

SEQ ID NO: 2299 - DNA, 2369 bp, Artificial Sequence
  chemically treated genomic DNA (Homo sapiens)
gtttggggttgaggttggtttttatttatcggttaggttttgagtaaacgaattggtttttttgggtttttttttttttgtttttaaaatggtgtaggtgaggataataggagttttaaggggtgttgtgagggtggttagtacgtgttttgttaagggttttataaagtttaatttgtggttatgagagggggtgtagtaggatagggtgggggtagtttttgaaagttttataaattaagagaatagaaaggaaggtattttgtttttatagtggaggttatttttttggttagagggagggttggttgttgttcggttaaggaggggtagagagaatttggtagaatttattgagttttcgtgttggtagttttggaatgggatttttttgggtcgtttttggtttgatgaattggttttgaggttatttattttatagtttggttcggatttcggttatttagtttttaagaaagtttggaattaggaaaggagcgtcgttggcgtggaaagatatatttgtattttaaaatatttggtttttggttgtgttttaggaattgggaggtgagattttttttggtgattgatagttttgtgtttttgggcgtagagttttgtggttggttttggtatttttttttttttttttttttcgttttttttggttaatgttagtaataatttagagggtagttttattatttgttaggtttaacgtagtgtttttcgtagtagttacgtgaggtttttcggatggggagttgttttttttttttgtttcgtttttggttttagttatatagcgtttattttttttgtttaagggttaggaggttagattgttggggtaaagttgttatagtagcgagggagagagcgttgttttttttttttttaaaagttattttggtaaggtattagttaaatattttttcggttttagaaggttttttttgtgaagtttgtagcgtttaaacgataattagtaaatttttagagataggtttttgggaattagttgcgtcgggcgggatgaaagtcgttttgatgttttggagcgagagagtagagagaaggaggaagatagatattatttgttagtcgtagggtttcgggtagtagtagtacgttaaggaggagttagggggttgcggggagtttaggagggcgtgggaggtttggtagggttcgttattttataggttggttttttatttgggggtttgtttgtttgcggcgattttttagtttataggaggggacggtcggcgttgatagttttttttttgttttttttacgaagtttttttttggtagtttttgatttttcgtttagaagtaaagttggaatagtttagtagggtggtcgttagatgaggaatttggtattgagattggtttaggttatataattagaagaagagttggagacgggatttaagtttttttattttaatttttggtgggttttattttgtttcggtttttttttagtaggggtttcgtttaggagatattggtaattgtgtagagggattatgggatttttatgagtgatttcgggttttggtttagttttttatttttgaaatatttttaaaacgattataagtatgtttatataaatttttttaaaatattttgagaattttttaataatgtgtttattaaaggtaggttttttggtgaggggtggtagggaggttggggtgaagggtaggagttttatgtttttagttttagagagggttaaatatttagggtaggtgaaaggtaggttgtttattatttatttagcgagaatttttgtgggttttttgtagaggtttaggagacgttttttttttggtttatttttaacgttagtttttttttgtggttgttttaaagtttagtttattcggttttttaattgtgagattttcgaattgtttttttattggttgtaggttatagtttttgtttttatttttagtagtattagtcggggataggaattgtttgttgtcgggatttttttttttagtagattgggagttttttatttttggtatttatatatttgtttgcgtgtttggagtggtagaggaaaggggttggggtgtggtgatggttggtggagttggaggtatttggtatatggaagacgtaggcgggaaggtggttgagttttagcgtatgttgagcgtttattttttttttttgtaggtgtttttttatttattagataaatgtgatgattttagttgtataaaagagaagatttcggttttaggaggtaaaataatatgtttaggattagggtaggtttgtggggcgggtatttgaattgttagtggtatgatgttcgagtttttttttat

SEQ ID NO: 2300 - DNA, 2369 bp, Artificial Sequence
  chemically treated genomic DNA (Homo sapiens)
gtgggagaaggttcggatattatattattggtagtttaaatgttcgttttatagatttgttttgattttaggtatgttgttttgttttttggggtcgaggtttttttttttgtataattgggattattatatttatttggtgagtgaagggatatttgtagagaagggaggtaagcgtttagtatgcgttgaaatttagttattttttcgtttgcgttttttatgtattaggtgtttttagttttattagttattattatattttagttttttttttttgttattttagatacgtaggtagatgtgtgggtgttaagggtgaggggtttttagtttgttggggaagggggtttcggtagtaaataatttttgttttcggttgatgttgttagaagtgagagtaggggttgtgatttgtagttaatggggaagtagttcgagggttttatagttgggaggtcgagtgagttaagttttagggtagttatagggaggagttgacgttagagatggattagagaggaggcgttttttgggtttttgtaggggatttatagaggttttcgttgggtgaatgatgggtagtttgttttttatttgttttgggtgtttggttttttttagggttgggaatatgaggtttttgttttttattttagtttttttattattttttattaaaaaatttatttttggtaaatatattattaagggatttttagaatattttagagaagtttgtgtgaatatgtttgtggtcgttttaaaagtgttttagaagtgagaggttaaattaaggttcgaagttatttatggaaattttatgatttttttgtatagttattagtgttttttggacggggtttttgttggaaaggggtcgagatagggtgaagtttattaggggttggagtggggaggtttgggtttcgtttttagttttttttttggttgtgtggtttggattagttttagtgttaggttttttatttggcggttattttgttgggttgttttagttttgtttttgagcggaaggttaggggttgttagggaggagtttcgtggggaaagtaaaggggaagttgttagcgtcggtcgtttttttttgtgaattaaagagtcgtcgtagataagtaggtttttagatggagaattagtttgtgaggtggcgggttttgttaggttttttacgtttttttgggtttttcgtagttttttggtttttttttggcgtgttgttgttgttcgggattttgcgattggtaggtagtgtttgtttttttttttttttttattttttcgttttagaatattagagcggtttttatttcgttcggcgtagttaatttttagggatttgtttttggggatttgttggttgtcgtttgaacgttgtagattttataggggaagttttttgggatcgagaagatgtttagttaatgttttgttaaggtggtttttgaaggggagggggatagcgttttttttttcgttgttgtgatagttttgttttagtagtttggttttttggtttttaaataaggagggtgggcgttgtgtggttggggttaggggcggggtaggggggagggatagttttttattcgaggaattttacgtggttgttgcgggggatattgcgttgaatttggtaagtggtggggttattttttgggttgttgttggtattggttagggagagcggggagaggggggagggggggatattagggttagttatagggttttgcgtttagaggtataaaattgttagttattagaaagggttttattttttagtttttgaaatataattagaggttaagtgttttaggatgtaagtgtgtttttttacgttagcggcgttttttttttggttttaggtttttttggaagttgggtggtcgggattcgagttaagttgtggggtaggtagttttagggttagtttattaggttagggacggtttaggagggttttattttagggttgttagtacgagggtttagtgaattttgttagattttttttgtttttttttggtcgggtagtagttaattttttttttggttaaaggggtggtttttattgtggagatagggtgtttttttttttatttttttagtttatggggtttttaagagttgtttttattttgttttgttgtatttttttttatgattataaattaggttttatggagtttttagtagggtacgtattggttatttttatagtattttttggggtttttattgtttttatttgtattattttaaggatagggaaaaggaggtttagggaagttagttcgtttgtttaagatttagtcggtaagtagaggttagttttagttttaggt

SEQ ID NO: 2301 - DNA, 2425 bp, Artificial Sequence
  chemically treated genomic DNA (Homo sapiens)
tgtattttagggtaattagtttttgtatgggaggagaggggtattttttgtattattttatggtgttattaaaagttgaattatgggttggtttaattttgtagagaagagattatttaatttatttgtggaaatttattttttagcgatattgatgttttttaagaaatttaattttgggtttgagtgatggttggtgtaaaaaataaatttaagattttagtgttttttagaagtttggatttttagggattttgttgtgagttataggacgttatcggtttttttttttttgtgggttgagtgtgggggttatgtggatttttttatgagtagatgttattagggttattggttttagtttttttttttatagttgtagtgggggttggggttggggtattttagggagggtttttgtatgagtttgtgttatagtgtgtggtattcggcggagggattaagttgatcgttttaggtgagttttttttttttttttttttttcgtttttgggataatttttgttgtttttgtttgtttttgtattttgttttaatttgtggttagtttttttttttgtattttaggtttgagtaaggatttttgttttttttgtttagatttttgtttgttttagtaggttattataattattttatttttgattataggggtaggggattagatagaatgatttattgagtttcgtttgtttgtttgtttgtttgtttttttgtttgtttttttgtttttttgtttgtttttttgattgtttgataggcgtaggttgggtttttaagttttgttttgttttggtttttttagtttgggtttttgtcggaatagttttgtttttgggttatttgggttttattttttggggaattgggaataaggggtttgagggaggtattttttgggagattttagaaggatttagtgttttcggggttgatgttcgggaattatagagttgggatttagagttaggatttagatttagaatgaggtaggaggtggaggggttgttttgggcgtttgggggttgttagggattgagttttgagttagtttgagatttaggaaatttcgttaggagggagaagggagaagtagattttggatattagaaagttaggggaagggttataaaaggagtggatgtgacggaagggcgggtttttgggtttttttagaatatattttttgtgtttagggggattagaggggtagagtttattgcgtgaaagttttattgttatgattaggtagtcgggacgtggggtggatgttagaaaagattttacggaataagagagagtttaggatagtaggtaggtttttcgatttttttaggtttttgttttatatacgggttttagaatatatatttggttggaatagtttgagggattaaaaggttttagtattttatagagttgaggagttaggttagaaaagtaattttagagttcgttgtgtaggggagatatagagttttttttatttgttaggatggtaggaggggatagggttagggcgttgagggttagatgtcggtgttgggggttaaggtttcgagagattttaggataggtggttaggtgtttaaggtaaaatagtttttcgtgtagattagggtatagtggaaaatattttgatttttttgtttggtatagatttttagatatagagtttttgaataagggtattttaatattttattatatattgaggttaggggttttttaggtggatattaggattttgattttttgttttttatttatttcgtaggttagtttaaggttgttttttcggttattttgttttcgtttttttttgaggagttttaagttaataaggttatattggtgtgttttataagtgatttttattcgggagtcgtgatagtggtttggaaggtagatagtagtttcgttaaggcgggagtggagattattatattttttaaataaagtaataataagtacgcggttagtagttatttgagtttgacgtttgagtagtggaagttttatagaagttatagttgttaggttacgtatgaagggagtatcgtggagaagatagtggtttttatagaatgtttataggtttttaatttttattttttattacgggagattagagttgtaggattttaggggaggggtttttttttttattttaaggtattaagtttttttttttgtatttaataaatttttaataaatatttttattgttaattagaaattttgttttattttattttttttttttttatatataatttttagttttttttgggtttttaatttgtggtggaaagaattttgaatttagtgggaaagttgtttatgtgaaggggtttttagttttttgggtatttttgtaggtaaggttttttttatttagata

SEQ ID NO: 2302 - DNA, 2425 bp, Artificial Sequence
  chemically treated genomic DNA (Homo sapiens)
tgtttgggtgaggaaggttttatttgtagagatgtttagggaattgagaatttttttatataggtaatttttttattgggtttagggttttttttattataaattgagaatttaggaaaggttaggaattatatgtgagaaaagaaaaaatgagataaaataagatttttgattgataatgagaatatttattgagggtttattgagtgtagggagaagggtttgatgttttggggtgggaggagagattttttttttgggattttgtagttttagtttttcgtggtggggggtgagggttgagaatttatgaatattttgtaggggttattgttttttttacggtgttttttttatgcgtgatttggtagttgtagtttttgtgggatttttattgtttaggcgttaggtttagatagttgttggtcgcgtatttgttgttgttttgtttggagggtgtggtggtttttattttcgttttgacggggttgttatttgttttttaggttattgttacggttttcgggtagaagttatttatgagatatattagtgtggttttgttggtttgaagttttttagaggagggcgggaatagagtgatcgagggggtagttttgggttgatttgcggggtggatgaggggtagggggttagagttttggtgtttatttggggagtttttgattttagtatatgatgaggtgttggggtgtttttgtttaggggttttgtgtttgaaggtttatgttaggtagaggggttagggtgttttttattatgttttgatttgtacggggagttgttttattttagatatttgattatttgttttgagatttttcggggttttggtttttaatatcgatatttgatttttagcgttttgattttgtttttttttgttattttgatagataaagagagttttgtgttttttttgtatagcgaattttggggttatttttttggtttggttttttagttttgtgggatattggggttttttggttttttaggttgttttagttaaatgtgtgttttggagttcgtgtatggggtaagggtttggggggatcggagagtttgtttgttgttttgggtttttttttatttcgtggagttttttttggtatttattttacgtttcggttatttggttatagtagtggggtttttacgtagtggattttgtttttttgatttttttgggtataggggatatgttttgaagagatttaggagttcgttttttcgttatatttattttttttgtgattttttttttggttttttggtgtttagagtttgtttttttttttttttttttgacggggttttttgagttttaggttggtttagggtttagtttttggtagtttttagacgtttagggtagtttttttattttttattttattttgggtttggattttggttttgggttttagttttgtgattttcgagtattagtttcgagggtattgggtttttttaaagttttttaggaggtgttttttttagattttttgtttttaattttttaggagatggaatttaggtaatttaaggataaagttgtttcgataagaatttagattgaggaggttagaatagaataaggtttagagatttagtttgcgtttgttagatagttagagagataaatagagagatagagagataaatagagagatagatagatagatagatagacgaggtttagtaggttattttatttagttttttgtttttgtggttagaggtgaagtggttgtagtgatttgttgaggtaagtaagggtttgaatagggagggtagaggtttttgtttaggtttgggatgtagggagaaaggttgattataagttgagataagatatagaaataaataaaaatagtagaaattgttttaagagcggggaaggagaggggagaagagatttatttaggacggttagtttggttttttcgtcgaatattatatattgtgatataggtttatataaaaattttttttgggatgttttagttttagtttttattgtagttgtgaaggaggaagttggggttagtggttttggtggtatttgtttatgagggagtttatatggtttttatatttaatttataaagagaaggggatcggtgacgttttgtgatttatagtaggatttttggaaatttaggtttttggaggatattgggattttgaatttgttttttgtattaattattatttaggtttaggattgaattttttagggagtattagtatcgttaaggagtgaatttttatagatgggttaggtggttttttttttgtaaagttgaattaatttatggtttaatttttggtaatattatggggtggtgtagagggtgtttttttttttttatgtagaggttgattgttttagagtgta

SEQ ID NO: 2303 - DNA, 2425 bp, Artificial Sequence
  chemically treated genomic DNA (Homo sapiens)
ggtttttagaatattgtattttagggtaattagtttttgtatgggaggagaggagtattttttgtattattttatggtgttattaaaagttgaattatgggttggtttaattttgtagagaagagattatttattttatttgtggaaatttattttttagcgatattaatgttttttaataaatttaattttgggtttgagtgatggttggtgtaaaaaataaatttaagattttagtgttttttagaagtttggatttttagggattttgttgtgggttataggatgttatcggttttttttttttgtgggttaagtgtgggggttatgtggatttttttatgagtagatgttattaggattattggttttagtttttttttttatagttgtagtgggggttggggttaggggtattttagggagggtttttgtatgagtttgtgttatagtgttgggtgttcggcggagggattaagttgatcgttttaggtgagttttttttttttttttttttttcgtttttgggataatttttgttgtttttgtttgtttttgtattttgttttaatttgtggttagtttttttttttgtattttaggtttgagtaaggatttttgttttttttgtttagatttttgtttgttttagtaggttattataattattttatttttgatcgtaggggtaggggattagatagaatgatttattgagtttcgtttgtttgtttgtttgtttgtttttttttttttgtttgtttttttgtttgtttgataggcgtaggttgggtttttaagttttgttttgttttggtttttttagtttgggtttttgtcggaatagttttgtttttgggttatttgggttttattttttggggaattgggaataaggggtttgagggaggtattttttgggagattttagaaggatttagtgttttcggggttgatgttcgggaattatagagttgggatttagagttaggatttagatttagaatgaggtaggaggtggaggggttgttttgggcgtttgggggttgttagggattgagttttgagttagtttgagatttaggaaatttcgttaggagggagaagggagaagtagattttggatattagaaagttaggggaagggttataaaaggagtggatgtgacggaagggcgggtttttgggtttttttagaatatattttttgtgtttagggggattagaggggtagagtttattgcgtgaaagttttattgttatgattaggtagtcgggacgtggggtggatgttagaaaagattttacggaataagagagagtttaggatagtaggtaggtttttcgatttttttaggtttttgttttatatacgggttttagaatatatatttggttggaatagtttgagggattaaaaggttttagtattttatagagttgaggagttaggttagaaaagtaattttagagttcgttgtgtaggggagatatagagttttttttatttgttaggatggtaggaggggatagggttagggcgttgagggttagatgtcggtgttgggggttaaggtttcgagagattttaggataggtggttaggtgtttaaggtaaaatagtttttcgtgtagattaggatatagtggaaaatattttgatttttttgtttggtatagatttttagatatagagtttttgaataagggtattttaatattttattatatattgaggttaggggttttttaggtggatattaggattttgattttttgttttttatttatttcgtaggttagtttaaggttgttttttcggttattttgttttcgtttttttttgaggagttttaagttaataaggttatattggtgtgttttataagtgatttttattcgggagtcgtgatagtggtttggaaggtagatagtagtttcgttaaggcgggagtggagattattatattttttaaataaagtaataataagtacgcggttagtagttatttgagtttgacgtttgagtagtggaagttttatagaagttatagttgttaggttacgtatgaagggagtatcgtggagaagatagtggtttttatagaatgtttataggtttttaatttttattttttattacgggagattagagttgtaggattttaggggaggggtttttttttttattttaaggtattaagtttttttttttgtatttaataaatttttaataaatatttttattgttaattagaaattttgttttattttattttttttttttttatatataatttttagttttttttgggtttttaatttatggtggagggaattttgtatttagtgggaaagttatttaagggaggaggtttatagttttttcgagttatttttttggaaggtttttttttttttagtt

SEQ ID NO: 2304 - DNA, 2425 bp, Artificial Sequence
  chemically treated genomic DNA (Homo sapiens)
gattggaagaggaaggattttttagagagatgattcggggaggttgtaagtttttttttttgggtgatttttttattgggtgtagaattttttttattataaattgagaatttagggaaggttaggaattatatgtgagaaaagaaaaaatgagataaaataagatttttgattgataatgagaatatttattgagggtttattgagtgtagggagaagggtttgatgttttggggtgggaggagagattttttttttgggattttgtagttttagtttttcgtggtggggggtgagggttgagaatttatgaatattttgtaggggttattgttttttttacggtgttttttttatgcgtgatttggtagttgtagtttttgtgggatttttattgtttaggcgttaggtttaggtagttgttggtcgcgtatttgttgttgttttgtttggagggtgtggtggtttttattttcgttttgacggggttgttatttgttttttaggttattgttacggttttcgggtagaagttatttatgagatatattagtgtggttttgttggtttgaagttttttagaggagggcgggaatagagtgatcgagggggtagttttgggttgatttgcggggtggatgaggggtagggggttagagttttggtgtttatttggggagtttttgattttagtatatgatgaggtgttggggtgtttttgtttaggggttttgtgtttgaaggtttatgttaggtagaggggttagggtgttttttattatgttttgatttgtacggggagttgttttattttagatatttgattatttgttttgagatttttcggggttttggtttttaatatcgatatttgatttttagcgttttgattttgtttttttttgttattttgatagataaagagagttttgtgttttttttgtatagcgaattttggggttatttttttggtttggttttttagttttgtgggatgttggggttttttggttttttaggttgttttagttaaatgtgtgttttggagttcgtgtatggggtaagggtttggggggatcggagagtttgtttgttgttttgggtttttttttatttcgtggagttttttttggtatttattttacgtttcggttatttggttatagtagtggggtttttacgtagtggattttgtttttttgatttttttgggtataggggatatgttttgaagagatttaggagttcgttttttcgttatatttattttttttgtgattttttttttggttttttggtgtttagagtttgtttttttttttttttttttgacggggttttttgagttttaggttggtttagggtttagtttttggtagtttttagacgtttagggtagtttttttattttttattttattttgggtttggattttggttttgggttttagttttgtgattttcgagtattagtttcgagggtattgggtttttttaaagttttttaggaggtgttttttttagattttttgtttttaattttttaggagatggaatttaggtaatttaagggtaaagttgtttcgataagaatttagattgaggaggttagaatagaataaggtttagagatttagtttgcgtttgttagatagatagagagataaatagagagagagagatagatagatagatagatagacgaggtttagtaggttattttatttagttttttgtttttgcggttagaggtgaagtggttgtagtgatttgttgaggtaagtaagggtttgaatagggagggtagaggtttttgtttaggtttgggatgtagggagaaaggttgattataagttgagataagatatagaaataaataaaaatagtagaaattgttttaagagcggggaaggagaggggagaagagatttatttaggacggttagtttggttttttcgtcgaatatttaatattgtgatataggtttatataaaaattttttttgggatgtttttagttttagtttttattgtagttgtgaaggaggaagttggggttagtggttttggtggtatttgtttatgagggagtttatatggtttttatatttaatttatagagagaggggatcggtgatattttgtgatttatagtaggatttttggaaatttaggtttttggaggatattgggattttgaatttgttttttgtattaattattatttaggtttaggattgaatttattagagggtattagtgtcgttaaggagtgaatttttatagatgggataggtggttttttttttgtaaagttgaattaatttatggtttaatttttggtaatattatggggtggtgtagagggtgtttttttttttttatgtagaggttgattgttttagagtgtagtgttttgggaatt

SEQ ID NO: 2305 - DNA, 2473 bp, Artificial Sequence
  chemically treated genomic DNA (Homo sapiens)
aaagtattaattaatgatagaataaggaaaatggtataattggtttaaaggagaatttaagtattatatatagatatgtaggtaaatataaatgttggtatttatttataagtagatacgaaatcggttaataatttgaggataataattaattgtattttattggatataatttatttgtatttttatggtattaagtatttgtattattattggttttttttttaagtttcgagagttaggaaatagtttaaagatgatgaaaggtatagatattttggagagttatgttagatagaatatttagtaatttttatagattttttggtttatattaatattttttataattttttttgatagtatagtgtagttattattattttagagaagaagtgaggggttatgttgtgttttttggatttttgttttttaatttgtaaaatgggtatgataagagtttttgataatttagagatatgaggttttgttgggataagtatcgtgggaaacgtgaagtgttaagggatagtgttttaaattttagtgtggtttttttttttgatttagtttatatttttgttttattttggaagatttatttttttttttttatattaattttgatttgataatatttttgaaattagagaatgaggtgttgattttgtatgttttttttttttaatatatatgaatatagataaaaagttattgagataagaaaggtaagtttatttttgtattaattaatttagtgttttgtgggaagtataggattaggaagaaattaaatgatagtttataaatatatatatatatatatatatatatatatatatattttattaattattattattattatcgtcgttattattaatgtattttgtaaatttatatataatttgtaaatttttttttgaaataagagagagagggtaattgaaattatttaaggtagtatttggaatacgtaggttaaagattgagttagggagggattgttattatatgggttgtggggaggtagagtttttttgtgttttcgagagtattttttttcggggttttattagtttttaattcgtttttcgaatttttatttttttttttgttttgcgtttttggaaatttagatagcggttttattttcgtgatttatttagtaggaatgtgggagttttcgaattgttttagttaaagttttttaattttttttcggtgatgaatgggtgaggtttttaaatgaaatgtggaggtttttagttttagttcgcggtttttttttttttcggcgtaattatttttgtgtagaatatgttaagtgttttgtttttcgggaatttgtttcgtatgtaaatatttggtgattaagcgaggtttatttaattaagtattttgtaatgatttttaaattaaagaatagtggattaggagtttagttcgtgttggtgatgggaaaggtagttttatattataaggaggtagatagtgatttggtgtggggaggcggtcgggttaagcggggtagagtaggcgttttgggaattttgttagaattatttatttatttatttaattaatttatttttggagtattttttggagttagagtagttggtgaataataataataataataatagggttaggtattgtgttaataagtttgttgaataataagagtgaggaggagttagagatagttattgagagttgattttattaggtatgaattgttagtagtagtgacggtaataataagtatttttattgtagtagtaaatttttgaataggattttgttgtggttttgcgtgttttgaaattgttgggtttttgttatggatttggtttttggaaatagtttttatttttgttgttgttttattgatttattggttttttatttattagtggtttattttttatatttgtgtaatgggtagttggatttagattttttttaagatgtttttgggttttaggagtttagggtgttttttttgtttttgggggttataggaatggtggcgttattttgggggttttagttgtaatattgtagaaggttttagagtttagttttatatagttttaggatagagtaagggtgatttttagtttagatttttataaattgtgggatttttattaggtagtttgttttttttgacggataagttttttattttttaattgaaataatttttttatttgtttttagggtttttgtaagggaattatatagatttatggatatagatgttttttgaaaattatttatttggtggtagaagttattatgttttaaatttggatttacgaatatattttaatgtatttatttgtttatttgttttggtttttttatttttattataattcggaaaagggttttaattgttttttaatttgggagattattttagaataaagggtttttatgtgattttagtgtttgagttgat

SEQ ID NO: 2306 - DNA, 2473 bp, Artificial Sequence
  chemically treated genomic DNA (Homo sapiens)
attaatttaggtattgaagttatatggaagttttttgttttaagatgattttttaggttagaaggtaattagaattttttttcgggttatggtagaaatgagaaaattaaagtaagtagataagtgaatatattggggtgtgttcgtgggtttaagtttgagatatgatggtttttgttattaggtagatggtttttaaagggtatttatgtttatgagtttgtgtgatttttttataggagttttggaagtagatggaagggttattttaattgagaggtgaaggatttgttcgttagagaggataagttatttggtgaaggttttataatttatgaaggtttgagttgagagttatttttgttttgttttggagttgtgtagggttgggttttgaagttttttgtaatattgtagttgaggtttttaaagtggcgttattatttttgtggtttttagaagtagaggagatattttaggtttttaagatttaaaagtattttagagaagatttagatttaattatttattatatagatgtgggaagtgagttattggtgggtgagaagttagtgagttagtaagatagtaataaagatgggggttgtttttaaaggttaagtttatggtagaaatttagtagttttagggtacgtagggttatagtaaaattttatttaaggatttgttgttgtaatgaaaatgtttattattgtcgttattattattagtagtttatgtttagtagagttagtttttaataattatttttggtttttttttatttttgttatttagtagatttattagtatagtgtttggttttattattattattattattgtttattagttattttggttttaagaagtgttttaaaaataaattgattgaatgaatgaatgagtgattttagtagagtttttagagcgtttattttgtttcgtttggttcggtcgtttttttatattagattattgtttgtttttttgtgatatgaagttgttttttttattattagtacgaattggatttttaatttattgttttttggtttaagagttattataaagtgtttaattaagtaagtttcgtttaattattaaatgtttgtatgcgaaataagttttcgggaagtagggtatttgatatgttttgtatagaaataattacgtcgaggagggggagggtcgcgggttgggattgggagtttttatattttatttgagggttttatttatttattatcgaaggggaattaaaaggttttagttggagtaattcgagaatttttatatttttgttggatgaattacgggagtggggtcgttgtttgggtttttaaaggcgtagagtaaggggagaggtgggaattcgagaggcgagttgggggttggtggggtttcggggaggggtgttttcggggatataggggagttttgtttttttatagtttatgtgataataatttttttttggtttagtttttggtttgcgtgttttaagtgttgttttagatagttttaattgtttttttttttttattttaggaggaggtttgtaaattgtatatgaatttgtagaatatattggtggtggcggcggtggtggtggtggtggttagtggagtgtgtgtgtgtgtgtgtgtgtgtgtgtgtgtgtgtttgtaggttattatttaatttttttttaattttgtattttttatagagtattggattagttggtataagaatgaatttattttttttattttaatggttttttgtttatatttatatgtattagaaaaaaaaaatatatagaattagtattttattttttgattttaagggtattattaaattaaagttggtataaaggaaaaaaaataaattttttaaggtagaataaggatgtgaattaaattaggaaggagggttatattgaggtttgggatattgttttttagtattttacgttttttacggtatttgttttagtaggattttatgtttttggattgttaaaggtttttattatgtttattttgtagattaagaaatagaggtttaggaaatataatatagttttttattttttttttgggatggtggtggttgtattgtattgttagaaaaaattataaaagatgttgatatgggttaaaaaatttataaagattgttgaatgttttgtttagtataattttttaggatatttatgttttttattatttttgagttattttttaattttcgaagtttaagaaaaaaattaatagtaatataaatgtttggtgttatagaaatgtaaatgaattgtgtttagtggaatgtaattgattattatttttaagttattgatcgatttcgtatttatttgtaaatgaatgttagtatttgtgtttgtttgtatgtttatgtgtggtgtttaaatttttttttgaattagttgtgttattttttttgttttgttattaattaatgtttt

SEQ ID NO: 2307 - DNA, 2439 bp, Artificial Sequence
  chemically treated genomic DNA (Homo sapiens)
aggaggcggaggttgtagtgcgtcgagattgtattattgtattttagtttggatattaagagtaaaatttagttttaaaaaggaaaaaaaaaaaaaaagaaaaaaggaaatagataaagatggtgatttttttggggaggtgatatatggttaagtattaaggatgagtaggttagatggaggagatagtggtggttttagatttttgtaagtattatgggaataagtatttagggtttatttgtatttttttttttcggtatttagttaggtttttagtacgtagtaggtatatgggaaaatggtttattttgatttatttatttaatagttagtaggatgttttataagtatattagttacgttatttttagtttagattttgaatgatatgaggttttgatttattgggttttatgtgtttttttgattttacgttttgttttttttttcgttatttgtgttttagttatatttggtcgtttgttttttaggttttaaacggttgttagggttttggtatttgttgtttttttgtttggagggttttttttttagatgtttatttaaaagttttttttttattaggttttttttgggttttttgaaattttaattttttttattattttagagttttttcgtttttttatttttgtatttattttaatatacggtatattttatttatttgttttggttgtttgtttagaatataattttatgaggataggtatgttttgtgttttgtttagttttgaaatggtagaacggtgtttagtttttagtatgtggttaataaataggtagtgattttatgagttaattaatgagtgaattaatgaatgattagtaaatgaatgaatgagtgaacgagtgagtgattagtaagagtgaattaatgagtgtgtagatcgttgtgtgattaagtgggttagtgcgaaaggtggggggtagaggtcgggtgagttttttgggatgcgggtagtaaggatagggttgtggtgtgaattaagatatggtgttttttgtttttgttttttttttgtagggagaggggttattttggttttgagtatttttaattttatgtgaattacgcggacgggtggatagttggagggttagtagtagtagtaggagtttttgtttatttgggggtttcgagtgttggtatgatttgattttatggtgtgggcggggttcgggtttatttggaggagtaggatatgtcgtcggattatagttgggggtgttagatttaggttacgttatatttggtgttagagtttaagatttaggaatagaaattgtgtatggggttaagttggtcgtagtttaatatttaggtgattttaggtttaaagtatgtttttggttttcgagacgggtttcgtagttgtagtttatgttttggattttgttagttgggtttggtatatttttgttgtttgtttttgtttttaggtttattatttttcgttttgttattagggagttatttttagttagtttgttattgtggttatttttttgttttaagtttttttatggtttttatcgttaggattttttatgatttattttaggtaggaagtgaggagagaggagaggtgtagggtatggtcgggcgcggtggtttacgtttgtaatttcggtattttgggaggttgaggtgggcggattatgaagttaggagattaagattattttggttaatacggtgaaattttatttttattgaaaatataaaaattagttggtatgatggtgtacgtttgtagttttagttatttaggaggttgaggtagaagaatcgtttgaattcgggaggtagaggttgtagtgagttgagatcgtgttattgtattttagtttggtaatagagcgagatttcgttttaaaaaaaaaaaaaaaaaatcgagaggtgtagggtaatggagatagaaggttaaaggttgggttagatttttattagttaggtttttggtattagttttgtagattttaattaggggtattagtattaggggttaggtttaagggtttagaaaaggttttttaagttggtgttttttatttttatataaattgtatttttatttgtttttatagtaagggcgttatttttttagttttgtgtttagtttagtttagtttagtattggttaattatgatttaataaaacggagttcgtattgagttttttatttaggttgagtgttgatagagaggtttttagagtattagggttatgtttttggagatttcgatgttttgacgggaatatagaggtttcgagaggtaaaggtgttagaggcgtgtgagttagattaatattattttaaataggagttgagtaaaatgaggttgatatttattgggttgtatttttagacgggtaaggtattttaagttatagggtgagataggagttt

SEQ ID NO: 2308 - DNA, 2439 bp, Artificial Sequence
  chemically treated genomic DNA (Homo sapiens)
gaatttttattttattttgtgatttagaatgttttattcgtttgggaatgtagtttagtaggtgttagttttattttatttagtttttatttaagatggtgttggtttggtttatacgtttttgatatttttgtttttcggggtttttgtgttttcgttaggatatcggaatttttaagggtataattttggtgttttgggagtttttttgttagtatttagtttggatggagggtttagtgcggatttcgttttgttgggttatggttggttagtgttaggttgagttgggttggatatagggttggaggggtagcgtttttattgtagggataggtgggggtgtaatttgtgtagggatgaaaagtattagtttggagggttttttttaggtttttgggtttagtttttgatgttgatgtttttagttggggtttgtagagttggtgttaagaatttggttggtaggggtttgatttagtttttggttttttgtttttattgttttgtatttttcgattttttttttttttttttgagacggagtttcgttttattgttaggttagagtgtagtggtacgattttagtttattgtaatttttgtttttcgagtttaagcgatttttttgttttagttttttgagtagttgagattataggcgtgtattattatgttagttaatttttgtatttttagtagagatggggttttatcgtgttggttaggatggttttaattttttgattttatgattcgtttattttagttttttaaagtgtcgggattataggcgtgagttatcgcgttcggttatgttttgtattttttttttttttttattttttgtttaagatgagttatggggaattttggcgatgggagttatggaagggtttagagtaggggagtggttatagtaataggttaattgggagtagttttttggtgatagggcgggaagtagtgagtttggaggtaggggtaggtagtaggggtgtgttaagtttagttgataaggtttaggatataggttgtaattgcgaggttcgtttcgggggttaggagtatgttttgggtttgaggttatttggatattgggttgcggttaatttggttttatatatagtttttatttttgggttttgggttttgatattaaatatggcgtggtttgagtttggtatttttaattgtggttcgacgatatattttgtttttttaagtgggttcggatttcgtttatattatggagttagattatgttagtattcggggtttttaagtgggtagaggtttttgttgttgttattggttttttaattgtttattcgttcgcgtggtttatatggggttaaaagtatttaggattaaaatagtttttttttttgtagaagaaagataggggtagggggtattatgttttggtttatattatagttttgtttttgttattcgtattttagggagtttattcggtttttgttttttatttttcgtattggtttatttggttatatagcgatttatatatttattggtttatttttattggttatttattcgtttatttatttatttatttattgattatttattaatttatttattggttaatttatggaattattgtttatttattgattatatattaagagttggatatcgttttattattttagagttgaataaaatataaaatatatttatttttatggggttatgttttagatagataattaaagtaaataagtaggatgtatcgtgtgttagaataaatgtaaggatgaggaaacgagggggttttgaggtgatggggggagttggaattttagggggtttagggaggatttggtgggaaggggatttttgagtgggtatttgagagaagaattttttaagtagaagaatagtaggtgttaaggttttagtagtcgtttgaggtttgaaaaataggcggttaggtgtggttggggtataggtggcggggagagaagtagaacgtgaggttagggggatatatggggtttagtggattagggttttatgttatttagggtttgagttgagaatgacgtggttgatatatttgtaaagtattttgttggttgttgagtgaatgggttagagtgagttatttttttatgtgtttgttgcgtgttgggaatttagttgggtgtcggggagagaagatgtaggtgaattttagatgtttatttttatggtgtttgtagaggtttggagttattattgttttttttatttgatttgtttatttttggtgtttaattatgtgttatttttttaagggagttattatttttgtttgttttttttttttttttttttttttttttttttttgaaattgagttttgtttttgatgtttaggttggagtgtagtggtgtaatttcggcgtattgtaattttcgtttttt

SEQ ID NO: 2309 - DNA, 2188 bp, Artificial Sequence
  chemically treated genomic DNA (Homo sapiens)
ttgtgaaaacgtttttgagagaggggaaggagttgggaggttttgacgtaaagatattgaagagtagttttggaagtttatagaaaacgcgagtttttagaaaataagaaggaaggttggtgtagagggtgggttcggggtatcgtagcgggattggtttttggtcggagggaatttgcggtagggaaggtaggggaggggaagatgtgagtgggtttgtatatgtattgttgtgagatgagagggtttgtattagttagggttttgtagagaaatagagttaataggatatacgtatataggaagagattcgtaaggagatatttcgtgtaattttggaggttgagaagttttacgatttgttgttcgtaagtcggatatttaggaatgttggtagtgtaagttttaagatttgagggtcgggatttaatggagtggacgttagttagagtttgaatttttgagaattaggagtattaacggttagagggaacggatgtttgttttgggttaggtagagagaatttaaacgttttttatttttttgttttgtttcggtttttatagattggacgaggtttatttattttggggaggggttagttgttgtgtttagttcgttattgtaaatacgaagtttttttagaaacgtttttatagatatttcggaagttacgtatttattttgtaggtgtttcggggtataggtaagcggacgagttagttattttttagagtttttgttgtttcgttcgttttttttcggaaacgtgaagtgtggttttagttgaaagtgaggtgagcgtgagtgtggatatgtgttagtgtgcgtgtgtatgggaggagtgtgtgtgcgtttgatgacgatgatggagtttagtgagttatcgttcgtggagtgttagagttttttaggatggttacgtcgaaggtgcggaaggaggcggttggtttagcgttagacgtttttagtattcgcgggagtgaaacggaggttggtgggtggttgtgatgtgtttttttaagaatggattttgtaggtttttttttttttcggttttcggtgtcggaaggaggatatcgcgagtgttgtttgtttgtttatagagagtgtgtagtagtagtagtagtagttcggggttagttttgggaggattaaggatattttagggttttaagttaggggatgatatagtgggtttaaatttaggaaaaaaaaaaaaatgtttttggtggtaaggatagggagagattgaataagtttggggtaagtggtaaaattagagaaagaaaattttttaggaggtttgagtttaggaaagtaattttaaggattcgagttgataaagttattttggaggtggaggtattaggtttagttggagagattgtgagggcgaagaatttataggattttttgtgaaagaaaagaaataagtttagttttgagtattttgtattttttatttggggggaaaaaggagttataaaaattgtaggtaggtgtgtattatgttttggtaatttttaaaggattgtttttaatatgataggtatataaaagattttaaaagtaattgttttacgtgtatattatcgattgtttttggagttttatggtattaaggtagagttttgttattaattatagttttatggtagtagagttacgtcggtaggtagttgagggaacgtgaggatattagaattggggtttataggaggtaaaaatttgtagttgtttgtaggaggttttaggttttttgtattcgtttttgttattttgtggattggggtagttagtatagtaaagagtcggttttcggagtttatagtttgtagggagatagataggaaaatagatgatgagacgtttttttattatagtaggtattattttattacggtacggtaggaaaagtatttagatttgttggggtatttgttgaaatgaggtagagaagtttttttttgtatagttttttgagttttttttaggggaagtgacgaaggggtgacgttgttgttgtttagaaattttttgatagtttgtttggggtagaatgtggggatttgaagggtgtaagcgtgagtataattttttatggattgttgtgtgagatgatgagaaaggaatttatttatttttttggagggaggaggagatatgggggtagggggggagtta

SEQ ID NO: 2310 - DNA, 2188 bp, Artificial Sequence
  chemically treated genomic DNA (Homo sapiens)
tggttttttttttgtttttatgtttttttttttttttagaaagatgggtgagttttttttttattattttatataataatttatgaagaattgtgtttacgtttgtattttttagatttttatattttgttttaagtaggttgttaagaaatttttgagtaataataacgttattttttcgttattttttttggaaagaatttaggagattgtgtagaaggaaatttttttattttattttaatagatgttttagtaaatttaagtgttttttttgtcgtgtcgtggtaaaatagtgtttgttatgatgagagggcgttttattatttgtttttttgtttgtttttttgtaggttgtgggtttcgggggtcggttttttgttgtattggttgttttaatttataggataatagaggcgggtgtaggaagtttgaggttttttataagtagttgtaggtttttgttttttgtgaattttagttttgatgtttttacgtttttttagttatttgtcggcgtaattttgttgttatggagttgtggttaatggtaaagttttgttttggtgttataaggttttaggagtagtcgataatgtatacgtaaagtagttgtttttaaaattttttatgtgtttattatattaaaagtaattttttggaaattattaagatatgatgtatatttgtttgtaatttttatagtttttttttttttttaagtgaagaatgtaaaatatttaaaattgagtttgtttttttttttttataaaaggttttgtaggtttttcgtttttataatttttttagttgggtttgatgtttttatttttaggatgattttgttagttcggatttttaaggttgtttttttgggtttagattttttggaaggttttttttttttgattttgttatttattttaaatttatttagtttttttttgtttttgttattagaagtattttttttttttttttgaatttaagtttattgtgttattttttggtttaaaattttgaaatatttttagtttttttaaagttggtttcgggttgttgttgttgttgttgtatattttttgtaagtaaataagtaatattcgcggtgtttttttttcggtatcggagatcgggaggaagaagaatttgtaggatttatttttaaagaaatatattataattatttattagttttcgttttattttcgcggatgttggaaacgtttgacgttgggttagtcgttttttttcgtattttcggcgtggttattttaggaggttttgatattttacggacggtggtttattgggttttattatcgttattaagcgtatatatattttttttatgtatacgtatattgatatatgtttatatttacgtttattttatttttagttgaggttatattttacgttttcgagagaaagcgggcgaggtagtaggagttttgagggataattggttcgttcgtttgtttgtgtttcggggtatttatagagtgggtacgtgattttcggggtgtttgtgagggcgtttttggaagagtttcgtgtttgtaatggcggattgaatatagtagttggtttttttttaaggtgggtgggtttcgtttaatttgtggaagtcggaataggataaaaaggtggagggcgtttggattttttttgtttgatttaaggtagatattcgttttttttggtcgttggtatttttggtttttagggatttagattttgattggcgtttattttattggatttcggtttttaggttttggaatttgtattgttagtatttttgggtgttcggtttgcggatagtagatcgtgggattttttagtttttagaattgtacgaagtgtttttttacgaatttttttttatgtacgtgtattttattggttttgtttttttgtagaattttgattaatgtaaatttttttattttatagtagtgtatgtataaatttatttatattttttttttttttgttttttttatcgtaagtttttttcgattagaggttaatttcgttgcggtgtttcggatttattttttgtattagtttttttttttgttttttaaaagttcgcgttttttgtgggtttttaaggttgttttttagtatttttacgttagagttttttagttttttttttttttttaaaagcgtttttatag

SEQ ID NO: 2311 - DNA, 2449 bp, Artificial Sequence
  chemically treated genomic DNA (Homo sapiens)
gttttttttgttttttgagtaggggttgagggtgcgttgggagaggagggttggggttagggagggagtgggtacgtagattttagaagtttgggagttagcggttgggttttggattttgttatagtatcgtggaggtttgagagggttaggttagtttttgagttttttggtttggaaagggtttttatgtgggtgggttaggaggtagagatggatattatgtttaggtttggttttatttatttttaatgttaggaggatcgggggaggttattgagttttttagagttttagggattttttcgtgtttttttatatttcggtttttaagggatttagaaagggaggtatagtttatgagttttattttattttattttatttattttttgagagggagtttcgttttgtcgtttaggttggagtgtaatggtataatttcggtttagtgtaatttttattttttgggtttaagcgatttttttattttagttttttaagtagttggaattataggtgttagttattatgtttggttaatttttgtatttttagtagagttagggtttcgttatgttggttaggttggtgttaaatttttgatttaggtgattcgttcgttttagatttttaaagtgttgggattataggcgtgagttattgtgtttagttatgagtttcgttttatagattcgagagttgaggttttgagaagtaaggtttggttaggttttttggtttagggaggtttagggttaggttgtttttaaggttaggttataggattgtttggggtatagggtttgttgttgggttaatatttttttttttgttcgttagtatcgagggggagtacgtgttagtggagggcgacgaggtgatttataagatgtgttttattttttttaagaattagaagttttaggtcgtggaggtggtgtttatttagttggttttttatattttttacgagacgtggtttggttaggtcgtgggtttttaggttgagtggtttataggttagttggtcgggggttggggagttatatagggtgaacgggtagtagtcggttttatgttttattgttttggttgatgagtttttcggtggttttagtgtgtacgtttgtttgttcgtttgtgtttgtggttatgagcgtgtgtttttatttattttacgattcgtgattattgtgtaagttggttaggaggtaggtggagggtaaggttattagatttggtttcgcgttgtttattgtttttttttttttttttttgtcgtagatacgtaggattcgttcgtttttttgtttattcgtttttacggtgattgagttgcgagagtttgcgttgggtttattttttggttttcgtttttgagttgtttcgtgttagtttttggttcggagttaggttttttgtgttatttatattttttttttttggttgaggtttttcgttatagtttggattttttttttagaagtttggtcgatgggtgtttttggggagttttttagtttttggtaggggaggaggattgatacggaggtatataggttttttattgtcgaggttagtttttttttttgttttgtttttttagtgttatggagaggtaggaagaggggtttgagggcggaaggggtttggggtttttatttcgtcggttagttttttttttttagtttggtagtggcgttgggtttttttttttgggttgtattgagtcgagtttaggggtttgtagagggtgggggtttatttttttagtttggttgtagattttttttattttgatttataagttttattgatgttttgggttatgttcggttgacggttgttgtggatgtcgcgagggacggatatacgttcggggtatttacgaggagggtttttagtttgggagattggttttgcggtttttacgttaaattttttttttaaagttttaatagattagtggtcgaggtgtggtttttattgtatttatttttgaagatgtgtggttgttgttgttatttggagtttttttggggttaagatgtgtgtgtattcggggtcgtggttatttatttttaggtaggggtgagggtggtttggtttaggaggttaggaaggagggttttgtttgtttttatttttgggtgtattttttgtttattatttttttttttagagagtatatcgtttgatcggggagaagtggggtcgtggttcgagggagggttggttaggggtgggatttttatgagatttagtttgtgagtaaaattgggggtttaaatgtttaggatgaggggattagtgattgtttaggaggattttttgttttgtaggtgttttaagatcgtagggtagaaattagtcgggatgtttgtattttattttcggttttagggtttattatataaaatttgggagtttagagttgttgaggtgt

SEQ ID NO: 2312 - DNA, 2449 bp, Artificial Sequence
  chemically treated genomic DNA (Homo sapiens)
atattttagtagttttgggtttttagattttatgtggtgggttttggggtcgggggtgggatgtaggtatttcggttgatttttattttgcggttttggggtatttataaggtaagggatttttttagatagttattgatttttttattttgggtatttgagtttttagttttatttatagattgagttttataagggttttatttttggttagttttttttcgaattacggttttattttttttcggttaggcgatgtgttttttagaagggagggtggtaggtagggggtgtatttagaggtggaggtagatagggtttttttttttggttttttgggttaggttatttttatttttgtttgggagtgaatggttacgatttcgggtgtatatatattttggttttaaaaggattttaggtgatagtaatagttatatatttttagggatggatgtaataagagttatatttcggttattggtttgttagggttttgggaagagagtttgacgtggaggtcgtagggttagttttttaggttgggggtttttttcgtgggtgtttcggacgtgtgttcgtttttcgcggtatttatagtagtcgttagtcgggtatggtttagagtattagtggggtttgtgagttagggtaaaggaggtttgtagttaagttggagagatggatttttattttttgtaaatttttgggttcggtttagtatagtttaggggaaggagtttagcgttattgttaggttgaggaggagggattggtcggcgaaatgggagttttaaatttttttcgtttttaggtttttttttttgtttttttatggtattgagagagtagagtaggaaggaaggttggtttcggtagtgagaggtttgtgtgttttcgtgttagttttttttttttgttagaggttgagaggttttttaaaagtatttatcggttaggtttttgagggaagggtttaggttgtggcgggggattttagttaagggagggagatgtaagtagtatagagagtttggtttcgggttagggattgatacgggatagtttaggggcggaggttagggagtgagtttagcgtaggttttcgtagtttagttatcgtggggacgggtaagtaggagggcgagcgggttttgcgtgtttgcggtagggaggggaggagagaggtagtggatagcgcgaagttaggtttggtggttttgttttttatttattttttggttagtttgtatagtagttacgggtcgtggggtgggtggaggtatacgtttatagttataagtatagacggatagatagacgtgtatattgaggttatcgaaggatttattagttagggtagtggggtatggagtcggttgttgttcgtttattttgtgtggttttttaattttcggttagttggtttgtgaattatttagtttaggagtttacgatttggttagattacgtttcgtggggagtgtggggggttagttgagtgagtattatttttacggtttggaatttttggtttttgggagggatagggtatattttgtaggttatttcgtcgttttttattggtacgtattttttttcgatgttggcgggtaggaagaggggtattagtttagtagtaggttttgtgttttagataattttgtggtttggttttgggggtagtttggttttaagtttttttaggttaggaggtttggttaggttttgttttttagaattttagttttcgaatttgtaaaacgggatttatggttgggtatagtggtttacgtttgtaattttagtattttgggagtttgaggcgggcggattatttgagttaggagtttgatattaatttggttaatatggcgaaattttggttttattaaaagtataaaaattagttaggtatggtggttggtatttgtaattttagttatttgggaggttgaggtgggagaatcgtttgaatttaggaagtggaggttgtattgagtcgagattgtgttattgtattttagtttgggcgatagagcgagatttttttttaaaaaataaataaaataaaataaaatgggatttataaattgtatttttttttttgggttttttggggatcgagatgtgaaagggtacggggaggtttttaaagttttgagaagtttagtgatttttttcggtttttttggtattagaagtgggtggggttaggtttagatatgatatttatttttattttttggtttatttatatgaaggttttttttaggttaagaggtttaggagttggtttagtttttttagatttttacgatgttgtaataggatttagggtttagtcgttggtttttaggtttttggggtttgcgtgtttattttttttttggttttagttttttttttttaacgtatttttagtttttatttagaggatagaaaaggt

SEQ ID NO: 2313 - DNA, 2488 bp, Artificial Sequence
  chemically treated genomic DNA (Homo sapiens)
aattttagggaggcggggcggagacggcggcgaggaggaggtcgcggcgcgggacgtatagagttgcggttcgggcggcgtttttttgcggcggttcggttcggtttcggttttcgttggggtaatgtttttcggggtcgcgggatgagttaggtgagcgcggagatttttagtattttttgtttggtgcgtatggacgggggtggggaggcggggcgggaagcggcgttttcggtttttgtttttcggggttgtgtgattttgggcggtttcgtattttttttgggtttagagttttagtatcggtagggtttgcggaggtcgttttgagttttggtttcgtaggtatcggtttggagcgttggggaggttttttggaggaggcggggtttggttttggtttcggatcgtcgagatcggttacgttgcgtcgtttggacgtcgggtttttttatttatagttttgcgatttttacgagttcgattttttttgcgttttagtttttttatttataaaatggagataatgttttcgcgcgttgagttcgagcgcggtcgtgttgttatattattgttgttgttatgtcgttaatgacggtatagtttttatggaaggggggttaaggaaggtacggggattttttcgtaggatatggggtgggtattagttttaagttatgtatataatttattttgaggttaggatttgggtttttttcgtgtttattgggggttttagtcgttgtttttatttttttaggttttagttttttataatgggcgcgtttttttgtttgagagggaggttttagttaagttttagtttttatcgtaaaaagttatatagtaaatatttaatggattttaaatttataaaaattattttatagagttttatgaggtagggaatgttattgtatttatttcgtagatgaggaaatttggggtatcgatattttttagagttaatatgtaaattaggtatttggtttgagtgatagattggtgtaggtggttagtagtttaatttgtattgagcgtttattgggtttttatagcgattttgaattgtgtttttgtttatagtgattcggtcggttcgggtatggtagatttagtggcgggtatcgcgggttcggcggttaagagcgtgcggttatttcgttttagtgaggtttacgtggaggttatgaaggaggatttggtcgagtggtttaatgttttgtacggtttgggtttttcgggtggtggcgatggttttttgatagggttggttacgggtacgattttgtgttaatatgttaacgtcgtgatcgaggttgttcgtgtattggtagtcgttcgttcggttcgaggtgtggttttttaggcgtatagtgtagtgtttggtttttttatggcgcgcgataacgtggttatttttatcggttggtgtcgcgtggagttgggtgtgtcggaggtgtttatgtttgagattgaggatttggtgttgcgtaagaacgagaagagcgtggtgttgtgtttgttggaggtggcgcggcgtggggtacgtttgggtttgttggttttacgtttcgtgtagtttgagtaggagattgagcgggagttgcgtgttgtatttttagtttttaacgtttttgtcgttggggaggatattattgaaatcgttttcgtattagggatttttgttcgcggttttcgtatgatatttagcgatttgcgtaatttcgacgagttggtgagttttttagtattaggtgttagggattcgatagtatagttagtgtttgtaatttgtttttgaattttttagggtttattttgttatttgtagaatagtttgttttataaaaagagtgtatatgttgagtattaaatcgaggaatgtatatttgattttaaggaaatgggtagtttatagagagggaggtgtcggggagatgacgtagtttagtcgggtttgggataggatgcgggtttttggtacgatttttttttattttgtgtgttaattgtgttttaattgagtttgtgtatttttttttttggggggtcgtatgatcggggcgttttttttgtgttttttttgtagttagttttaggtagatgtatttataattttatggaggttcgaggttgagcgggtgttgtgatgttcggttgagacgaggtatggaaaaatttgggtaaggtgtttggtatatagtaggtgttttagggggttttgtaggtttttttattttttaggtatttttgggaagtttagttgggttgttgttgttgttgggagtagggattttgtttggaattataggattcgttttattttaagtataggcgttgttgggttttgtttttaagtttttttttttttaggatttgggtggtttttgttatttttgagggttggattaagagttttttttttattagaaggttaggattataatgtgtttgtttgggaggtagatagcggatggtagtgggt

SEQ ID NO: 2314 - DNA, 2488 bp, Artificial Sequence
  chemically treated genomic DNA (Homo sapiens)
gtttattgttattcgttatttgttttttaggtaggtatattgtagttttgattttttgataagaaggaaatttttggtttagtttttaggggtggtaggggttatttagattttgggagaggagagatttgggggtagggtttagtaacgtttatgtttagagtagaacgaattttgtaattttaaataggatttttgtttttagtaatagtagtaatttagttaggttttttaggggtgtttggggagtggggagatttgtagagttttttggggtatttattgtgtgttaggtattttgtttaggtttttttatgtttcgttttaatcgagtattatagtattcgtttaatttcgagtttttatgaggttgtgggtatatttgtttaagattgattgtagggagggtatagaggaggcgtttcgattatgcggttttttagaagaaggaatgtataagtttagttgaggtatagttagtatataaagtgagggaagatcgtgttaggagttcgtattttgttttaggttcggttgggttgcgttattttttcggtatttttttttttgtgggttatttatttttttggggttaggtatatatttttcggtttggtgtttaatatgtgtattttttttgtggggtagattgttttgtagatagtagggtggattttgggaggtttagggatagattgtaggtattggttgtgttgtcgggtttttggtatttggtgttgggggatttattagttcgtcgaggttgcgtaggtcgttgggtgttatgcgggggtcgcgggtaggagtttttggtgcgggggcggttttagtggtgttttttttagcggtaggggcgttgggggttgggggtgtagtacgtagttttcgtttaattttttgtttaaattgtacgaggcgtggggttagtaggtttaggcgtgttttacgtcgcgttatttttagtaggtatagtattacgtttttttcgtttttgcgtagtattaggtttttagttttaaatatgagtattttcggtatatttagttttacgcggtattagtcgatgaaggtggttacgttgtcgcgcgttatgaaggagttaggtattatattgtgcgtttggaaggttatatttcgggtcgggcgggcggttgttaatgtacgggtagtttcggttacggcgttggtatgttggtatagggtcgtgttcgtggttagttttgttaggaagttatcgttattattcgggagatttaggtcgtataaggtattgagttattcggttaggtttttttttatggtttttacgtaggttttattggagcgaaatggtcgtacgtttttggtcgtcgagttcgcgatgttcgttattgggtttgttatgttcggatcggtcgagttattgtgggtaggaatatagtttaggatcgttgtggggatttagtaagcgtttagtataaattaagttgttggttatttgtattagtttgttatttaggttaaatgtttggtttatatgttggttttgggaaatgtcggtgttttaagtttttttatttgcgaaatgggtatagtaatattttttgttttataggattttatgggataatttttataaatttagggtttattaagtgtttgttgtgtggttttttgcggtggaaattggggtttggttggggttttttttttaggtagggaggcgcgtttattgtgaagggttgggatttagagaagtgaagataacggttaaggtttttagtggatacgaaaggaatttaggttttgattttagagtgggttatgtgtatggtttagggttggtgtttattttatgttttgcgggaaggttttcgtgttttttttggttttttttttataagggttgtgtcgttattaacgatatagtagtagtaatagtgtaatagtacgatcgcgttcgggtttagcgcgcggaggtattatttttattttatagatgaggaaattgaggcgtagaaagggtcgagttcgtgaaggtcgtagagttgtgggtggaggagttcggcgtttaggcggcgtagcgtggtcggtttcggcgattcggggttagggttaggtttcgttttttttaagaagtttttttagcgttttaggtcggtgtttgcggggttaggatttagagcggttttcgtaggttttgtcggtgttggggttttgggtttagagagggtgcggggtcgtttaaggttatatagtttcggggaatagaggtcgaggacgtcgtttttcgtttcgtttttttattttcgtttatgcgtattaggtagggagtgttgggggttttcgcgtttatttggtttatttcgcggtttcggggagtattgttttagcgggggtcggagtcgggtcgggtcgtcgtagggaggcgtcgttcgagtcgtagttttatgcgtttcgcgtcgcggtttttttttcgtcgtcgttttcgtttcgtttttttggaatt

SEQ ID NO: 2315 - DNA, 2379 bp, Artificial Sequence
  chemically treated genomic DNA (Homo sapiens)
ggttattcgtttagttatggattttcgcgtttaattatgagtttttttatatattatttattttttatttatttgtttatattttatttttcgtgtagttacgaatttatttagtatttttttattatttatatttttttaattatttattagtgtttgtttattatatttgcgtatttttttatgtttttaattatttagttagtgatttttttttcgttatttaaggttatttatttgtatatatagatttttatttatttagacgtatattttttggtttatttattcgtttgtttattatttattaagtataggattatttatttattcgtgggttggtgtgggtagttattattcgttttgtttatgtacgtatttattttgcgttgttttttttttgtagtaggagtgggtatcgtatattattttgtttatgaagtttcgagggggtattgtttggttttagttagttttatttgtttcgtttttttttgtaggatagtggtgtttgtttattttttttgttagttgttagttttgttgtttttcgtattttttggtaattttattgtatgaaattttttaaatttttttttacgttaagtgttaaaatagtttagtttaagtgtttttaggatttttacggagtttgatcgtaaagaggtgagtatatttaagtttttatttttagtttagttttttgtattagagttttagggttgattttgtagaggggaagtagtttttttttagaggtaggtatatagtaggtgtttaagtaataggatttttgttatttttatatttttggaagaatttgtttattttttattttttgttcgtttttaaggatcgttattttgaatttggtaaggcggttttttttatttttattgaatgaatgaggaaattgaggtagggtgcgggggtcgggaggagaggagtattgttcgaggttttcgggggaggttagggaaattttagttcggtaggttttcgggttttcggtttttagggttttttttttaatttattttcggtttttttaaggtttttatttacgcggacgagttttttagtttgtcgtagagttagtcgttttgggtttcgggtattaatatttttattacgtttttagcggagaagcgtagtagcgtgtggttggcgtttttcgagtgggagattagggcgcggatttttttggcgttttcgtcgtcgttcgggcgttcgttaaaggagttggagcgcgagttttgggcgttgtcgttgtagagcgaggttgtgggcgggagagcgcggcggtacgtgggtaggaagttttttttggcgtttgttttcgattttttttgttgtagttttattttcgcgtttttttcggtttttttgtcgtttcggggcgggggtatttataggtcgacggcgtgcggggtagggagcgacggtttggttttagttgggacgcgggtttcgcgtcgggttcggtgtcgtaggagtcggagtcgtgtcggttgcggggggagttgaatttttttaggggtttcgggggttgcgggggagatgggtaggggagggtggggcgggggggggggggggcggggtcgcgttttagtttagtttttatttttagttttaggcgtcggcgtaggggttttgggggcggagatcgggttattacgggggcgcggagaacgcgtcggggcggaagggtaggtcgggggatgtagcgtagagcgggagtttggggggtaggaggttttaggttgggggtttgaggtttcgggttttcgcggggggcggcgggggcgcgaacggcggcgggggcgtttagggttttattatgtttaggtaggtgggcgttaggcggttcgaggggtagggcggttttagcgcggggtttagtaggtcgggggagtgggcgcgcgacgggttgcggttggttttagattgttttttttatagtagtacgcggttttggagtatttttcgggtttggtcgggcggggatacgggggttagttaggttcgggcggttttttgaattttggggatttaaaatgatattttcgatttgagagtttaggttttattagttcgggacgatcggattttttagttggaaggagttagaagttagtttatcgtttaattcgtattttttatttttggtaaaggtatttttattttttacgaagagttttttttgatttttcgtttttcgcgttaatgtgtgtgttttgagcggggttgtttttatcgtttagttttaggggtaggggtggtatttaggtttggttatttaattattttatttttttttttgtagcgataggtttaggaatggcgtttagatagaaattacgattaaagaatttagtt

SEQ ID NO: 2316 - DNA, 2379 bp, Artificial Sequence
  chemically treated genomic DNA (Homo sapiens)
gattgggttttttggtcgtagtttttatttaagcgttatttttgagtttatcgttgtaggaaggaggatggggtgattgagtggttaggtttgggtgttatttttatttttgaagttgggcggtgaggatagtttcgtttaaagtatatatattgacgcgggaagcggggggttagaggaagtttttcgtggaaaatggaggtgtttttgttaaaagtagagggtgcgggttggacggtgagttggtttttggttttttttagttagaaaattcggtcgtttcgagttggtagggtttgagtttttaggtcgagggtgttattttgggtttttaggatttagggagtcgttcggatttggttgattttcgtgttttcgttcggttaggttcgggggatgttttagaatcgcgtgttgttgtggaaggagtagtttgaggttagtcgtagttcgtcgcgcgtttattttttcggtttgttgggtttcgcgttggggtcgttttatttttcgggtcgtttgacgtttatttgtttggatatggtgaggttttgggcgttttcgtcgtcgttcgcgttttcgtcgtttttcgcgggggttcggggttttaggtttttagtttggagttttttgttttttaggttttcgttttacgttgtatttttcggtttgttttttcgtttcggcgcgtttttcgcgttttcgtggtggttcggttttcgtttttagaatttttacgtcgacgtttgggattgggggtgggggttggattagggcgcggtttcgttttttttttttttcgttttatttttttttgtttatttttttcgtagttttcgaggtttttgggagagtttagtttttttcgtagtcggtacggtttcggtttttacggtatcgagttcgacgcgaggttcgcgttttagttagagttagatcgtcgttttttgtttcgtacgtcgtcggtttgtgagtgttttcgtttcggggcggtaggagggtcgggagaggcgcgggggtggggttgtagtaggagggatcgagggtagacgttaggaagaattttttgtttacgtgtcgtcgcgttttttcgtttatagtttcgttttatagcggtagcgtttaaagttcgcgttttaatttttttggcgagcgttcgggcggcggcgggggcgttaggagagttcgcgttttggttttttattcggagggcgttaattatacgttgttgcgttttttcgttggggacgtggtggaggtgttggtgttcgaggtttagaacggttggttttacggtaagttggagggttcgttcgcgtgagtgggagttttggaggggtcgggggtgggttgagaagaaggttttgggggtcgggaattcggggatttgtcggattgaggtttttttggtttttttcgggggtttcggataatgttttttttttttcgattttcgtattttgttttagtttttttatttatttagtgggagtaggaagagtcgttttattaagtttaggatgacggtttttgagagcgggtagaggatgggggatgggtaggtttttttaaaagtgtggaaatggtagaaattttattgtttgagtatttattgtgtgtttgtttttgggaggaggttgttttttttttgtagagttagttttggaattttgatgtagggggttgggttgggagtaggggtttaaatgtgtttatttttttgcggttaggtttcgtggaaattttgaaagtatttaaattgggttgttttgatatttgacgtggaggaggatttggggagttttatatagtgaggttgttagaaagtgcggaggatagtagggttggtagttagtagagggaatggataggtattattgttttgtaggggaaaacggggtagatggggttggttggagttaggtagtgttttttcggggttttatgggtagggtagtgtacggtgtttatttttgttgtaggagagaagtagcgtaggatgaatgcgtgtatgggtagagcgggtggtggttgtttatattagtttacggatggatgagtggttttgtgtttaatggatggtggataggcgaatgggtggattaggggatgtgcgtttgggtaggtggaggtttgtgtgtgtaagtggatggttttaaatggcggggggggggttattgattgggtggttagggatatgggaggatgcgtagatgtggtggatagatattgatgggtgattggagaggtgtgagtggtgagggggtgttggatggattcgtggttatacgggggatggagtatagataggtgagtgggggataggtgatgtatggagggatttatagttaggcgcgaaggtttatagttgggcgggtgatt

SEQ ID NO: 2317 - DNA, 2385 bp, Artificial Sequence
  chemically treated genomic DNA (Homo sapiens)
tagggaagatttttcgggatttaacggtttaggtagttgcgtttttatttttcgtttgggtagggaaggatttattttagttataagtagtttggagatggatggtttggtagagaaggggaaattttagtattaatttagttttaggttttattttgtagttaggtttgttttgtttagagttttcgaggggtttagtttgattttgataggtagaagagattttattttaggtttagaagtgagggagtagagtaaagggtttttggtttattgtgtgattattatttgtcgttttgtttagtgggatagggatgtttcgtatttagtttttttattatttaggtggtttgggggtatttaaggtttcgggtagtttttgagttgggtttaggttttatggcggttttagggtaggtagggtgagagttgatagggaatagatgagggaagagtattttatatattcgggggttttattataagatttttttagcgtttttttttttttttaggttttttatttttggttatttttttaggtgatgtttgaagtttaagggattgtgtttatttttaggttagtatagtttgtgaatgttgatgaaaattggggttttttatattttttttttttggttttattttttgtcgggcgtgtttgaaattggatatatatatatatatagtatatacgtgtatatgtattagttttagagttttgggggttaaggagttaggtaggtgtttgttgtttattggtacgggtttagttggatttagttcggttttttgttttttgtttttattagtttttttttgcggttattagtttttttttttttgtaattgagggattagggttttaagtagttgggtttggtttaggtttggttttgttttttgggtttttttttgtttgagttgggtgatatttttgtttgtaaggatttagttgttttaagggttttgggaggggaggttaggggtagtttaggggattagtgattatagggtaatttgtagtatttgttgggggtttagtaggtaagatgttttttgtttgttgttgtttgttatggttgtttggtggttatggtcgggggcgggtttgttatgttgggaattgtttagaggttgcggttagtttgaggtttttcgttttggcgagttagttttcgagtgtagattgtcgtcgatgatttttgttttttggggtattcgtgcggttatgtgggttgggtaggattggtatttttttttttttatcgttgttatggttaggggcgggtttatttttcgaggttgtgcggagaggattttaggttgttgtatgtgagtagagtagtcggtgtttggttcggatttttttgttatttggggttcggcgtgtttataggtcggttttgttcgttagattttgtagacgttgtttcggggtttttgtgtttgtacgtagggttgagttattagtcgagcggagagtggggagggatataggtggggagtagggggaggtttttgggggaattagggaggaggggtaggatagaagagaaaggggatgaagggtaatagaggaaggagaatagcgtggggataggagaggggtagggattggggaagaggagatataaggtaggatagggtagggtagtttttggaattgtggggttgttatagggatattagtttgggggagtagttaattttaggtatttgatagggatttagtgggttttggttaaggcgatttggttaacggaattggggtttttttggtatttattataagtttaggtttgttcgtgggattttattttatttgtatttagttttttttgtatatatagttggttattatttaatgtaatttttttgatattttataggtagtagtgttggtttttagggtttaaatgaaatagattttataggcgtgttttttatataggattgagtatggaatgtgtttttttttgagtttttgatttttaagtttggattgatatgtttagggaggttgtaagggtgtgttttttggattatgggtagggggtatcgtgtgtagttgttgaggtttaggatgtgtgggaaagggtttggagtggaggagaagaggtttgtaggggagtggatagtttagggttgggattagtattttaatatgtatgattcgtggaagatgaggttggtcgtatatagaaggtgtttatttagtgttcgttagatgttagatgttggcgtaattattataggggttatatatttttcgttaggattattagtaaggtagggttatcgttttatattgtttttgtagagacggagattggggattaggagtttggttttattttggtttgtagttttgggggttgttgg

SEQ ID NO: 2318 - DNA, 2385 bp, Artificial Sequence
  chemically treated genomic DNA (Homo sapiens)
ttagtagtttttaaggttgtaggttagagtagggttaggtttttgatttttagttttcgtttttgtaagaatagtgtgggacggtggttttgttttgttggtggttttaacggagggtgtgtgatttttgtggtgattacgttagtatttggtatttgacgagtattgagtaagtattttttgtgtgcgattagttttattttttacggattatgtatattggggtgttggttttagttttggattgtttatttttttgtaggtttttttttttttattttaggtttttttttatatattttgagttttagtagttgtatacggtgttttttgtttatgatttaggggatatatttttgtagtttttttggatatgttagtttaggtttgggagttagagatttagggaggggtatattttatgtttagttttgtgtgagggatacgtttgtggggtttgttttatttggattttagagattaatattgttgtttgtgggatgttagagggattatattaggtggtggttagttgtgtatatagggagggttgggtataggtgggatgaggttttacgggtaggtttgggtttatggtgggtgttaggaaaattttagtttcgttgattagatcgttttggttaagatttattaggtttttgttagatgtttggggttagttgtttttttaggttggtatttttgtgatagttttatagttttaagggttgttttgttttgttttgttttgtgtttttttttttttagtttttgttttttttttgtttttacgttgtttttttttttttgttattttttatttttttttttttttgttttgttttttttttttgatttttttaggggtttttttttattttttatttgtgtttttttttatttttcgttcggttggtggtttagttttgcgtgtagatataaaggtttcggggtagcgtttgtagagtttggcgggtaaggtcgatttgtaaatacgtcgggttttagatggtagaggggttcgggttagatatcggttgttttgtttatatgtagtagtttggggtttttttcgtatagtttcgggaggtgggttcgtttttggttatggtaacggtggggaggggagaatgttagttttgtttaatttatatggtcgtacggatgttttaggaggtaagaattatcggcgatagtttgtattcgggggttggttcgttagggcgaggggttttaggttggtcgtagtttttgagtagtttttagtatgataagttcgttttcggttatggttattagatagttatgatagatagtagtaggtaggggatattttatttgttgagtttttagtaggtattgtaaattgttttgtagttattggttttttaggttgtttttggtttttttttttagggtttttgagatagttggatttttgtaaataggagtgttatttaatttaggtagaagggagtttaaaaaatagggttagatttggattaaatttagttgtttggagttttggttttttagttgtagaaagaaagaggttggtggtcgtagaaagaggttggtaggggtaaggagtaggaggtcgggttagatttagttgagttcgtgttaatgggtagtaagtatttgtttggttttttggtttttagagttttggggttggtgtatatatacgtgtgtgttgtgtgtgtgtgtgtgtttagttttaggtacgttcggtagagggtggagttagaagggagggatgtggggagttttaatttttattaatatttataaattgtattgatttgagggtggatatagttttttgagttttaggtattatttggggaggtggttaagggtggaagatttggaaggaaagagaaacgttgaggaagttttatggtggaattttcgggtgtgtggggtgttttttttttatttgttttttgttagtttttattttgtttgttttgagatcgttatgagatttgggtttagtttaggggttgttcgaagttttgggtgtttttaggttatttggatggtgaggaggttgggtgcggggtatttttgttttattgggtagggcggtaggtagtggttatatagtaggttagggattttttgttttatttttttatttttgggtttggagtggggttttttttatttgttagggttaggttgagtttttcgaggattttgggtagggtagatttggttgtaaggtggggtttggggttgggttggtgttggggtttttttttttttgttaaattatttatttttaggttgtttgtgattggagtgagtttttttttgtttaggcggggagtaaagacgtagttatttgggtcgttaggtttcggaggatttttttta

SEQ ID NO: 2319 - DNA, 2452 bp, Artificial Sequence
  chemically treated genomic DNA (Homo sapiens)
gagtggagttgggtgttttaggaggatgttagtttttattaggtttttataattgtattgagaggttagttttgtttagtttatagatagggatattgaggtttaggtaggggaggttcggggtaggtaggttgtgcggtattggcggggttaggtgggtgtgtttgattgggagttattgtttgtgtttcggatttgagatagtaataataatgattattataattatgagagcggtattttttaggatttaggttatagttttagtgatgatgatagtatagtatgtggtaggaacgtggtaatattttcgggtttggtttaattttgggggtatagtagtttttttcggtgttttttttattgtttgtttttttagtttgaggtgggttttggttgtatagaggtgagatttgggttgttagggtgaggggattagggttcgttatttgaggggagagaaggtttagtttagattttgttttagatttttagtgttgatgtttttgttgtattttttatacgggatttgttgagtagttattatgtgttggggttttgagtcgggttgaggttttggtcgggggagttgtatattattgtataattgataagggtagggagtttagtaggaggacggaggtttagatagtgaggttaggtcggggattggtgggagggtttggttgggttgaatattggtggaagtgtgtgtgtgtgagtgtgtatgtgtgtgtgtttgtgtttgtgtgtgtagggggtagtgttgttttttgtcgcgttgtgaattgagtgtgtaattgtgtaaggagggttaaggtgtttagagaggttttttacgtttgggaggaaaatttaggatttttatagtgcgaaggagatatcgttaggtgacgaaggtattttgtcgtaggtgcggtgtttttggggtgtttgttgggttatattgggttttgggtttttaggggttgttttgattatttttaggaggaaatgacgggtggagttttggggttattagagaagatatagtttagagaatttgagtaagaaattttatagtttgagtttagtagttattaagcggagggaaagtttcgttttttcgtgaaattaaacgaaggtagttgagtattgtgattattgtattatttttgacgtttttgttggtttttaatttagttataaattttacgggcgggggacggtataacgttttatttgtttggttacgcgattcggtagtatttggattttgtttagttagttggtaggaaaattatattttttatgattgatggagtgcgtgtttgtggggattaagaggcgggggttgtgtggggttgagttattgtcgttagggtttttaatattgttgtttagcggtggtttgggggttgtttcggggtttttatttattaaatttaaggggtttttgagaggggaggttgtgtcggttttcgttggggagtcgaaggttttgaggttgggtttagtagtcgtttagtttatttttttgttttagttttgggatttgtttttcgtttatcgtgggttttttcgttgtagtagttagggtgggagttaggggtagggaatttttgggtattgaggtagttttggtttttagtatagttgttttttgtttttattttttttggtattatttgattgttttgttttggtagtgttttggttttttgtttttgttttttttgcggtggtttttgatttattgtttgggttttattaagtttttttagaagtggttggttttattaggagattttaggagtttaggggatgtgggtgtgtttgtagttgttttttttttgttgtttttgtatagggagttttgaggagttggagaagttggatttattcgtaggagaaagagttggggtgggtaggggagaaaggtagagaagttatagaggttgggtttataggagatttttggaggtgaaagtagaagtgaagagagattttgaagagtagcggtatttagtaggaggtttttgagagggttgtgaggggaatagaagtttttttaggggttgatgagtgtttaagaatttttttggtttatattttttgtttggatattttttagtgtgttcgaggagggtcgtagagggcgtttgtaatggttgtttgggtgttaagtggtgttttattgattgggatattatatggaggttgggttattcggggattagggatttagtcgggttatagttagagttataatgttggagatgttttgggttatatagttgggaggattttggagtggtaggaaaggaggtttttttttgatttttaaatgaaatttttttttacgttggttttttaattggtaaaattgaagtttaaaaaggaagttttttatttagagttacgttgcgtgttaaagagtatagcgggagtgggacggtgttcgtgaatttag

SEQ ID NO: 2320 - DNA, 2452 bp, Artificial Sequence
  chemically treated genomic DNA (Homo sapiens)
ttggatttacgggtatcgttttattttcgttgtgttttttgatacgtagcgtgattttgggtgaggagttttttttttgggttttagttttgttagttgaggaattaacgtgagaggggattttatttggagattagggaggagtttttttttttgttattttaaggtttttttagttgtgtgatttaggatatttttagtattatagttttgattgtaattcgattaggtttttggttttcgggtggtttagtttttatgtggtgttttagttaatgaaatattatttggtatttaaatagttattataaacgttttttgcggtttttttcgggtatattggagaatgtttaggtaaggagtgtggattagggaggtttttgaatatttattagtttttggaaaggtttttgttttttttatagtttttttaggagttttttgttgagtgtcgttgttttttaaaatttttttttatttttgtttttatttttagaagttttttatgagtttagtttttgtggtttttttgttttttttttttgtttattttagtttttttttttgcgaatgaatttagtttttttagttttttagggttttttgtgtaggggtagtaggaggaagatagttgtagatatatttatattttttgagtttttggagttttttaatgaggttagttatttttggggaggtttagtgggatttaagtagtgggttaaggattatcgtaggggggatagagataggaggttaaggtattgttaggatagggtagttaggtgatgttaggggaggtggaggtaaggggtagttgtgttgggggttaggattgttttagtgtttaggagttttttgtttttggtttttattttggttgttgtagcgggagggtttacggtgggcggggagtagattttagagttggggtagaggagtaagttgggcgattgttgggtttagttttaaggttttcggttttttagcggaggtcggtatagtttttttttttagaaattttttgggtttggtgggtgagggtttcgaggtagtttttaggttatcgttgaatagtagtattgaaggttttggcggtagtggtttagttttatatagttttcgttttttggtttttatagatacgtattttattaattataagaaatgtgatttttttgttagttggttgggtaaaatttaagtgttgtcgaatcgcgtggttaggtaggtggggcgttgtgtcgtttttcgttcgtgggatttataattgagttaggagttagtaggggcgttaggagtggtgtaatggttataatgtttagttgttttcgtttaattttacggagaagcggggtttttttttcgtttagtagttattgaatttagattgtgaagttttttgtttagattttttggattgtgttttttttggtgattttaagattttattcgttatttttttttgaaagtagttaggataatttttgagggtttagagtttagtgtgatttagtaggtattttagggatatcgtatttgcgataaagtgttttcgttatttaacggtgtttttttcgtattgtggaggttttgggttttttttttaggcgtagagagtttttttaagtattttggttttttttgtatagttgtatatttagtttatagcgcggtaggaggtagtattattttttatatatatagatataaatatatatatatatatatttatatatatatatttttattagtatttagtttagttaggtttttttattaattttcgatttgattttattatttggattttcgtttttttgttggattttttatttttgttagttgtgtagtggtgtgtagttttttcgattagaattttagttcgatttagggttttagtatatagtagttgtttagtaaatttcgtgtaagggatgtagtaggagtattagtattaggggtttgggatagggtttgggttgagttttttttttttttaggtggcgggttttggtttttttattttgatagtttaggttttatttttgtatagttagggtttattttaggttaaaggagtaagtagtggagggggtatcgagggaagttgttgtgtttttagggttaagttaggttcgaggatgttgttacgtttttgttatatgttgtgttgttattattattgaggttgtggtttgggttttgggaggtgtcgtttttatggttgtgatggttattattgttgttgttttaaattcggggtataggtagtggtttttagttagatatatttatttggtttcgttagtgtcgtataatttgtttgtttcgagttttttttgtttgagttttagtgtttttatttgtaaattgggtagggttggttttttagtgtagttgtgaggatttgatgggggttgatatttttttgggatatttagttttattt

SEQ ID NO: 2321 - DNA, 2482 bp, Artificial Sequence; identical to SEQ ID NO: 1847
  chemically treated genomic DNA (Homo sapiens)

SEQ ID NO: 2322 - DNA, 2482 bp, Artificial Sequence; identical to SEQ ID NO: 1848
  chemically treated genomic DNA (Homo sapiens)

SEQ ID NO: 2323 - DNA, 2499 bp, Artificial Sequence
  chemically treated genomic DNA (Homo sapiens)
gggaggggtaaagtgagagttaaggattttgttttttttgggattttattttatttttaattatattataggagaggtggatgtttagggaggttagtgagttgtttaggggtttatatttttgagtggttgtaatagtattgaatatttatagaggtttatttattatattgagttgtttggtggtattgttattttttagtatttgtaaattatgttttaggttatatagtatttttatattttagttttatgagaaaggagggtatttttatgtaatagaggttgttggggttggtagaaagtaggaataggattagaatttaggatgagaattaaaggggtttagagattttgaattagagagattttgtttaagttttagtttcgtttattacgttttttgaaattttaggtaagttattgttagaggttttagtttttttatttttagtggaattggtaaggtttttttttgtttttgtgaagtttaaaatggtatataggaaaggattaatagagatgaattattattattattattattatgttagttattatttttattatcggatagtgtttagaagttgaatttttttgtaatttgagggtataatgaggttttttagagaattattcgtgggtgggggagggggaggcggaaatttgttgaaaattttgttgttatttgagatttagtgtatttttttaaaatgcgtgtgatgaggacgtttttttttttggtaggcgtttgtggtagtggagatattagtgtgttataagattttttttttttttcgcgagtggtggtttaggttggggagtagttttgttttttttgtttaatatgcgtttttttaatttttagtattttcgatcgcgaggattaggttagtttacgggtcggtagtttggcggcgttcgagaaacggtaggtcgagaagaagaaagagttgatgaaggcgtagagtttgtttaagattttagttttttaggcgcgtaaggttatgattgagaagttggagaaggagggcgcggtcgggtgagttgtagaagtgggttgggtagtggggggcggggcgtgataggtagtggggggcggggtttgatagttggttcggtagaggcgggaagatcgcgcggttagatttgtggtgtaaaggttcgaaggttatggaaggcggggtttgggatttattgggtgggtttatcgaggtatgttttttatagtcgtgtgatttggttttgatatcgtttttatagtagttttggcggatttcgcgtagtcgtgtagcgatttattagtttcggggtttttaacgttaatagtattaagtagatgttgttggattggtgtcgagttaagattcgcggttacgaggtgagtttcgggaggttagggggtttggaggtttttttagattttagtttaatattttttttttagtagagtttttattatttagtatattttttgttattgtgtggttttatagggaatatggaaaggtttttggggtgaggaaattgaggtttaaagaggatataaggtaagttttagattttagaattagtgatgaagtaatagggttttttgggtggtgggtagggtttaaggtcggattttatttttggagttttttttttgttgttttgtaggaggttttgagttaatttttttaaatgagggaaggagtgatgaggtatgattatagttttagttgggtggcgttgggttttttagtagttttgttttttgaaattgtaaatatgggagttgataggttgatttggaggaggtttatgttttaattatttatttattgtgtaagttacggggtttttttgtgtttagtgttttaggtttggaataatagaatgttgaggggtagatagtaggggggagttgtttttaggtttttgattagtttttttacggtttatagtacgtcgatatttagaattttttttttagttggagtgatgggatggttttttgtgttttggtgtataattttttttttgaggttttcgattatgggtagtttagtttttagaatcgacgttagaatttcgaggtggtttttttatttgcggagtaagtgtgggttttggttttgttaatgttgttgtatatttggggttggatatcgggattaggtttagttgttttgagaatttttggagcgggttagttatattgttagttagcggttgagatttttttttttagagagttttcgtttttttttatttttattttttcgttgttgagcgtgttaggtgttcgtcggaacgaaggagtcgtaggtcggtttattagttcgggttaaagtttattaggtggttttgtttatattttttttattttttttttgtttttttttttttttttttttttttttttgttttgttttttttttattattattagagttttttgtttttacgggatttcggttggagattttaaaaggaggtttttggttcgggtatcgt

SEQ ID NO: 2324 - DNA, 2499 bp, Artificial Sequence
  chemically treated genomic DNA (Homo sapiens)
acggtgttcgggttaggagtttttttttggaatttttagtcgggatttcgtgggagtaggaagttttggtgatagtgggaggagagtaggatagagaaagggagagagagggagaagggggtagagggaggatggaggggatatggatagggttatttggtgggttttggttcgggttggtaggtcggtttgcggttttttcgtttcggcgggtatttggtacgtttagtagcgggggggtggggatggagaaggacggggattttttggggaagggggttttagtcgttgattgataatgtggttggttcgttttaggggtttttagggtaattgggtttggtttcgatgtttagttttagatgtgtagtaatattagtagggttagggtttatatttatttcgtagatgagaaggttatttcgaagttttggcgtcggttttgagggttaagttgtttatagtcgaaggttttagggaagaagttgtgtattagggtatagaaggttattttattattttagttggaggagaagttttggatgtcgacgtgttataagtcgtaggaggattggttaggaatttgggggtaatttttttttgttgtttattttttagtattttgttattttagatttagggtattgggtataaagaggtttcgtagtttgtataatgagtgaatagttggaatatgagttttttttaagttagtttgttaatttttatatttgtaattttaagggatagagttattgagaggtttagcgttatttagttaaggttatggttatgttttattatttttttttttatttagagaaattgatttagggttttttatagagtaataaggaggggattttaagagtgggattcggttttgaattttgtttattatttaagaggttttgttattttattattgattttggaatttagggtttgttttgtgttttttttgagttttagtttttttattttaagagtttttttatgttttttgtgaggttatatagtggtaggaagtgtattgggtaataggagttttgttaagaaggaggtgttgagttggggtttggggaggtttttaggttttttggtttttcggggtttatttcgtagtcgcgagttttggttcgatattagtttagtagtatttgtttgatgttgttggcgttggggatttcgaagttggtggatcgttgtacggttgcgcggggttcgttagggttgttgtaggggcggtgttaggattaggttatacgattataaggggtatgtttcggtgggtttatttagtggattttaggtttcgttttttatgattttcgggtttttgtattatagatttagtcgcgcggttttttcgtttttgtcgggttaattattaagtttcgttttttattgtttattacgtttcgttttttattgtttagtttatttttgtagtttattcggtcgcgttttttttttttagttttttaattatggttttgcgcgtttgggaggttgaggttttgggtagattttgcgtttttattagttttttttttttttcggtttgtcgtttttcgagcgtcgttaggttgtcggttcgtgggttggtttggttttcgcggtcgaagatgttaggggttggggaggcgtatgttaggtagggagagtagggttgttttttagtttggattattattcgcgaggaggagggggggttttgtagtatattagtatttttattgttataaacgtttgttagggagggaggcgtttttattatacgtattttagaggagtatattgagttttaaatgatagtaaggtttttaataggttttcgttttttttttttttatttacgagtagttttttgagaagttttattgtatttttaagttataggggagtttagtttttgggtattattcgataataaaaatgatgattagtataataatagtaataataataatttatttttgttgatttttttttgtgtgttattttaaattttataagagtagggaggggttttattaattttattaaaggtgaggaaattgagatttttggtagtaatttgtttaagattttagaggacgtgatgggcggaattagaatttgaataaggtttttttgatttagagtttttggatttttttggtttttattttggattttgattttgtttttgttttttgttagttttaatagtttttgttatatgggggtattttttttttttatggggttaaggtataaaggtgttgtgtgatttgggatatggtttgtagatattgggaagtggtagtgttattaggtagtttagtgtggtaggtaggtttttgtaagtgtttaatgttattgtagttatttagagatgtgagtttttaagtaatttattggtttttttgagtatttattttttttgtggtgtggttgagaataaaatgagattttaaggagagtaggatttttaatttttattttgtttttttt

SEQ ID NO: 2325 - DNA, 2397 bp, Artificial Sequence
  chemically treated genomic DNA (Homo sapiens)
gggaggtagaggcggaggcggagttaagagcgtatcgtcgcgttcgtcgtgtcgggtttgagttggagtcgggcgtgagtcgtagtaggagtcgtagtcggagttatagtcgtagttagagtcgtagttaaagttttagagagtaggagttggagcgtaggttttgttggattcgcgtttagttcgtcgttaggtatcggtcggaggacgggtcgtggtgttagtttattgttcgggcgttgtgggaggtagcgagttcgcgatttttcgggtcgggtatcgttaggcgcggagtttagatcgtttttttgttaggtttggttacggttagagtacgtaggagtttttagggtttggatttgcgcgtattttaatgatttggggattgaagagaaaaaaggaacgaggattttatttaaaagtataacgtgggtattaggcgaggaggaaagtggagattatttggtacggggtagaggtgtttggagtttacgtttgagtatcggagattttggtattttagtagtcgcgattttggttttgttttgtttgagttggaaatatagtttagtttttagatatcgttggtataggtttggtataagtaagtagtgtttttatttgtttgaaacgggatacggggtcggaggaattaggatttagtttggttttaagcggaattttttggtggtttagaggtcgttattggggagttcgttttttgttttagttttattggtgcggatgtgtcgttgttcgtcggagtattatgatggtaggatgattttagtcgaagtaggagtagtagttggtggtgtttaggcggttgggtttttcgagtggttttttggtagtttttaggtttttcggtagtttggtcgggttcgagtggttatggtagtattggtgtggttgttggcgggagttagtatgttaagttttaataagtggatttttatagtgtacggttttgggcggtttttgttgttgtcggttttgtatatgttggtggtagttttggtatgttatcggggggtacggcgttttatgttaggcggtattcgttgtcgagttttattgtttagttttatttttggtacgtttatggtttgcggtaacgtgggtttaagggttgtgtttttggatttggtataattggttattattattatatttttgtttattttggttttgtcggcgttgttgttgggtcgtcgttattatttattttagttggtcgttatgggttcgttttgtttgggggtcgtttgtagtttggttggagagtttcggatattttttatcggttgtggttttttgttcgtagttatttgttttcgcggatttaagtcggtttagtaaagtaagtgtttgggtggttaattgagaaggtgggggttcgggtgggtgtatggtttggatggttttgtgaggggtatggttgttgttttattttataaatgaggaaattgaggtttatggttgtggaggaagtagaattgaggtttagagagggttaatagtttagtgagttttaggttttagatttaggttttggaggtttaattcgtgtttatttgtttatttatttatttagatagggtttggttttgttatttaggttgtattggtgagattttagtttaatatagttttcgtattttgggtttaagtgatttttttgttttagttttttaagtaagtgggattataggtgtatattattacgttaagttaatttttgtatttttagtagagatagtattttattatgttggttaggttgattttgaatttttgattttttaaggtgttaggattttaagcgtgagttattttatttggttagttaattttttttttttatagatatagagttttgttatgttgttaaggtaggttttgaatttttgtttttagcgattttttttttttagttttttgaagttttggaattataaattagtatttagtgatagttagtgatttgtgtttgattagttttttattttattgtattgtttttatttgatagatgaagaggtttgttttgggttacgtggttagtgagtagtagaggtaagatttaaatttagatagttagattttatgtttttaagagatgtggtttgaggttttggatataaaggaaagttagaaagtatgggttagggagagaaaaggagggtttgggatgagttgggatttggaaggttaggggttaggtttaagtttggggagggttgttgtttattgggagttatagtgtgataggtttggtgttgagtgttgattttgagttgttatggtaattattaattttatttttattttatagatgatgggattaagatttagagaagtttatgatttgataggttgggtatggtattttat

SEQ ID NO: 2326 - DNA, 2397 bp, Artificial Sequence
  chemically treated genomic DNA (Homo sapiens)
atgagatattatgtttagtttgttaaattatgaatttttttgggttttagttttattatttgtaaaatggggataaagttggtggttgttatgataatttaaggttaatatttagtattaagtttgttatattgtagtttttagtaaataatagttttttttagatttagatttgatttttgattttttaaattttagtttattttagattttttttttttttttttggtttatgttttttggtttttttttgtgtttaaagttttaggttatattttttggaagtatggagtttgattatttgggtttagattttgtttttgttgtttattggttacgtggtttagggtaagtttttttatttattaaatgggaataatatagtgagataaaaggttagttaaatatagattattggttattattaaatattggtttgtaattttagaattttaggaagttgaggggggaagatcgttgaggataggagtttaagatttattttggtaatatagtaagattttgtgtttataaaaaaaaaaaattagttgattaggtggggtggtttacgtttgaaattttagtattttgggaggttaggagtttaagattagtttggttaatatggtaaaatgttgtttttattaaaaatataaaaattagtttagcgtggtggtgtgtatttgtagttttatttatttgggaggttgaggtagaagaattatttgaatttaggatgcggaggttgtattgagttgagattttattaatgtagtttgggtgatagagttagattttgtttaaataagtaaataaataaataaatacgagttgggtttttagagtttgagtttggggtttggaatttattgaattgttggttttttttgagttttagttttgttttttttatagttatgaattttagtttttttatttgtaaaatgggataatagttatattttttatagggttatttaggttatgtatttattcggatttttatttttttaattggttatttaggtatttattttgttgaatcgatttgagttcgcggaggtaggtggttgcgagtaggaagttatagtcggtagggggtgttcggaattttttagttaggttgtaggcggtttttaggtagagcggatttatggcggttaattgaagtgggtggtggcggcggtttagtagtagcgtcgatagggttagggtgaatagaggtgtggtggtagtaattagttgtgttaggtttaggggtatagtttttaggtttacgttgtcgtaggttatggacgtgttaaaggtgagattgagtagtaggattcggtagcgagtgtcgtttggtatggggcgtcgtgtttttcggtggtatgttagggttgttattagtatgtgtagggtcgatagtagtaggggtcgtttaaagtcgtgtattgtgaagatttatttgttgaggtttgatatgttggttttcgttagtagttatattagtgttgttatggttattcgggttcggttaggttgtcggagggtttgagggttgttagggggttattcggggggtttagtcgtttgagtattattagttgttgtttttatttcggttgaggttattttgttattatggtgtttcggcgggtagcggtatattcgtattagtgaggttagggtaggaggcgggttttttagtgacgatttttgggttattagagagtttcgtttggggttaggttagattttggttttttcgatttcgtgtttcgttttagataggtgaggatattgtttatttgtgttaggtttgtgttagcgatgtttagaagttaagttgtgtttttagtttagatagggtagagttaaggtcgcggttgttaggatgttagggttttcgatgtttaagcgtgggttttaggtatttttgtttcgtgttaggtggtttttattttttttttcgtttagtgtttacgttatgtttttagatgaaattttcgttttttttttttttttagtttttaggttattagggtgcgcgtagatttagattttgggaatttttgcgtgttttggtcgtgattaggtttggtaggggggcgatttgggtttcgcgtttggcggtgttcggttcggggggtcgcgggttcgttgttttttatagcgttcgggtagtgagttgatattacggttcgtttttcggtcggtgtttggcggcgagttaggcgcggatttagtagggtttgcgttttaatttttgttttttgaggttttggttgcggttttggttgcggttgtgatttcggttgcggtttttgttgcgatttacgttcggttttagtttaggttcggtacggcgggcgcggcggtgcgtttttgatttcgttttcgtttttgtttttt

SEQ ID NO: 2327 - DNA, 2353 bp, Artificial Sequence
  chemically treated genomic DNA (Homo sapiens)
agtaggtgtttggggtgagtgatatgataatatacggtattggtagataaagtagttgtgttagttttcgagtttttgggattttgttagatgggttgaggttgtagttttatattttaattttagtagttttaagtttgggttagggtattttgagcgggttcggttggggtggggatggggttcgagggtttaggcgtattaggtttttgttgttagttgtttaagtagataaagaggatgtttttatttgtgttatagttggttttggtttttttaaagttattgatgttggtgttgtatatttttgttgggggtggggaaggtagaacggggttagtgggttgtgagagagtatttatattatcgatatagtgtttaggggagttgagtgaggtttgttttttatttatatggttattttttttaatttaagttttttatttttaggaagttttttttgtttattttggtttttatgaggtttttttgatttttttttagtaaagtagttggagaaaggtttagagaggggtagaaacgtgttttaggttatatagacggggtaagtttatgtggttagggcgtttaggggttgtttatgtgaatttagtttatgagagttagggtagtttttttttgtgttcggagggtagtaggtaggttaggatgggtttagagtaggggttgggtttggtcgggtttttttttttgaggaatgtgtcggttattttggtggttgggggaggggtgtagtttgggtagtatgaaagggtaaggtagggatttgggtagtggcgtggggtttgtggtgtgagagggaggggtggttagggtgtagaggaggttggtatagtttgcggtaggtttgtttgtatggtttgaggggtggttatagtgataagagtttaggaggagtaggggttttggggaaaaggtagggagggaggttttggttatattagattgaatgggtgggaattgtgggtattgggtatatagaatagtgaatgtggattattttgttttatttattttatttagtatttacggtcggtataggttgggttgttgtagaagatgtagttagtggttcggttgtagttacgtagtacgatgaagtggttttggtagttaggagtgcggtagaagtagtggtggttattgggggtgaagtagtagtatttgatagggttggagtataggttatagtgtagtattttcgagtttattagtacgatggttatatggttttgagttaggtgcgtttggatgttttttatatttattgtgttgtgggcgggaggggggttagttggtgttgttgggtttttattttttattttttaaatggatttttgtttgtgtttgtttttttgttataaagtttggggatcggttttttttttttttgttttgaattttttgttttgttattgtggtttaggtttagtttagagttaagtaggagatcggtggggggggtgtgtgtgtgtgtttgaatgtgtataaagatgagttggttttgttaggttttttacggggagagtatttagttttaggtgggtttagttaagggttattagagtagtatatagaaattatttttttattgtattttagtttggttagtgaattttttttgtttagttttgttttttttttattttaaattatgtgtggtttatattgaaaattgttagttaagtatggtttagatatttttaaaattaaatgtttttttgaaagagttattttattttttttttaaggtttttggtggtagaaggggttgtttaggaagggttgggttatattgtttttaggggagttttagtttagtaatgatatttatttggagttttttttattggtagaaggtattgttttattttgtgttttttattaggtagtaaatttaaatgaaaatttagagtagggttgggtatagtggtttatatttgtaattttagtgttttgggaggttaaagcggaaggatcgtttgagattaggaattagagattagtttgggtaatatagtagtattttgtttttataaaaatatttaaaaatttattaggcgtggggcgtggtggtatgagattgtggttttagttattcgggagattgaggtaagaagattatttaagtttggggttgtagtagtgagttgtattgtaatattgcgttatagtattatagtttgtatgatagattaagattttgttttttaaaaaaaaaaaaaagaaaagaaaagaaaatatttagagggatagagggtagatggggttgtgggtagggggagttttaggttaggggtttttgtatttttgttggaggggttgtttattt

SEQ ID NO: 2328 - DNA, 2353 bp, Artificial Sequence
  chemically treated genomic DNA (Homo sapiens)
gggtgagtagtttttttagtaaagatgtaggagtttttggtttagagttttttttgtttatagttttatttgttttttgtttttttgggtgtttttttttttttttttttttttttttttaagagatagggttttaatttgttatataggttgtagtgttgtggcgtaatattgtaatatagtttattgttatagttttaggtttaagtgatttttttgttttagtttttcgagtagttggaattataattttatattattacgttttacgtttggtaaatttttaaatgtttttgtaaagatagggtattgttgtgttgtttaggttggtttttaatttttagttttaagcgattttttcgttttggttttttaaagtattgggattataggtgtgagttattgtgtttagttttgttttaggtttttatttggatttgttgtttagtggaaggtataggatggggtagtgttttttgttagtgagggaggttttaggtagatgttattgttgaattggagtttttttggaagtaatgtggtttagttttttttgggtagttttttttgttattaggagttttagaaaaaaagtaaaatagtttttttagagaagtatttggttttgaaagtgtttgagttatgtttggttggtagtttttaatgtaaattatatatgatttagggtagaggagagatagggttgggtaaaaagaatttattaattaggttggggtgtagtaggaggatggtttttgtgtgttgttttagtggtttttgattggatttatttggagttgaatgtttttttcgtgaagggtttgatagagttagtttatttttgtgtatatttagatatatatatatattttttttatcggttttttgtttggttttaggttgagtttgggttatagtgatagagtagggagtttagggtaaagggaaaaggagtcgatttttaagttttgtaatagagaaataggtataagtagggatttatttgagggatggggaatgggggtttagtagtattagttgatttttttttcgtttatagtatagtgagtgtgaaggatatttaggcgtatttggtttagggttatgtggttatcgtgttggtgaattcgggggtgttgtattgtgatttgtgttttagttttgttaagtattgttgttttatttttagtggttattattgtttttgtcgtatttttgattattagggttattttatcgtgttgcgtggttataatcgggttattggttgtattttttataataatttagtttatgtcgatcgtgagtgttgggtggggtgggtgaggtagagtggtttatatttattgttttgtatgtttagtgtttatagtttttatttatttaatttagtgtggttagggtttttttttttattttttttttaaagtttttgttttttttgggtttttgttattgtggttattttttaggttatgtaggtaaatttgtcgtaaattgtgttagttttttttatattttggttattttttttttttatattataggttttacgttattgtttaggtttttgttttatttttttatgttgtttaggttgtattttttttttaattattaggatggtcggtatattttttagaaagaaaagttcggttagatttagtttttgttttagatttattttggtttgtttattgtttttcgggtatagggaagggttgttttgatttttatagattggatttatatagatagtttttggacgttttgattatatagatttatttcgtttatgtggtttggagtacgtttttgtttttttttgggtttttttttaattgttttattggggaggagttagagaaattttatgaagattaggatgggtaaggagggttttttgggggtggaggatttgagttgagaggaatggttatgtggatgggaaatagattttatttagtttttttgggtattgtgtcggtggtgtaggtgtttttttataatttattgatttcgttttgttttttttatttttagtaggaatgtgtagtattagtattagtaattttgaggaggttagaattagttatggtatagatgaggatattttttttgtttatttggatagttgatagtaggagtttggtgcgtttaggttttcggattttatttttattttagtcgggttcgtttaggatgttttggtttaggtttggggttgttggggttggaatgtggaattgtagttttagtttatttggtagagttttaggaattcggagattggtatagttgttttgtttgttagtgtcgtgtgttgttatgttatttattttaagtatttgtt

SEQ ID NO: 2329 - DNA, 2483 bp, Artificial Sequence
  chemically treated genomic DNA (Homo sapiens)
taggttttttatgtggttgttggttagaagtatatttgataaggtgtttcggttgttttggtcgtttttatatgaagtttgtttagttaaggtatttttaggggtttaatgagaagggaattgtggttgggtgatttcgaaggtgatgggaaagacgttgttttttatttataaagttgttagggttagttggggaaaagtagaggaaagggaaattataagaaagtagatttaaagaaatagaatttgaaagagttttttaggttgttgtttagaatatttggaattaagttaatgggtatggagggagagtagttgttaagttattttttggtacgagttttgagagtcgtttgagggagttggagtagacgtcgtgggattttttttttgagttattgtagtttttttttggagtcggttcggggtggcggtttaaatatggaaatgtggtttgaattttttttttagtaatcgttgttgggttttagtttttttttgtgaggcgggtagttgagcgaaatgaaattataatatttaattataatattgcgagtgttagatattgcgttgagttttgtatgtggatttttttaatttttaaaataattttagaggtggtaatgattgtatttattttatagatagaataattggttagagagggtgtgtgtgtgttatttaaggttacggagttagtaagggtatcgggtgagaatttgaatttagagttattggttttttaattatagcgtttttttgttgagtagggataagtatttatttttttagttttttttgtagttagggagttagaatattttgggatcggaaattgttgtttggatgattttagttagttatttcgtttcgtagacggggaaagtgagaattagagaaggtcggtgattggtttaaggttacgttgtgttttatattttttttttattttcggacgtttagttttttaatagttttagtatagagttggggaaaaatttttagagatatttttttgggaagatagttggaaggtagggttgagtcggggttatttgtgatttagcggtgaggtgatgaggtattgacgaaagtattgtattttttttttttgagaaacgttttggtattagatgagttttgggggagggaggagaggaatttggtagggatttggttataagttatttggagggtggcgtgaggatcggaaaagtcgttgttcgttttgtttggttttattttttgaatgaggttattgaatgtgtacgggaggtttagcgttgttttattttagtttgatggagaaattttattcgaaattttaaagtagggtagggatatttttattagatatttttgtagtttttgttttgtgggacgaagtaagggatgatgatatattcgtttgtttattcggaagtgagttttaggttattgtattagaagggtgataatttaatataagttattgttaagtaattttcgcgtgtttagtatttatatttttttgttttattttgattattatattgtataggagttattatttttatttttcgtttttatttatagatgaggatatcgagatttagagagttttttgttttgttttgttttttgagatggagttttgttttgttatttaggttggagtgtaatggtacgattttagtttattgtaatttttgttttttgggtttaagagatttttttgttttagttttttgagtagttgggattataggtatttgttattatatttagttaattttgtattagagatggggttttattatgttggttaggttggtttttaatttttgatttcgtgatttatttgttttagttttttaaagtgttgggattataggtatgagttatcgcgtttggtttgttttattttttgttttgtttgtttgttttgttttgtttttagagatagggtttggttttgttttttaggttagggtgtagtggtgcgattatagtttattgtagttttaaatttttgggtttaagtaattttttcgttttagtttattaggaattggaattataaatgtatgttattatttttagttaatattttttttttttggaaaaatgaagttttattatgttgtttaggttggttttaaatttttgggtttaagtgatttttttgtagtgttgggattataggtatgagttattttgttcggttaattttagagagttttgatgaagttataaaattttgattatggagttagaatttaaatttaggtatgtgaggtttgagtttaggtttttattagggttattgtgttgtaattgttattattttttggtattttaagtgatattcgagtattatttaagggaaatggtttatatttcggtaatttttttattcgttttatttttttttttgaattagggatttcggtagagatagagttttagtagtttttattcgttttttcgtgtcggttttgttt

SEQ ID NO: 2330 - DNA, 2483 bp, Artificial Sequence
  chemically treated genomic DNA (Homo sapiens)
gagtaaggtcgatacgaggggacgggtggaggttgttggggttttgtttttgtcgaagtttttaatttagagaagaaagtggggcgggtgggggaattgtcgggatatgggttattttttttgaatgatgttcgggtgttatttgaggtgttaggaagtggtggtagttgtagtatagtggttttggtggaagtttgggtttagattttatatatttagatttgagttttggttttatggttagaattttgtaattttattaaaattttttgagattggtcgggtagagtggtttatgtttgtaattttagtattgtaggaggattatttgagtttaggagtttgagattagtttgggtaatatagtgagattttatttttttaaaaaggaaaaatattagttggggatggtggtatgtatttgtagttttagtttttggtaggttgaggcgagaggattgtttgagtttaggagtttgaggttatagtgagttatggtcgtattattgtattttaatttggaaaataaagttagattttatttttgaaaataaaataaaataaataaataaaataaaaaataaaataggttaggcgcggtggtttatgtttgtaattttagtattttgggaggttgaggtaggtggattacgaggttaggagttggagattagtttggttaatatggtgaaattttatttttaatataaaattagttgggtgtggtggtaggtgtttgtagttttagttatttaggaggttgaggtaagggaattttttgaatttaggaggtagaggttgtagtgagttgagatcgtgttattgtattttagtttgggtgatagagtaagattttattttaaaaaataaaataaaataaaaaattttttgggtttcggtgtttttatttgtaaatggaggcggggggtgagaataatggtttttgtgtagtgtagtggttagaatgaagtaagaaaatgtgaatattgagtacgcgagagttgtttagtaatgatttgtgttaggttgttatttttttgatgtaatgatttgagatttattttcgggtgggtaggcgagtgtgttattattttttgtttcgttttataggataaaggttgtaaaagtatttggtgggaatgtttttgttttgttttgggatttcgggtaggatttttttattaggttggagtggggtagcgttgagtttttcgtgtatatttagtgattttatttaggggatgagattaaatagaacgggtagcggttttttcggtttttacgttattttttagatggtttataattagatttttgttaaatttttttttttttttttttaagatttatttgatgttaaagcgttttttaaaagggggaaatatagtattttcgttagtattttattattttatcgttgggttataaatgatttcggtttagttttgttttttagttgtttttttaaggggatgtttttgaagatttttttttagttttgtgttggggttgttggggagttggacgttcgggaatgagaggaggatatgggatataacgtgattttgggttagttatcggttttttttggtttttatttttttcgtttgcgaaacgaggtagttggttgaggttatttaggtagtagttttcggttttagggtgttttggttttttgattgtagggagagttgggaagatgagtatttgtttttgtttagtaggagagcgttgtggttaggaagttagtggttttgggtttaaatttttattcggtgtttttgttggtttcgtgattttaggtaatatatatatattttttttgattagttattttatttgtaaagtgggtgtaattattgttatttttggagttgttttaaggattaagaggatttatatgtagaatttagcgtagtgtttgatattcgtaatattataattaaatattataattttatttcgtttaattgttcgttttatagagagaaattgaggtttagtagcggttgttgggaagaggatttagattatatttttatgtttgagtcgttatttcgggtcggttttaggaggaagttgtaataatttaggggaaaagttttacggcgtttgttttagtttttttaggcggtttttagagttcgtgttaagagatggtttggtagttgttttttttttatgtttattagtttagttttagatgttttaggtagtagtttggggagtttttttaggttttgtttttttggatttatttttttgtagttttttttttttttgtttttttttaattggttttggtagttttataaatgaaaaataacgttttttttattattttcgaaattatttaattatagttttttttttattagatttttggaaatgttttggttagatagattttatgtagggacggttaggatagtcgggatattttattaaatgtgtttttgattagtaattatatgaaaggttta

SEQ ID NO: 2331 - DNA, 2498 bp, Artificial Sequence
  chemically treated genomic DNA (Homo sapiens)
aattgttttttttattggttaggaaaagaatattttatagggaattcgataggttaatttataatagtgttaggttgtaatgttattttttaagaattttttttagtaaatatttgttatttttttaaagtaattgggagttgttgagtgtggaagcgaaaattaagttaagaagttttgttatttgggtgagtttagtttttataaaagttttgttggatgtgttttaaattgttcggtgtattttagttttttttcgtagggattcggagaaattgcgttattgttgttttatagagaaataattttttaatatttttttcgtcgttattttttttaagattttaaattgaaaatattttttttgacggtttttgttattatgtttggacgttttaattttaataaaacgaaataatagtgttaagttttttgagttaaattcgatattatagaggtagggattttaggatattagaattttattataatataaatgaaatataaagttttttatgtttaatagtgtattttagaaaattttgtttgagtgaattagttttgtattttataatgaaacgaggaattattgagagatatttaggtaacggattttaaatgagtgaataaggaagggaaaaattttaggaaaatgtagaaaaaagtagcggagattttggaaaaaaaattttaaagtattttttaacgtaaatatattcgattttttatagttaaataggataatagattagtttattaagttaaatgattaatgtttttgtaggttatggtttacgtgaaatattaaagaaatttgtaacggaaaacgatttgtttgaaagagttagttttttatttaaatttattaattagaattttgtattgaaaaaataaattaatcgtgaatttttacggttattttcggaatttagtaatcgattattaatagggatcgtttataatttaattagagtgattttgtttttatatagaggggtaaattaatttttttaatttatttattttgtagatgaattatggcgcgtattaagtagacggttcgtaaatttataggcggtaaagtatcgcgtaaatagttggttattaaggtagttcgtaagagcgtttcggttacgggcggcgtgaagaagttttatcgttatcgttttggtatcgtggttttgcgcgagattcgtcgttattagaagtttatcgagtttttaattcggaagttgtcgttttagcgtttggtgcgagaaatagtttaggattttaagatcgatttgcgtttttagagtttcgcggtgatggcgttgtaggaggtttgcgaggtttatttggtggggtttttcgaggatattaatttgtgcgttatttatgttaaacgcgtgattattatgtttaaagatatttagtttgttcgtcgtattcgtggggagagggcgtgaattgttttgagtataaattttaaatttaaaggttttttttagagttaattattttgttcgtgaaaagggttgtaattttttgagacgtattagattattaaattgtattgatttaaatagatatttgaaatagtggtatttagttttttcgatgttttatttaaatttttaaatttaagcgtttttttaggttttcgtttagggttgggtttttttacgttgttttttattggtttagttggttttgttttgttgtttaggttttttgttgtttttttgtatattgttttcgttttttaaatttttggttatttaattgtattttgtttaatttatttttttgttttttggtttaacgtttttttatgtggtggtttgtattttaggttttaattgtataggtttttaacgttttggttttgtttttttttgatgtttatttgattttgttcgaggggttagcgtttttgatttgtattaggttgttttattttattagtgttttgagatttagttatttgtcggcgacggtcggtgttttgggtgcggttaacgttattttttgtgcgtttgatattggtttaaggttaaggttattagttggaatatttagattcgtggtattaatatatagtttttgtagatttgatagttttgtataggttttaaattgtaggagttaaagtaacgaaggtgtagatgggtgtgttttaaatttgagtgcgaaaggaaaatgtagaaattatgagtttttttaattttttagttgatattttttgtttgtttttttttttttttatttatttatttatttatttatttatttatttatttatttattttgagacggagtttcgtttttgttgtttaggttggagtgtattggcgcgatttcggtttatcgtaattttcgtttttcgggtttaagcgatttttttgttttagtttttcgagtagttgggattataggtatgagttatttcgttcggtttttcggttgatattttaaaagaattttttaattttagtaaatattttgttttaattaaa

SEQ ID NO: 2332 - DNA, 2498 bp, Artificial Sequence
  chemically treated genomic DNA (Homo sapiens)
tttgattaagatagggtatttattaaagttgaaaagtttttttaagatattagtcggaaggtcgggcgaggtggtttatgtttgtaattttagttattcggaaggttgaggtaggagaatcgtttgaattcgggaggcggaggttgcggtgagtcgagatcgcgttaatgtattttagtttgggtaataagggcgaaatttcgttttaaaataaataaataaataaataaataaataaataaataaataaataagaaaagaaaaaagtaaataaaagatattaattggaaagttgaaaaggtttatgatttttgtatttttttttcgtatttaggtttgagatatatttatttgtattttcgttgttttgatttttgtagtttagaatttatgtaaggttgttaagtttgtaagagttgtgtgttagtgttacgggtttaggtgttttagttaataattttagttttagattagtattaggcgtatagagagtaacgttgatcgtatttaaggtatcgatcgtcgtcggtaagtagttgggttttaaaatattagtggagtaaggtagtttgatgtagattaaaagcgttggtttttcgggtaaggttaaataaatattaaggaaaggtaaaattaaggcgttgaaagtttatgtagttaagatttaaaatgtaggttattatatgaaagagcgttgagttagaaaataagaggatgggttaagtagggtataattaagtggttaggagtttagaaaacgagaataatgtataagaaagtagtagagggtttgaatagtaaaataaagttagttaaattaatggagaatagcgtagggaggtttagttttaggcgaaaatttgagggagcgtttaaatttggaaatttaaatgaagtatcgagggaattgaatgttattattttaaatgtttatttggattagtgtagtttagtggtttaatgcgttttaaaggattatagttttttttacggataaagtggttggttttgagaagagtttttggatttaaggtttgtatttaaaataatttacgttttttttttacgaatgcggcgggtaagttggatgtttttaggtatgatggttacgcgtttggtatgaatagcgtataggttggtgttttcgaaaagttttattaagtaggtttcgtaggttttttgtagcgttattatcgcggaattttggaagcgtaggtcggttttgaagttttgagttatttttcgtattaggcgttgaaacggtagttttcggattagaagttcggtagatttttggtagcgacggatttcgcgtagagttacggtgttagggcggtagcgatggggtttttttacgtcgttcgtggtcggagcgtttttgcgagttgttttagtggttagttgtttgcgcggtgttttatcgtttgtggatttacgagtcgtttgtttagtacgcgttatagtttatttgtaaagtaaatgagttaggaagattggtttgtttttttatataggaatagaattattttgattggattgtggacgatttttgttagtgatcggttgttaaatttcggaagtggtcgtagagatttacgattggtttatttttttagtgtaagattttgattggtaaatttggatagagaattggtttttttaaataagtcgtttttcgttataggtttttttgatgttttacgtagattatgatttgtaaagatattgattatttaatttaatagattgatttgttattttgtttagttataaaaaatcgaatgtgtttgcgttagaaagtgttttagaattttttttttaaaattttcgttgtttttttttgtatttttttgaagttttttttttttttatttatttatttaaaattcgttgtttaagtattttttaatgatttttcgttttattatagagtataaggttaatttatttaaataaggttttttaagatatattgttaagtataaggaattttgtgttttatttgtgttatagtaaaattttaatattttggaatttttatttttgtaatatcgggtttgatttaaagaatttaatattattatttcgttttgttgaaattaaaacgtttagatataatggtaagagtcgttaaaaaaagtatttttaatttaaaattttgaaaaagatggcggcgaagagagtgttagaaggttgtttttttgtaagataataatggcgtagttttttcggatttttgcgggagagagttgaggtgtatcgaataatttaagatatatttaatagaatttttataggaattggatttatttaaataataggattttttaatttggttttcgtttttatatttaatagtttttaattattttgaaaaagtaataaatgtttattggaaaagatttttaaagaatgatattatagtttaatattattgtgaattaatttatcggattttttgtaaggtgttttttttttagttaataaaaagagtagtt

SEQ ID NO: 2333 - DNA, 2433 bp, Artificial Sequence
  chemically treated genomic DNA (Homo sapiens)
aagttttttgtattattgattgatgtcgggtaagtaggtgtgtattttagatagatattgttagtgttgtcgttagaatggtttaggtgaggtcgagtgttaaggggttggtggggaatttggttttttgtgtaagttttttttgtaagtgttggtagatagggtattatgtatttttggtgttgattataggtaagtatttgtttgtaggaggtttcgtttttggtttttttaatttataggtagggaattatttaataatgatttttttagttatatagtttggagaaagttgtttttttttaaaatattaaaaaatgatttataaatttaatagaaataattagagtagaattatttttatgaaatataggttttattggtaatttgagaatttatagagttgttttaattttaggatatagatagtaaataattgtttttgatattttttttaaatgtgtatatattttattttttagaatttattttttatttaggataatttataaggaattttaaaaatgtattgataaaatgatttaatttagtattattttaaaagaaaacgtaattttaattttttaaaaggggagtagtaggagaataaagggaaggggaagaaaaaggtatttatataaaatattatacgttggaaatgatgtttagtttttagaagaatattgtaagtttattttgtgtattttttttttttaaattttttatttttaaatgtttatttatttgttttttttagatatttcgtggatttttttttcgggttagtgtattttgtttttagtggttaaaatttatttttattataaaagaaagatgttaaattttatatttgggatagttaatatgggtttttaaatttaaatagttttttttagaaatagtaaaaaggaaaagattgtttttttttttttttaagatattattggtttgtttattattagaaggatgtttatttatgtaaaaaaaaaattaatttataggatgtaatttggagagtaggagaaagtaatttttattaaatttataaatttttttacgttagatgttagggattttttgaattgaggttgaatttttgtgttttagtggaataattattttagtcggtttaaattagtttatcgttaaatgtagtaaaaatgttggtaaaagttttattttttggtgcgtcgaataaaaggaagtaaaaatggattaaagtaatttttaagaggagtaaggttagaggtgcggaattgttttttatgtttacgttaatgagtttttttttggatttattttaagtttacggttattattatttgttttagttgagggttggatttggatagttttttgtttttattttttgtggttgaatttttgaaattttagggttcggtatttgcgtgggttgtttatatggttgagattgggagggtaattggggaagaggtttttttgtttttgtttggcgtagaaataagtaaatttttttgttagttgtattgtttttattatgaattttgttgtattgtttatatttgaaaaatattagtaataaattaattgtagttttaagtttgtgttatttgtagatagttttttttttgttttgatgtttattttaagattttgttataatttataggtcggattttgtgtttttattaaaagatagttttagagtttcgtggaagagatcgtattaggtattttaaattattgattttttaaagttgagttgatatggttttggtaatttttagattgtatcggtaaattgagttaggatttttataattttatagttgaaaagcggttttatataattgttaatttaagatttaatagaatgagaattaattatataagattgaaaaaaaattgatgagagaaatttttttcgggttatttgaaatgtagttgttttaaggttttgtttttagatcgtaagaagttttttttttttttttttgtgttatttgtaatttataataagtttttaaattttgtttttataaattagaatgaagtatttttaaattatatatgatttttattaatacgattttttttatttgaatttagaaatttttatttagtttttttatattttttggtaatatagttgtttgtataggtttagtaagaatttgtttttttttttgttaaaatataattggaagtattaattatgtaatgaaagttttgttttgaatgttttatttgagaataatgtttatttaacgaggtgtgataagttattttaaggaataaaggttggttgtatttacggaattaatgtttataatgtttttttaggaaatttgacgtaggtttagtttatagtgtttagttttatagttagtaaggaaagttatttttaggtaagtatttggaggtatttttttgaaatttttagaagaaagg

SEQ ID NO: 2334 - DNA, 2433 bp, Artificial Sequence
  chemically treated genomic DNA (Homo sapiens)
ttttttttttagaggttttagaaaaatatttttaagtatttgtttagaagtgattttttttattaattgtaagattggatattataaattggatttacgttaggttttttgagaggatattataggtattggtttcgtaagtatagttaatttttattttttaaaatggtttgttatatttcgttaaatgaatattatttttaaatagggtatttaaggtaaggtttttattgtataattgatgtttttagttgtattttggtaaaagggaggatagatttttattaaatttatgtaaataattatattgttaagaaatgtagagagattgggtaagagtttttgaatttaaataagaagaatcgtgttagtgagaattatatataatttaagaatattttattttggtttataaaagtagaatttaaaagtttattgtgaattatagatagtataagaagagaaagaaaaggttttttacgatttgggaatagaattttaaaataattgtattttaaataattcgaaaaaaattttttttattaatttttttttagttttgtgtaattaatttttattttattggattttgggttagtagttgtgtgaaatcgttttttagttatagagttatgggaattttgatttagtttatcggtatagtttgaaagttattaaaattatgttagtttagttttgaagagttaatagtttggagtatttaatgcggttttttttacgaggttttgagattgttttttgatgaagatataagattcggtttgtagattatagtagagttttaaagtaagtattaaagtaaaagaaaaattgtttataaataatatagatttgaggttatagttaatttattattggtattttttaaatgtggatagtgtagtaaggtttatgataagaataatgtaattgataaggaaatttatttgtttttgcgttaaataaagataaaaaaattttttttttagttgtttttttaattttagttatatagatagtttacgtaggtatcgagttttggggttttagggatttagttataggaagtgggggtaggaagttgtttaaatttagtttttagttaaagtaaataataatggtcgtaagtttaaaatagatttagggaggagtttattaacgtgaatatagaaagtagtttcgtatttttggttttattttttttggaaattgttttggtttatttttatttttttttattcgacgtattagaaaataagatttttattaatatttttattgtatttgacgatgaattaatttagatcggttaaaataattgttttattgggatataggaatttaattttagtttagaaaatttttgatatttgacgtaggaggatttataggtttagtggaaattgtttttttttgttttttagattgtattttgtgggttgattttttttttgtatgagtaaatatttttttaataatgaatagattaataatgttttaagagagaaaaagaataatttttttttttttgttgtttttggagagagttgtttgaatttggaaatttatgttggttgttttaaatatgagatttggtattttttttttgtggtggggatgggttttggttattgaaagtagaatgtattggttcggaagagaagtttacgagatgtttaagaaaggtaggtgagtggatatttagggatagaggatttaggaaaagaggatgtataaagtgagtttatagtgtttttttagaaattgagtattatttttagcgtatggtgttttgtgtggatgttttttttttttttttttttttgtttttttgttgttttttttttagaaagttagaattacgtttttttttaaaatgatgttagattagattattttattagtgtatttttaaaattttttatgaattgttttgggtgaaaggtagattttggaaaatagaatatatgtatatttaaaaaaaatattaagggtaattgtttgttgtttgtgttttagggttagaataattttgtgaatttttaaattattaatgggatttgtattttatgagaatgattttgttttaattatttttgttagatttgtgaattattttttaatattttaaaagaaagtagttttttttaagttgtgtgattagaaggattattattagatggttttttatttataaattgggagggttagggacggagttttttgtaggtaagtgtttgtttgtggttaatattaaaggtgtatggtgttttgtttgttagtatttgtagagggagtttatataggaaattaggttttttattagttttttagtattcggttttatttgggttattttgacggtagtattggtaatgtttatttgggatgtatatttgtttgttcggtattagttaataatataggagattt

SEQ ID NO: 2335 - DNA, 2461 bp, Artificial Sequence
  chemically treated genomic DNA (Homo sapiens)
attaatagtaatagtggttttaattttagataaattatttgttatttataattttatgaagaaaaatgttatgaaagataattatatatttgatttttgttattttataatttggtttatgtttttagatgtaagtaaaaatgtaaaataatatttgtattttttatttatatatattattttttatattttgtttttgtgaaaaatgttatattttaagtttatgattataagcgttaatgttgtgaattggaaattataatatattttattgtatattttattaattgtttttatttttttaataatcggaagttagaaaggtttgatttttagttaaaaagtaaagcgagattgagggaagtttagagacgttatgaaggaattggtgattagagttttttgttgtttatggaatttataagaataaagatagtcgtttttcggaattacgattttaatttaggatttgtggagtttattttaatttggtgttgttttggaaaaggttatgtcgaaaagaatttgtttttagagatttttaggaaagtagttaatttaaattgtttaattttgtgagattatttttggttggtagtaagaattttttgttatgtggggtttgtttgagagtgaagagtattcgtatatttattgtttttgaatttatatttgttggggtttatatgtatacgtatatattagtatttgggtttttatattcgttttttatattgatcgtgtgaattgatttataagtttttaagtgttttagttagattaatttagtttagttttgaaagaatagataggtaagatagattgttatattttattaagttaatttttaattttataattgaggttttaataggacgtttggtttattaaggttttttattttgtttaagagtaattaaatatcgttgttaattttattattaagattaagttgttgtttagcgatttttttttcggttgttttttcgttttggggtttttttagtttgtttatggttaggagtcgtttaaaaagttgtatttattttagttatattttgttatatttttaagtttgtggatgatttcgtttgagtttttagtagttttaaagttttgttaatagtagacggaggtattacgttgagttttgtggagagaaagttttgtattgtgtaagtgatttatttggtattagagagggggaggggaagagaaattttgatgggttttagggattttttatttatttattttttttcgggatttttttttggagggtttttgtaaatatagttgtttcgttacggtggaggattattaatagaaatttacgaaataaggttatgtttcgtggtattttgagttagtttcgtagcgtgatttattagttttttgaaaaaagaaatttgttaggatttgggttggaatcgtaagatgtaaagatgttaagttgaaaaatttagggtgggtttaaatttttaattttttagtttcgatttttattttgggaaaattattttagtgtaaatatttttttttatatttagtatatttgtgtaagaaaaattattttattatttaatattaataatatttattttgaattttaattttgaaaattatagaattttttaaatgttgtaaatagttgatacgggtgttttttttttgtttttaaaggaattgtttttgtaattattgagtagggtgaagttgaattttttttgtagtaaataggagagtgtgtaatgagatattttaattaaaaatattaattatatttagattaattaataatagaaaatttttaggatatttttaatgttttaaaaataaaaaagtttttattttttgaagttgttaggtttttattttagttttgagtataaataaatgtttgatatatggtttaagttaaattttaaaatgtagtaaaaatagtgtttgtatatttggtaggaatttaaattagtttaggttagtgtttttttttgtttaaagaagagtttttgtatttgtattgagttaggaaaataatataggaaaatatggggaataatacggaatattgtaagttttagtattcggttggttaaagaataatgtttggggtaattttgaaattatcgtttaggttgtagtttgggtttgtataacgttttggaggattgtgagtaagatagaaagtatcgattgtattgttgtaaggaaattgtttttttttttttaaagtttttattttgtaaattatttttttttagtaaaagtatattttatttgttaattttttttttgttattaatttttttaattatttttttttattattgtagaatggtttttggaataaagtagtattttaaagttttttttattaaaagtttgtttttttttttttttaaagaggtagtgtgggggtaattttttttttttttttttttttttgtgtttttttttt

SEQ ID NO: 2336 - DNA, 2461 bp, Artificial Sequence
  chemically treated genomic DNA (Homo sapiens)
aaaaaaaaaatataaaaaaagaaaggaagaaagaaaattatttttatattgtttttttaaagggggggaggggtaaatttttagtgggaaaggttttaaaatgttgttttgttttaaaggttattttgtaatgatgaagggggatgattgaaaaggttagtagtaggggaagagttaataagtaagatgtgtttttgttaagagggggtgatttgtaaggtgagagttttagaagggggaaggtaatttttttataataatgtaatcggtattttttgttttgtttatagttttttaagacgttatgtaaatttaaattgtagtttgggcggtaattttagagttgttttaaatattattttttggttagtcgggtattggagtttataatatttcgtgttgttttttatgtttttttgtgttatttttttagtttagtgtaaatgtagaaatttttttttgggtagaaagagatattgatttgaattggtttaaatttttgttaaatatgtaggtattgtttttgttatattttggaatttggtttagattatatgttaggtatttatttgtatttagaattagaatggagatttaataattttaaaaaataaaagtttttttgtttttaaagtattaagaatgttttgaaagttttttattattaattaatttgaatatgattaatgtttttagttaagatattttattatatatttttttgtttattgtaggggaaatttagttttattttgtttagtaattataaaaataatttttttgaaagtaagggaagaatattcgtgttagttatttatagtatttaaaaaattttgtggtttttagaattaaggtttaaagtgaatgttattaatgttgagtaataaagtagttttttttgtatagatatattaaatgtaaaaagaaatgtttatattggaatgatttttttagggtgggaatcggggttggggagttggaggtttgggtttattttaggttttttaatttgatatttttatattttacggttttagtttaggttttagtagatttttttttttagagagttggtaaattacgttacgggattgatttagagtgttacggggtatggttttgtttcgtgggtttttgttgatgattttttatcgtggcggggtaattgtgtttgtaagagttttttaggagaggatttcggggagaagtagatggatgaggagtttttggagtttattaggatttttttttttttttttttttttggtgttaaatgggttatttgtatagtgtaaagttttttttttatagagtttagcgtgatattttcgtttgttgttggtaaagttttaagattgttgggaatttagacgaaattatttataggtttggaggtgtggtagggtgtaattagaatgagtgtaattttttaaacggtttttaattataggtaggttgggaaggttttaagacggaagggtagtcgaggggagggtcgttgaatagtagtttgattttaatgatagaattggtagcggtgtttggttgtttttgaatagagtaaaagattttaataggttagacgttttattaaaattttaattgtgaaattagaaattaatttgatggaatgtgatagtttattttatttatttgtttttttagagttggattaaattggtttaattaggatatttgaaggtttgtgaattagtttatacgattagtgtgaaaagcgggtatgaagatttagatgttggtgtgtacgtgtgtatataagttttaataggtatgaatttagaagtagtggatatgcgggtattttttatttttaagtaagttttatatgatagaaagtttttgttattagttaggaatgattttatagggttgagtagtttgaattggttatttttttgaaaatttttagaaataaatttttttcgatatagttttttttagaatagtattaaattagagtaaattttataaattttgaattagaatcgtaatttcgaaaagcggttatttttatttttgtgggttttataagtagtaagggattttggttattagtttttttatggcgtttttgaattttttttaatttcgttttgttttttagttagaaattaagtttttttggttttcgattgttggagaagtggaaatagttaatggagtatgtaatgaggtatgttgtaatttttaatttatagtattaacgtttgtagttatgaatttgaaatgtagtattttttatagaggtaaagtgtggaaagtagtatatatgagtaaggagtataaatgttgttttgtatttttgtttatatttgagagtataggttaaattatagagtgataaaagttagatatataattgttttttatagtatttttttttatagaattataaatgataaatgatttatttaaaattaaaattattgttattattaat

SEQ ID NO: 2337 - DNA, 2440 bp, Artificial Sequence
  chemically treated genomic DNA (Homo sapiens)
tttttttttttagtaatttttttattttttttttgtaggtataattttgatagtattttttttagaatttcgttaaataagcggattggaataatatttagattatagatttttacgtaattttttttttttaagaaatgaattatagtttttatttgggttcggtttttttgtatttagggtttttgttattttgtattgttagaaagtaaaattttagtttgttaaggatggggaaggggttatttttgagtatttagggtgtaggtttttatttgttttttaaatagaattttagttaatatttatggatttttagttgtatattttatttttataagtatttaatgatttatgttttaaggatttttagaattttagtgttatttggtttaattttaaggtttttttaaaatagtttggggtttttattgtgttatttattatttatttttttgttttttgatttttttattaaaataaaattttgttatttttttttttttttttattaattttttaaacgtgttttttatttttttttaaaatacgtttattgttaattttggaagaaaaacgtggtaaatggtatgtttttatttttttatattgatttggaattttttttttgttttaatttggtttagtttatatttatatatattaaggttagatttaaagataaaattaattattttaattttattagttttggttaataattttgtttttatgtttttttgatttagttagtttttatgtaagttaaggtggttgagtattataagtttttattattataatgattttatatttaaatattggataggaaaaattgattatgggtttggtatttatttatacggttttatagaaagagagaaaaaaatatttttagatagtggtattaaaaaaggttgatatatattttttattattttttttttttttttgtttgtaagttattaatagttatatttaaggataaaatatttttatgtatttataattttttattagtaaagatttgattattaaataaaggtagtttgattagattacggttttatgatgggtttgagaggggttttgttttatattttggttgtatttttagtggggtttatttttaattgttttatgatttggggagatatattgttgattttattgtttagagttttttttttttttttttttgtggaatgagtgatgttttatacggaagattaagatatataataataaaatagaaatttttacgtttagttgtagttagatttatggttaagtttatggagattatttagggttgggaatatacgtttaagaacgtttttgtagttataattgtgtatggagtgagatgttgttatagattatggatagtaaatatttttgaggttgtgtgttattttttgtaggtttatgagtttttttgatttaagtaggaaggtgtttgttagtaatgtaaataaaatttagtttaatttttgatttttaatatttggaatatttatttttttggtaattgtgcggtttattgaatatttattattttagtggtttattgaagaaggattttggtttgaaaagagatcgttatgggaaaaaaaaaatttaatttagagtagttattattgagaatattaaaaggatttgtgatagtaatatttttttgattttatagttggtttgcgtggattgtgttttagtgagagtttgtttttttaatgtcgtgagaaaagatatagattttttttttggattttattataatataagattttttttattgtatattttaaagattttttaattcgaaaatttagttttaattttttatttttttgtatgtttttgaatggaatttaaataatttaatatcgttttttttttttttttttttttagaaatggatgagagatttaagtatatttttttgatgttttgtggatatttttgtatttttatattttttattaaatataaaataaagagttttggttttgaatataagagaatataagttgttaagattattaataattcgttaatggttataggtattttggatttttttttatagtttttggggatatatttttttttaaatgttgggtagaatagtaagtgtggttaaggttgatttgagaatgaagttggaattggatgtagtagttttataatgatattaaggtttaaggttagggaagtggtaagatttttatttagtagagttaattataagttataaaagtatttaggagtagatttgagtgaagtacgtgtttagttagttattgaaataaaagtatgtagtttgttttaagtttttggtaattattttagggttgattgattaggtatttttgtgtgtatgtaattgtttttttttatttaagaataaattataaggaatagatattatatagttttt

SEQ ID NO: 2338 - DNA, 2440 bp, Artificial Sequence
  chemically treated genomic DNA (Homo sapiens)
agaagttatatagtatttgttttttgtagtttatttttaaatggagaaaagtaattatatatatatagaaatatttagttaattagttttgaagtagttattaggaatttgagataagttatatatttttgttttaataattaattgaatacgtgttttatttaggtttgtttttagatatttttatggtttatagttaattttgttgggtaaaggttttgttatttttttgattttggattttgatgttattgtgaaattgttgtatttaattttaattttatttttaagttagttttaattatatttattgttttatttagtatttgagaaagagtgtgtttttagaagttatgggaaaagatttagaatgtttgtgattattaacgagttgttaatggttttaataatttatatttttttgtatttagaattaaagttttttgttttatgtttaatgaagaatataaaaatgtaaaaatgtttataggatattaaaaaagtatatttgaattttttatttatttttgaaagagaaaaagaaaaaaaaacgatgttgaattgtttggattttatttagaggtatatagagaaataaaaagttgaaattaagttttcggattaaagagtttttaaagtgtataataaaaaaaattttgtgttgtaataaggtttaaaggaagaatttatgtttttttttacggtattaggaaaataggtttttattagagtataatttacgtagattagttgtggagttaaagggatattgttattataaatttttttggtatttttagtgataattattttgaattagatttttttttttttatggcggtttttttttaagttaaaatttttttttagtggattattggaatggtgagtgtttagtgaatcgtataattgttaaagagataaatattttagatgttgggaattagaggttaaattaggttttgtttgtattattaatagatatttttttatttaaattagaaagatttatgggtttataggaagtgatatataattttagaggtatttattgtttatagtttgtaatagtattttattttatgtatagttgtaattgtagagacgtttttggacgtgtgtttttagttttaagtaatttttataaatttaattataaatttaattatagttaaacgtgagagtttttgttttgttattatatattttaatttttcgtgtggaatattatttattttataagaaaaaggagaagaaaggttttgaataataaaattagtaatgtgtttttttaaattatgaaatagttaagaatgagttttattgaaaatataattagaatgtgaaataaagttttttttaagtttattataaaatcgtggtttggttaagttgtttttgtttagtagttaggtttttgttagtgaaaagttgtaaatgtataggaatgttttatttttgggtgtgattgttagtagtttgtaaataaggaaggagaggagatgataaaaaatatatattaattttttttgatattattatttaaaagtgtttttttttttttttttgtaaaatcgtatagatagatgttaagtttataattaattttttttatttagtgtttgaatatgaaattattatagtaatagaaatttataatatttaattattttgatttatataaaaattgattaagttagaaaaatatagaaataaaattattgattaaagttggtaaaattaaaataattgattttatttttaagtttagttttggtgtatgtggatataggttgaattaaattaagatagagaaggaattttagattaatgtggaggaatgaaggtatgttatttattacgttttttttttaaaattggtagtaaacgtattttaaaagaagataaaaagtacgtttaagagattaatgaaaaagggagaggagataataggattttgttttaataagaaaattaagaagtagaaggatgagtagtaaatgatatagtagaaattttagattattttaagaaaattttaaaattgagttaaataatattaggattttggggatttttgaaatataaattattaagtatttatggaagtagagtatatagttaaaagtttataggtattagttaaaattttgtttaagaaataaatagagatttatattttaggtgtttagagatagttttttttttatttttgatagattaaaattttattttttaataatatagaataataaaaattttggatgtaagaaaatcgggtttagataagagttgtgatttattttttaaaaaaagaaggttacgtgaaagtttatagtttgaatattattttagttcgtttatttggcgaagttttagaaagaatgttattagggttatgtttgtaagaagaagatgggagaattattaggggagaaaa

SEQ ID NO: 2339 - DNA, 2334 bp, Artificial Sequence
  chemically treated genomic DNA (Homo sapiens)
attatatttttatattttatagttgaagaatttaaagttaaaaaagagtgagtagtttaatattatttagagttagttaataaagattttttttagtattttttataaagtattttatagtaaggagaaaggttttggtttttaatatagttgtatgaaaattttagttttattattttaaaggtattattttttattagtagattttttttgtgtgtaatggggttatttggataaaataaaatcgatttttatttttattattaaattgggattgatgtgtgagtataaaattttagggtaatgtagtttttaattttttttatttttttatttttgtttttttttgttttagttaatcgaaaaagggagttatttgtatgttgttggagggagattatttttaattgttttggtttattaatagtagatgtatagtaaagtttttaaagaaatatatgtttttaggattttatagagttttaagagtagtattttatgggtttattttggattttaggtgattaatggatgtggacgaaatttttaatttttttaattgtttgtttttgtttttttagttttttttttaagtttttttaattagttaaatttaaagtttttttgaattatttaatgttatataaaagtatttgttttaggtagagaaagagaagtaatttagtttcggggtaattgatttattatatgtagggaaattttttgttagttttttaaaagttatttttttttttgttatttggaaagtatagtagttttttattttattttttattgatggaaaatagatttgtttgacgtttagaagaagttttatttgtattggcgttttatttatttatttatttttttttttggtagattattataattattggttgtgtatatttatattggatttggttattgtattatattgtatttgtaaaaatgtttttttttagatatggtaagaaaagtttttataagttgaattaatattatttgtttttttaaaatgttttaattgtattggtaaaaggagtattttttattttttaaagtttattgtaattggattgttagagtagtattattaaaaggataatgacggtgttatttttaaatagatttttttaaaataattgtttttttttattgagtgttggtacggtattcgtgaaattttgatggggttagcgggttttttgatgttgtttattagaagattgttttttttcgatttattttttttttttttgttttttttttatttatatttacgttggttttatttagttattgtaatttgtttttgtatttgaattaagttaattttttttaatgatataaataggtagtttttttattgggttagtgtttgttgtttttttattttgttttgatggaaatttttttattgtaggagttaaatattgattatgagagtgttattattttagaaattgataggttgattatgaaattataggtttgtatattttgttttttattttgggttattttaagaagttggtaatgattggtatgaatgggggtatttgatttttgttaggagggagtggattttaggttttttaggttgtttgttagggttgttattttggagttggagagggaaatgagaagtttggtttgtatgaggtttgattgaggttgtggatatgaagtaatagggaagcgaagtttatgtttttgataaaagaagatattagaaagggaggtttgaaatattaagttaaaggtgtttggtagagaattgtagagaagtaagatagagaaaagtagagagtttaaagagattttcggagacgaatgtatgtagatagagaggattttatagttatttattgtttttattttgggtaaggagaaagttgttttaagagttaatttatataggagaaaaataggagtatatatttattgttttattttatgtttaatttaaattgaggtagtttataaattaatatagaatagatttaatttttgtgttaatattgtagtttagtaatggtatatatatagttagaaagtggaaagtattagtttaatttttttgacgtcgggttttagtttagttaatgttattgaattgatagattatttttttaaatttgtttaaagttattaaattaatggtttttataatgtaatataaagttatttttttttttttttcgtttagaatgatattttaaatatagatggagtttttgaatatttggtttttttttaagtgatgtatggaggacggatgaaggaaaattgaaatatttttttgttatgttatttttttaatttatttgt

SEQ ID NO: 2340 - DNA, 2334 bp, Artificial Sequence
  chemically treated genomic DNA (Homo sapiens)
ataaatgggttgaaaaggtaatatagtagaaaagtgttttaatttttttttattcgttttttatgtattatttagggagaaattaagtgtttagagattttatttgtatttagaatattattttaaacggagagaaggagggaataattttatgttatattatagaaattattagtttaataattttagataggtttgaagaggtggtttgttaatttaatggtattagttaaattgaagttcgacgttaaaaaaattaagttaatgttttttattttttgattgtatgtatattattattgagttatagtgttggtatagagattaagtttattttgtgttagtttataggttgttttagtttgagttgggtataaaataaaataatgaatatgtatttttattttttttttgtataaattgatttttgaaatagttttttttttgtttagagtaagggtagtgggtggttatgaaattttttttatttgtatgtattcgttttcggaaatttttttaagttttttatttttttttgttttgtttttttgtagttttttgttagatatttttagtttagtgttttagatttttttttttagtgtttttttttattagagatatgggtttcgtttttttgttgttttatatttatagttttaattaagttttatataaattaggttttttatttttttttttagttttagagtaatagttttggtaggtagtttgaggagtttggggtttatttttttttagtaggggttagatatttttatttatgttagttattgttaattttttaggataatttaagataagaagtagaatatgtagatttgtgattttatggttaatttgttaatttttgagatggtgatatttttatagttaatgtttgatttttataataaaaagatttttattaagataaaataaagaagtagtaaatattggtttaatgagaaagttatttgtttatattattaaaaaaaattggtttgatttaggtgtaaagataagttgtagtagttaaataaaattaacgtgagtgtagatgaggaaaaaataaaaggagagagagtggatcggaaagagataattttttggtgggtaatattaaagaattcgttgattttattagaattttacgagtgtcgtgttagtatttagtaaggaaaagtaattattttaagaaaatttatttgagggtaatatcgttattatttttttaatggtattgttttaataatttagttatagtaggttttaaaaaataagaagtgttttttttgttaatataattaaggtattttggagaggtagatggtattagtttagtttatagaggttttttttgttatgtttagaaaagaatatttttgtaagtgtagtatggtgtagtagttaagtttaatataggtgtgtatagttaatgattgtagtggtttattaagaaaaaaaataaataaataaataaaacgttagtgtaaatggagttttttttaggcgttagataaatttgttttttattagtggagaatgaagtggaaaattgttgtgttttttaaataataagagaagagataatttttggaaaattaataagaagtttttttgtatgtaataaattagttgtttcgaaattgggttatttttttttttttgtttagggtaagtatttttgtgtgatattaggtgatttaaaagggttttaagtttagttaattaaaggaatttggagagggagttggagaagtaggagtagataattgaaaaggttaaaggtttcgtttatatttattaattatttgaaatttaaaatgaatttatagaatattatttttgaaattttgtgaggttttgaaggtatgtgtttttttggaagttttgttatatatttgttattaataggttagaataattagaaatagtttttttttagtaatatgtaaataattttttttttcgattaattagggtagaaagaagtaaaagtagaaaagtgagagaaattgaaaattatattgttttaaaattttgtatttatatattaattttaatttggtggtaaaagtggagatcggttttgttttatttagataattttattatatataaaggaaatttattgataaggaatgatatttttgaagtggtagggttggaatttttatataattgtgttgaaaattaaaatttttttttttattgtaaaatgttttgtgaagggtgttgggggggatttttattaattaattttggatgatgttgagttatttatttttttttggttttagattttttagttgtaagatgtaaagatgtagt

SEQ ID NO: 2341 - DNA, 2308 bp, Artificial Sequence
  chemically treated genomic DNA (Homo sapiens)
tagtatgtattttaaggaaggaagaatagtaagggtaggaaaatagtgagtttttagggtatttggtgagtttgatataatatttgttgaataaatgaatgaatgattgatatttaaattttattgtatatatataagtattttattgagaaaatgttagtgttttgtttggattagttttaatttgtttgattttgattgtagtttttttgatagtgaaacgaggattttattatttttaattatttatggttaaagttaataaattattaaaaatttttatttagtgaattattttaatttttttattgttaaaatttttattagagttgtgatttaaggtaattgggttgagatatgttattgttaattttttagttgtatgtaggttaatgttgtatttttgtggggaaataaataaagggtatagtggttaggagtaaaaggttttttgataattagtttttgaataatttagagttgattgtattatgtaagtgtattttttaagatagggaagatgaggattatgtgtatgttttggatttttgtgttagtgtttaaattatttttattttattgtaaattggttatgtgaaaatgttaataataataatattttttattaaaatttttagagtttatgaaatttatttatattgattattttatttaatatggtttttatataattttgggaaatagtatattagatattaaatttaaagagttgaagtttaaataggttaaatggtttttttaaggttatatggtttttaagtatttgagttaagattagtattaaggttttttgatttttaatttaaaattttttttaatgtaaattgttttttagtatatttttataaaatttttttagattgtattagaataataatgtttgttaatatattatttttagatattttaatgataggatatatattttttttttgttaaaagttatttttttaagtttatatttttggggatatttaatgagtttttttttaattttgagaatttgtggttttaaaagcgtggatggtttagtaggggtaaaattttagttttgttttatagtttttgtcgttatgaggcgagttgtttttttttgagggtattagagggttttatttagttaggtattgttttttaagtatgtgttttatgtgttggggtaggtttattattggattttatttatgttttggtagttagtgggtttagtggaatattcgtgattgggaatacggtgatattgtattgatttggatttttattttttttttttatagttgtatatagaattgtgggtgtagtttatttttgggtttggagaattgtttttttggttttgtttttttttttttttggagaaggggagttttcgtgttttggtggttattatagtattgattttgttttggttatatatgtgtgtatttattttttaattttgtgttgtttttttttttatagagatagtttttggtttttggtatggtttgtgatagtataggtattattatggtaatagacgtgttataaatataggataatagttttgtttttgttttttttttttttcgtttttatgtagtgaagggaattattatgatttttaaataataattatagatttttttgtagattttaggaaatgaatagaataaggttttgttatataggtaagttatgaagaaaatttataagaatattagaaaataataaaagtattgattaatattttttttttgtgtaaatatgtttttatttttttagtttgaataaatgtaaaaatttttttttttgttaatttaaaaaattatattatgaatataatttgaagtggtaaaaaatatgttagtaagaattttgaaagataggttaattaaacggtaattttgttgtaatttattttatgttagagattttagtatgggtttaattttttgagattttattcgaagatgattatgtttttaaagggtttgggtatggattgtaagaattgtgttgtagtgagtttttattaagatatttggttttttttggttttaattgagttttaaatttggttttttttaagtttgatgattgaggtaaagtatttagaagggattttgaatatatatttttgataaaggttttataatggtttttattgttttataagtgtaatagtttttggttgtattgattggttattaattttttgtagaggtagggtaggtttgggtttttttattttgttaatttttggttaaagtagttagggtagattttggtttagttgagatttaga

SEQ ID NO: 2342 - DNA, 2308 bp, Artificial Sequence
  chemically treated genomic DNA (Homo sapiens)
tttgagttttaattgggttagggtttattttggttattttgattagaagttgataaggtggggagatttaaatttgttttatttttgtagaaaattgatggttagttaatgtagttaagggttattatatttgtaaagtagtgaagattattataaggtttttgttaaagatatgtatttaaaattttttttgagtgttttattttaattattaaatttggagggaattaaatttaaagtttaattaaaattagagaaggttaaatattttaatgaagatttattatagtatagtttttataatttatgtttaagttttttaaaggtatgattattttcgaatgaagttttaaagggttgaatttatgttaaaatttttaatatgagatgaattatagtaaagttatcgtttaattaatttattttttaaaatttttgttgatatattttttgttattttagattatgtttatgatgtgattttttaaattagtaaagaaggaggtttttatatttgtttaaattgaaagaataaagatatgtttgtataaaaagaaagtgttggttaatatttttattattttttaatatttttataagttttttttatggtttgtttatatggtaaagttttattttgtttattttttagagtttgtaaaaaagtttgtgattattatttaaggattatggtgattttttttattgtatgggggcgggggagggggaaagtaaaagtaaagttattattttgtatttataatacgtttgttattatagtaatgtttgtgttgttataaattatattaagggttagaggttgtttttgtggggggaaaggtagtatagagttggaagatgaatgtatatatgtgtggttagagtagggttaatgttgtggtaattattaagatacgggagttttttttttttagagaaaagggagggtagggttagaagagtagttttttaggtttagaagtaagttatatttataattttgtatgtagttgtgagaaaggagagtggaaatttaagttaatgtagtattatcgtgtttttaattacgagtattttattgggtttattggttgttaagatatggatgggatttagtggtgagtttgttttagtatatgaaatatatgtttgggaaatagtgtttgattggatggagttttttggtatttttaaagagaagtaattcgttttatgacggtaagaattgtaaaataaagttaggattttatttttattgggttatttacgtttttagaattatagatttttagggttagggaagaatttattgagtgtttttaaaaatgtggatttgaaaaagtaatttttagtaggaagagagtgtatgttttgttattggggtatttggaagtagtatattaataggtattattattttgatataatttagggaaattttgtaggaatatgttaaaaggtaatttatattaaaaagaattttggattaggagttagaagattttagtattagttttggtttaagtatttagaagttatgtgattttgaaaaagttatttaatttatttgaattttagttttttaaatttaatatttaatatgttattttttagagttatatgaagattatattaaataaaataattaatgtgaataaattttataaattttaaaaattttaatgaaaggtattattattattagtatttttatatagttagtttataatgggataggaataatttgaatattaatataggaatttaaagtatatatatgatttttattttttttattttgagaggtgtatttgtatgatatagttaattttaaattatttaagggttgattattaaggggttttttgtttttagttattgtattttttatttgtttttttataggaatgtagtattaatttatatatagttagaaaattgatagtagtatattttaatttaattattttgaattataattttggtaaaagttttagtaatggaagagttaaaatgatttattagatggaagtttttgataatttgttgattttagttatggataattaagagtgatggaattttcgttttattattaaggaagttgtagttaaggttaaataggttgggattaatttagataaaatattagtatttttttagtgaaatgtttatatatgtgtaataagatttgaatattagttatttatttatttatttaataaatattgtgttaagtttattaaatattttgaaaatttattatttttttgtttttgttgtttttttttttttgaaatatatattg

SEQ ID NO: 2343 - DNA, 2496 bp, Artificial Sequence
  chemically treated genomic DNA (Homo sapiens)
attttgagttggttgtaaataaaatattttaagttatcgtttttttttttatttgattgagttagttattgtatagggaggtgatataaaataaaatttcgtgtttttgaagtcgagattttgggattgtattttatgtaaagttatttataagttttgattattttgagagaaaaatattatagtatttttaggaagttttatgtatttgttttaaagttaagtattattttttttttagttaaaaaaaaaaaaaagtttggaaaatagtgatatgttagtataaagggaatattgttttataataagaaggaatacgttatagatatatagtatggatgaatgttaaaaatattgtgagagaaaaatgtttgaataggagagtaattattgtttgattttatttttgtggaattttagaaaaggtaaaattaatttatggtaataggaagtagattagcgattgttaggggtgatggggattggaggaggttgattgtaaaagggtagaagggaattttttagggaaatatgaaatgttttatattttaattgtggtggtgtttatattggtgtaaatatatttgtttaaattcgtgtaagtatatgtttaaaatgggtgtagttttttgtatgtaagttatattttataaagttgatttgaatcgaaaaaaggggttagaaaaggttgtggttggaattttttgtgtaatttaaggttaaatagtttatttacgttagtttttatagtattgtaagttatgttttttgtgtttatatttttttagttatttttttattcgttattatttaggagattttgtattttatttgttttttttttagttttatgatttgagtaatagaagtttttggtttttaggaattttatagtttttgttagttataagtaagaatgtattttaaatttattttaaattattttttaagtaggggttttggtggttttttggaatggaggtgtggtggaagtttgagtgtgtgtgggaagaggttgggtgttttttagattattgtattatgtttttttatatttgtttaagtttttgtgcgaatattgaaataaagtgttatgaattttgtttttggtatttgtcggttatagttgtggtttcgggttgtatatttgttgtggttttagagtttttgagaagttattggttgggagggcgttaagaatggttggtgtacgtggtaattgagtgtttaaggggaggaggatgatttttagtgtatttattgttttttagtttttattttaattttgttataatttagagagacgtttttttggtgtgtttatagagagatggatgcgtgtttaggaatgtataatttagtgagtagtttgaatatttagatgttgggaatattgttgagtatttatttttaaagtttaagttttttatgtttagttagtgttagtttgtaagaaagaattagttgtttttaatggattatgttagttggatttggtataagtgtttttttttagaagggaggattatacgtttatagtaataagatgtttttttattttttagtttattaaaagattgtgaaatagggtgtgtagatattttaggtagtattattttttaaatagatgagtttgaaagagtgagaaaaggttgtgttaggttaattgggtttaaggaaagttaaataattggtgggagaaggaaaagtaaatattaatttttttttttgttgtgtattttttttttttttttttttttgagatggagtttcgttttggttggagtgtagtggtacgattttagtttattgtaatttttgttatttgggtttaagtgatttttttgttttagttttatgagtagttgggattataggtgtttgttattatatttagtttatttttatatttgtagtagagatggggttttattatgttggttaggttggtttttaatttttggttttaagtgatttttttgttttagttttttaaaatgttgggattataggtgtgagttattgaattcggtcgttttgttgtgtattttttttttttttttttttttttttttttttttttttttttttgagatgtagtttcgttttgttatttagtttggagtgtagtggtttaattttggtttattgtaatttttgttttttgggtttaagtgatttttttgttttagtttttcgagtagttgggattataggtatgtgttattataattagttaatttttgtatttttttagtagagatggagttttattattttggtagggttggttttgaacgtttgattttaggtgatttattcgtttcggttttttaaagttttggaattataggtgtgagttatcgtgatcggtttttgttgtgtattttttttggatattttttggttttgtgtttgtgtaaattttgaggttttttaaaattattaaagtagtgaggagaagatggtagaaagttgtgtgttgatatttttttt

SEQ ID NO: 2344 - DNA, 2496 bp, Artificial Sequence
  chemically treated genomic DNA (Homo sapiens)
aaaaagaatattagtatatagttttttgttattttttttttattgttttggtagttttaagaaattttaaagtttatataaatataaagttaaaagatgtttaaaagaaatatatagtaaaggtcggttacggtggtttatatttgtaattttaggattttgggaggtcgaggcgggtagattatttgaggttaggcgtttaagattaattttgttaagatggtgaaattttatttttattaaaaaggtataaaaattagttggttgtggtggtatatgtttgtaattttagttattcgggaggttgaggtaggagaattatttgaatttaggagatagaggttgtagtgagttaagattgagttattgtattttagattgggtgatagggcgagattatattttaaaaaaaaaaaaaaaaaaaaaagaagaagaaaagaaaagaaaaatatatagtaaggcggtcgggtttagtggtttatatttgtaattttagtattttgggaggttgaggtaggaggattatttgaggttaggagttagagattaatttggttaatatggtgaaattttatttttattataaatataaaaatgagttgggtatggtggtaggtatttgtaattttagttatttatgaggttgaagtaggagaattatttgaatttaggtggtagaggttatagtgagttaagatcgtgttattgtattttagttagagcgagattttattttaaaaaaaaaaagaaaaaagaaatatatagtaaaggaaaaaattaatatttattttttttttttttattaattatttagttttttttaagtttaattaatttgatataatttttttttatttttttaagtttatttatttaaaaaatagtattatttaaaatatttgtatattttattttataattttttgataaattaggaaataaaagaatattttgttattataaacgtgtaatttttttttttaagaaaaaatatttgtattaagtttagttaatatgatttattaagaataattagtttttttttataggttaatattgattagatatggagaatttgaattttaaaaataaatatttaataatatttttaatatttagatgtttaaattgtttattaaattatgtatttttaagtacgtatttatttttttgtggatatattaggaaaacgtttttttaaattataataggattgagataaagattggagagtaatgagtgtattaagaattatttttttttttttaagtatttaattattacgtgtattaattatttttagcgtttttttaattaatggttttttagagattttgaaattataataaatgtgtaattcgaagttatagttgtggtcgataaatgttagaagtaaaatttatgatattttattttagtattcgtatagaagtttggataggtgtgaggaagtatggtataatgatttgaggaatatttagtttttttttatatatatttaagtttttattatatttttattttagaaaattattagaatttttatttaaaaaataatttgaagtgaatttaaaatgtatttttgtttatgattaataagaattgtgaggtttttgaaagttaagaatttttattgtttaaattatggagttaggaggaaggtagatgagatgtaaagttttttaagtgatgacgaataaaggagtaattgaagaaatgtgaatataaagggtatagtttataatattgtaaaaattggcgtaaatggattatttggttttaagttatataaaaaattttaattatagttttttttaattttttttttcggtttaaattaattttatgaggtgtaatttatatataaaaaattgtatttattttaagtatatgtttatacgaatttgggtaaatatatttatattagtgtaagtattattataattaagatataaaatattttatatttttttgaaaagtttttttttgtttttttgtagttaattttttttaatttttattatttttggtaatcgttgatttgttttttgttgttataagttagttttgttttttttagaattttatagaaatggaattaaataatagttatttttttgtttaggtattttttttttataatgtttttgatatttatttatgttatgtatttgtggcgtgtttttttttattgtagagtagtattttttttgtattgatatgttattattttttaaatttttttttttttttaattaaaaagagggtggtgtttagttttaaaataaatatataaaattttttaaggatattgtaatattttttttttaaagtaattagaatttataagtaattttgtataaagtataattttaaaatttcggttttagaaatacgaagttttgttttgtgttatttttttatataataattggtttaattaaatggaaagaaaaacgataatttgagatgttttgtttatagttagtttaagat

SEQ ID NO: 2345 - DNA, 2472 bp, Artificial Sequence
  chemically treated genomic DNA (Homo sapiens)
taggtgtatttttgaggggtttatatggtttatatagtgggaattgatattttggatgtaatatatttattatatttgtgtaaattttttagagaaaatttaaagttagttaaaaaaatattaattaaatgggttattaaaatataataaattagttatgtttaattatatattttagaaaagattttatatttatagagatgagagtaggaatagttttaatataggtaaataatttttaaagtatataattttaatgtatagaaaaattaaaaattaattttaagtatgatattgaataagtattattttttataaaattattttttttttttattagttaaataaaattaaggttaaataaaggtttaattgattgtttgtaaatatatttaaattatttttaaaaattgaaaaatataattttagaattatagaattttatgttatttgattgattataaattatattatttgtaaatagagatggcgtattttaagttttagattaaataaatttttaaaacggttaatttttaatgattaaaaaattttaataagcgaatgaaaagtatataaaatttatgatttaaaaagaaaaaaaaaattataaagaaaaaaaaaaattatgaaaaaaaaatttaattagtaagtgaaaattatataaaatttttgatttttaaattgtatgaaggatacgaatgttaagaaaaataagatttttttgatcgggaatcgaattcgggtcgcggcggtgagagcgtcgaattttaattattagattattagggaatttgtataacgtttttttttaaatatatttgttgtgttaaaaatttgtatttaatttttttaattagtaggggatagagtattgcgtttaagttatatttattttgtttttgttttgagttttggtttttgaatttattttttgaaattgaagtaaattttcggaagcgtcgggatggttttttaaggaaaaaatttatattttttaaatttaattttttttttattgttatgttggaaaatatattttggaaatttttattttttacgtaatatgtaaatttttttattaagataagtgttgtttggacgcgtattgtttagagttttgtaatttgttttattattttattaattattttagttgttttttttaaatttaagttttgttttttttcgttttttttcgttttttgttacgcggatgttaagtttttttaaatattttattaaatttaacgatagattgttattagttgagagcgtttttcggcgaagagtcggagcgacgcgttgttttgggtgtagagcgcgtgtttaataaatatgggtgatgaagggttacgtagttttatagtacgcggttttattttatttatttggtatacgtaggttaacgaggttgagagagttgtgggtggtatgtttagtgaaggattaggatatttgtttaaggttttaagtaagttttttaaatttattgtgtttgttatttttttattttttaaattgtgttattatttgggtaattgttttattttttcgcgttatatattagatacggttaggaaatgatgtaattattaaaggagttaagatattttatagtttagttttaatttagaaatttttataaagtagatgtagagggtagtaagatataatttaattttgaaaatgttagtcgttatagttgaagaaatttgatttaagagatttcgtttcgttgtaagatggaaggaagtttaagtaagatataaatttgtaatgaatttgtttataatattcgtcgttattgtgatttgtagttattatttattattataaaattaggtgagtttgtgtttgaatttcgtttttttttttttagtagtttagagatggagtttaaattattgatatattttatttgaaaatatgtaataatatgagaataggaagatttaaaggggttattaagataataagatagaaaaattattagaagaaatttttatattttattgtattttaagtgggattttttttttttattttaaggaattttagattaagtttagtaggtggagtttttaatttttatttaaggggttgttagattttagtattagattatttggttttgaataaaaagattaagtagatattagtttaaatttgtataggtttagttataatattttatataaagtataaaagggtatggtgaaaattatttttttatttattttttttttttttttagaagtaattagtgttattagttttttttgtattttttagaaataatttatgtatatataatatatatttggtttatttttttttaattttttggtttcgaaatatgttaaagtaatagaaagttgtaattatagaatattgaatatatatatattttttatttatatttttgttttttaatttagagttttagtaatttgtggttattaggtatta

SEQ ID NO: 2346 - DNA, 2472 bp, Artificial Sequence
  chemically treated genomic DNA (Homo sapiens)
tagtgtttaatagttataaattgttggagttttaaattggaaggtaaaggtatggatgaagggtatatgtgtgtttaatgttttatagttgtaattttttgttgttttgatatgtttcgaaattaaaaagttggaggaaaatgaattagatatgtgttgtatgtgtatagattatttttgggagatatagaagaagttggtaatattggttatttttgggaagaagaaaggagtgagtaggaggatggtttttattatatttttttgtattttgtgtaaaatattgtgattaaatttatataaatttaaattaatatttgtttaatttttttatttaaaattagatggtttaatgttgaggtttagtaattttttaagtaagagttaagagttttatttattgaatttgatttaagattttttgggataggaaaaaagggttttatttaaaatataataaagtgtagaaattttttttgatgatttttttattttattattttaataatttttttaaatttttttgtttttatattattatatatttttagataaagtatattaatgatttaaattttatttttgagttgttgaaaaaaaagaaacgagatttaagtataggtttatttaattttgtggtaatggatgatgattgtaagttatagtggcggcggatgttgtgagtaagtttattataaatttatgttttatttaagtttttttttattttgtagcggagcgaagttttttgggttagatttttttaattataacggttgatatttttaaagttgagttatattttattgttttttgtatttattttatgagggtttttgaattaaggttgggttgtaaggtgttttgatttttttggtaattgtattattttttggtcgtgtttagtatataacgcggagaagtgaagtaattgtttagataataatatagtttggaaagtaggaggataataaatatagtgggtttgaaggatttgtttggagttttgggtagatgttttgattttttattaggtatattatttatagtttttttagtttcgttagtttgcgtgtgttaaataaataaaatagaatcgcgtgttatgaggttacgtgattttttattatttatatttgttgagtacgcgttttgtatttaggatagcgcgtcgtttcggtttttcgtcgagaaacgtttttagttggtggtaatttatcgttagatttagtaaaatgtttagagggatttaatattcgcgtgatagagaacgaagaaagacggagagggatagaatttagatttggaaagagtagttaaaatggttaataaaataataaagtaaattataaggttttggatagtacgcgtttagataatatttgttttggtaaagagatttatatgttacgtaaagaatgagaatttttaggatatattttttagtatggtaataggaagaggattagatttggagggtataggttttttttttaaggggttatttcggcgttttcgagaatttgttttaattttaggaaatagatttagggattaggatttagaataagaataaagtgggtgtggtttagacgtaatattttattttttattggttagaggaattaagtgtagatttttaatataataaatatatttaggaagaagcgttgtgtaagttttttggtggtttagtggttaggattcggcgtttttatcgtcgcggttcgggttcgattttcggttagggaagttttgttttttttgatattcgtattttttatgtaatttagaagttaagagttttgtgtagtttttatttgttggttgggttttttttttatagtttttttttttttttatagttttttttttttttttaaattataagttttatgtattttttattcgtttgttggggttttttaattattaaaaattgatcgttttaaaagtttatttaatttaaggtttaaaatacgttatttttatttataggtaatgtaatttataattaattaaataatataaagttttgtgattttaaaattgtattttttagtttttaaaaataatttggatgtgtttataagtagttagttaagtttttgtttaattttgattttgtttgattaataaaagaggaagatagttttatgaggaataatatttatttagtattatgtttagagttaatttttagtttttttgtatattaagattatgtattttggagattatttgtttatattggagttatttttatttttatttttataaatatgagattttttttgagatgtatggttggatatagttagtttattgtgttttaataatttatttagttaatgtttttttggttaattttaaattttttttaagagatttatataaatatggtaaatgtgttatatttagagtattaatttttattatataaattatataggttttttaaaaatgtattta

SEQ ID NO: 2347 - DNA, 2241 bp, Artificial Sequence
  chemically treated genomic DNA (Homo sapiens)
ttttaaaggaaatgttagttttgaaatttttttttagagttagagttagatattggtttttagttgtttaaagatatatatatagtaaatagtagtattaatttttatttgttatttaaattttaaagtaattatttttttgttatatttttagagtagatgaagtagagaatgtgaattgggggaagatattttggatgtttattttgtgggtattattagttgttttgaggaagtagtatgagattttgggaagtaattgtagtattaattagattttttagatgtttttgaatatttttatttttgtgttagaaggaaaagagttttttggaattcgattattttttgtagtttttgtagttgttgtgtttgaggagtagaggatggagttgggataaagtttagttgtaggagttataaggaaaatatatttttttttatagggttttgagtaattttgtgaggaaaaaaaggtttttaattttattttatttgaatatttttagggattatataattggataattatggaattggaagattttttagatgtttgattttttagttttgtaggtaagagaattaagatttaaagagggtaaagaattgttcgattgtggagttaagtttgcgtaggggttgatgatttagtttttattgatttttgaataatttttatttagaaaagagttttaattggtaaatataggaatttgggttttttattatgttatgttatgttatgttatgttttgttgtgttatgttatattattatattatgatttatgttattataatgttcgattgttgaaagtaaataaaatattatttttggggttgtttttatagtttagagtttatataataattaatatttgtttttttaataatagagttatttttttttttttttttaaaaaagtttttcgtggtattaaatattaagtagagtttaaataagaagtagagtgttatggtttttaaaatgtggttttttttttttgttaatatttgttttagagtgtatatataggtttttgttagagatattcgtttgttgggtttttacgtaaatggtagattgaagggtagcgtgattgttttagtttttaatgtcgtattatatattttgagtttttggttttttattagattttaaggaatgattttatgttttgtggtttggggttttacgtatttagttttgtttgttttttttgttttttttttttagttaggttttttattatttagtttgttttttttcgtttattgagagagtgaatgtattttttttttgtttttatttttgtaaaagttattttttaaaatgttttattatgatagattattttatgtttttgtaatgaaatagttgaattttatattttttgttattttgttaatattattagaattatattaatgagaattggtaaaataattttatttgtttaattttagtattagtataaatttagagggttttgtttttttttaataatttgatataatttaattataagttaaattattgattttgtttttatttaaatagttttaattattgttataaatgataatttatttaagattgatagtttaaaggtatagttagttatttttatagaaatttttattttattttaaagttatggtgaattgatatttttttgagaattgtttatgtttttttgtttttaattattataatttttattttagatttagtgagtatatgtgtaggtatgttatatgggaagattttgtgatgttgaggtttggggtatggatgattttatgatttagtaggtagtattttagttttttatttttttgtttttttttttttttagtagttttcggtgtttattgtttttattttttttttatgtgtatattatgtttagtttttatttataagtgagaatatgtggtatttggtgtttttttttagttttaatttgtttaggatgatagtttttagttgtatttatgttgttgtaaaggatatgattttgtttttttttacggttgtatagtattttatggtgatgtattatatgttttttatttaagttattgttgatgggtatttaggttggtatttaggtatgatagattgattttatgtttttgttattgtgaatggtggtgtgatgaatataagtatatgtgtgtttatggtagaatgatttatttttttttgggtttatatttagtaatgggattgtta

SEQ ID NO: 2348 - DNA, 2241 bp, Artificial Sequence
  chemically treated genomic DNA (Homo sapiens)
tagtaattttattattgggtatagatttaaaggaaaataaattattttattataaatatatatgtatttatgtttattatattattatttataatagtaaagatatggaattaatttattatatttaggtattaatttaggtatttattaatagtggtttggataaagaatatgtggtatattattatggaatattatgtagtcgtaaaaaagaataaaattatattttttatagtaatatggatgtagttggaggttattattttaagtaaattaagattggaagaaaatattaaatattatatgtttttatttataagtgagaattaaatatggtgtatatatggaaaaaagatgaaagtaatggatatcggggattgttggagagggaagagagtaaggaggtggagggttgaggtattgtttattgggttatgggattatttatattttaaattttagtattataaagtttttttatgtgatatatttgtatatgtatttattgaatttaaaatagaagttgtaatgattaaaaataaaaaaatataaatagtttttaaaagagtattaatttattatgattttagggtaaaataaaaatttttataagggtaattggttgtatttttgaattgttaattttaaatgggttgttatttgtagtaatagttggagttatttaaataaaggtaaaattaataatttaatttgtaattaaattgtgttaggttgttaaaaaagagtaaaattttttgaatttatattaatgttgagattaagtaaatgaggttattttattaatttttattaatgtagttttgataatattaataagataataggaaatgtgagatttaattgttttattgtaaagatataaaatagtttattatagtgaagtattttaaaggataatttttgtagaaatagagataagagaaggatatatttatttttttagtgaacgggaaagagtaggttgagtggtgagaagtttgattggagggagagaataggaaaagtaagtagaattaaatacgtaggattttaaattataagatatgaagttattttttgaggtttaatagagaattaaggatttagagtatgtgatacggtattaggaattagaataattacgttattttttaatttgttatttgcgtaagagtttagtaggcgaatgtttttggtaaagatttatgtgtgtattttgggataagtattgataagagaggagaattatattttagggattataatattttgttttttgtttaagttttatttaatgtttaatgttacgaggaatttttttagaaaaggaaaagaaagtagttttgttgttggaaaagtaggtattaattgttgtgtgaattttagattgtgagaatagttttagaaatgatattttatttgtttttaataatcgagtattataatagtatgaattataatgtggtaatgtaatataatataataaaatataatatagtataatataatatggtagagaatttaaatttttgtgtttgttaattaagatttttttttaaatgaaaattatttaaaaattaatgaagattaaattattagtttttacgtaaatttggttttatagtcgggtaattttttattttttttggattttaatttttttgtttataaaattagagagttagatatttgaggaattttttaattttataattgtttaattgtataatttttagaaatatttaaataaggtaaaattagagatttttttttttttatagaattatttaaagttttatgaaaggaaatgtgttttttttatagtttttgtaattagattttgttttagttttattttttgttttttaggtatagtagttgtaaaagttgtagaaagtggtcgggttttaaaaagtttttttttttttagtataggggtgagaatatttaagagtatttggaaagtttggttagtgttgtagttgttttttagggttttatgttgtttttttagagtagttaatgatatttataaaataagtatttaagatgtttttttttagtttatattttttgttttatttgttttaagggtgtgatagagaaatggttgttttaggatttaagtggtaggtgaaaattagtattgttatttgttatgtatatatttttaagtagttaaaaattaatgtttaattttaattttggaagaaagttttaaggttaatattttttttaaga

SEQ ID NO: 2349 - DNA, 2395 bp, Artificial Sequence
  chemically treated genomic DNA (Homo sapiens)
ttatggtttcgaggatttttaaagtagggatttttatattgataaaaataattttttagtgtttttgtggaggaggtgaggtaaacgataaattgatatttattttgttttaaattaagtgttaaagtttggttttttaaagagaatggttagtattttgggcgtagttgttaaatttttttaatttatatagatgtaatagaatttgtgaattaatttgtggtatttattaaagttaatttttgttaaaaataaatttttttttttttggtatattgaataagagatagggatgtattaaatatttacgaagatattttaagagagttttaggtaataggaagtgttttgagattgatttgttatgttttgagtgtatagaagatagagggagatatatagggaatgtttttgagattttttttttttaattatttttttttgtgatttttattttataatttatttttaaagaggtattatagttttttgggtgttataataaaatttaaaataaatgtttttatttagataagtattattaaaaggaaaggatattgaatttatttgaatatatttatagaagattgatttttttaagggaatgtatttattttatttttttaattatttttgaagttttgtttattaattgataattttttatagaaaggaagtaaaatagtttggttttcgtgatagcgaagaattataatattagaataaaaataggtttgttattttttttattttttttaatgtttgagttattgggagttagaaatataataattttattttagtaatatagttatttagaatatgttaaatcgaaaggtaaatttaaagttaaatttttttattttttgaagattagtatatttatttttaattataagtatttagtatgattagttataaaatattagagaaaatatggttatatttattttatttttttaattgattattatttgattagaaagaagattattttgttttatatgatttatttttagtaaaaaaattgtttatttaagtataggaaagttaattttcgtattaaaagagaattgagaaatttaaatagtttatgatttttattgttttggtttttgttgtaaagcgttattgtgaaaaattggttttgattttagtaattaatgtttttttattgtatagagatggtttggcgttattgtgttattgtggttgttaagggtagggttttttagtaatgtataatggttagaataagttttttttaattttgtattaagggtaggtttttagttttaaattatttttttattttattttagttttttttcgggagttgtggtttttttttgtggttgaacgtggtttagttttttttgaattttgtttttttttaaaaataattatttgttggagagtggtggtggttggataatattgtgaatgtaaaatattattgaattgtgtatttaaatgggaaattttatgttatgtgtattttattatagaaattatttttaatgtgtatttttaggtagtcgagaggtcgtttttttagaggattttgagttgttttttttagtaggtttattatttttgtatttttgtatgttaataaagattttttttttttttttttgagatggagttttgttttattgtttaggttgaagggtagtggcgcgatttcggtttattgtaatttttgttttttaggtttaggtaatttttttgttttagttttttgagtagttgagattataggtatttgttaatatatttagttaatttttgtatttttagtagagatagggttttgatatgttgattaggttggttttaaatttttgattttaggtaatttatttattttagttttttaagtgtcgggattataggtatgagttatcgtagttggttaataaagattttttgtgttaattatagatatattaaatgaaattgtttttttttgtttttttttttttttattaagggatgaaatataatttttttttttttgaatttatgtagatttatgatatatttgatattaattaaatgtagtagatatgatgttggataatttttgaggtttaatgattataagtaattaatttatttttttttttatttgtttgaatttttatattggatttttgaattgtaattgtagtagtttaattgttttgtagttattatgttgtaagaaagtttagattaaagtatataaggaaattaatggagaaatattaagattatatgaagagttacggagaggtgtagttttttgttttagttttcgtcgtcgtttgattgtaatttataaaatttatagttagaattatatagttaaatttttttttaattttagattggttgaaattatgaggta

SEQ ID NO: 2350 - DNA, 2395 bp, Artificial Sequence
  chemically treated genomic DNA (Homo sapiens)
tattttatggttttagttagtttggaattggggaaggatttgattatgtagttttagttgtgggttttataagttgtagttagacggcgacggaagttggaatagagggttgtattttttcgtggttttttatgtagttttagtgtttttttattggtttttttgtgtgttttagtttgggtttttttgtagtatggtggttgtagggtagttgaattgttgtaattgtagtttagagatttagtgtgggagtttaagtaagtgagaaagaggatgaattaattgtttgtaattattgagttttagaagttgtttagtattatatttgttatatttgattggtgttaagtgtgttataagtttatatagatttaaggagaggaaaattatattttattttttgatggagaagggaaagggtagaaagggataattttatttggtatatttgtgattagtataggaagtttttgttggttagttgcggtggtttatgtttgtaatttcggtatttgggaggttgaggtgggtggattatttgaggttaggagtttgagattagtttggttaatatgttaaaattttgtttttattaaaaatataaaaattagttgggtgtgttggtaagtgtttgtaattttagttatttaggaggttgaggtaggagagttgtttgaatttgggaggtagaggttgtagtgagtcgagatcgcgttattgttttttagtttgggtaatagagtaagattttattttaaaaaaaaaaagaaaaagtttttgttagtatgtaaagatatagaggtggtggatttgttgaaaaaggtagtttagggttttttgagaagacgatttttcggttgtttgggaatatatattagagataatttttgtagtaaaatatatatagtataaaattttttatttaaatgtataatttagtggtattttatatttataatgttgtttaattattattattttttaatagataattatttttgggggaggatagggtttaggaaaagttgaattacgtttaattatagaaagaaattatagttttcgaagagaaattggaataagatggggaaatgatttgggattgggggtttgtttttagtgtagggttggggaggatttgttttggttattatgtattgttaaggaattttgtttttagtagttataatggtataatgacgttaggttatttttgtgtagtgggaaagtattgattgttgggattaggattaattttttatagtgacgttttgtagtagaggttaaagtaatgaagattatgggttgtttaaattttttagtttttttttagtacgaaggttggtttttttatgtttaagtaaatagtttttttgttgagagtaaattatgtgaaataaaatggttttttttttaattaggtgataattagttgaaaaaataaagtgaatatgattatattttttttaatgttttataattaattatattggatgtttgtagttaggaatgagtatattgatttttaaaaaatagagaaatttgattttgaatttatttttcgatttaatatattttgaataattgtgttattgggatggggttattatatttttgatttttagtaatttagatattagaagagataaggaaagtgataaatttgtttttattttagtattataatttttcgttgttacgaaagttaggttgttttgttttttttttgtaagaaattgttagttgataggtaaaattttaagaataattaaagaaataggataggtatatttttttgggaaaattaattttttgtaaatgtatttaaatgaatttagtattttttttttttaatagtgtttatttaggtgaaaatatttattttagattttgttatggtatttagaaaattatgatgtttttttaaaaataaattatagggtaaaagttatagaggaggatgattgaaaagaaaaagttttaggaatattttttgtgtgtttttttttgttttttgtgtatttaaagtatggtaaattaattttagaatattttttgttatttgagatttttttgaagtgttttcgtaaatgtttaatgtatttttattttttatttagtatgttaggaggagagagatttgtttttggtaggggttggttttggtaaatgttataggttaatttataggttttgttgtatttgtgtaaattgggaagatttgatagttgcgtttaaaatattggttattttttttgggaagttagattttgatatttggtttaaggtaaaatgaatgttaatttgtcgtttattttattttttttataaaaatattaaaagattgtttttattaatataaagatttttgttttgagaattttcgaagttatag

SEQ ID NO: 2351 - DNA, 2258 bp, Artificial Sequence
  chemically treated genomic DNA (Homo sapiens)
agttaagatcgcgttattgtattttagtttgggcgatataaatttcgttttaaaaaaaaaaaaaaaaaaaagaagaaattttgtgtttttttttttgatatagtgtttagggaattagtaagattttattaatataagtattatatttttttatttttttgtaaaattattagtagtaagtgtttttttttaatattaaaatatatttattttggttgcgtacggtggtttatgtttgtaattttagtattttgggaggataaggtaggtggattatttgagtttgagagtttaagattagtttgggtaatatggtgaaattttgtttttataaaaaaaaaaaaatataaaaaattagtagggtgtggtggcgtatatttgtggttttagttatttgggaggttgaggtgggaggattgttggaatttttgaggtcgaggttgtattgagttgagatcgtgttattgtattttagtttgggtgatagagtgagattttgttttaaataaataaataattgaaagttaattatatttttgtttatggaattttttattttatataagttgagagaagttaaatttgggttattgaaatgttttagaaaattgttaaattgtttatttttttaagtttttagtttgttttagttatatgtgtgtgtgtatatatgtgtgtgtgtatgtgtgtgtgtgtatatatatatatatatatatatatatatatatatatatatgtatgttattgtattttaattttggtaatagagtgagaatttgtttttaaaaaatagtaaaaaataagttaataataaaataagttggttaggtgtagtggtttatgtttgtaattatagtattttgtaaggttgagatatataataatgtttaagagtaaaaattaagtaaatagttataatatgattagttattttatttattttattttgttggattggagtttgttgttatattatataaaatatttgttaggattttgtatttttaatatttatgtatatttatgggaatttattagagggggaagtttggatttaaaatttttttttatgaaatagttaaagattaagaggtgaatcgtgtgggatatgaagtatgttatggttgagttgttgacgaggtttcggttgtgttttgtattatgtaagggtttagtattttgagaaggtgtttggtaaatgttattggttgatcggacggtagttttcggaaggtttgttgattagaaatagagtttttggtagaattttaatggtaaagttataaatagtaatagtttttaaaataataattgtaattttagtaaaatgaaaattttttatgtgggaggtataatgggaaatgtattgattggtatttttttttagatatatgaatagtgattataagtagagatgttttttttttttataaaggaaaaggtgtaaaatattggttttataatgtaggaaaattaataaaatggtggtataaaatattgattattattagtagatttttttagtaagaatggtagtttaagttaatagatatgttttatgaattttgtggttgtaagtggttggaatggaatgaaaattagtttttacgaatttatttttttattttttttattttaatgagtatttattgtatgttaggtattgttttaggtatgtgtaggatattagcgagtttagttaagattaaattttttttgtttagatatagaaaataagggatatatattatataaaaatatataatatgttagaaagtggaaaaagtaagtagaaaaaagaaaaagtatagtagtaagggaaatttaagagtgttaggtcgggcgcggtggtttacgtttgtaatttcggtattttgggagtttaaggtgggcggattacgaggttaggagatcgagattattttggttaatacggtgaaatttcgtttttattaaaaatataaaaaattagtcgggcgtggtggtgggcgttatacgggaagttgaggtaggagaatggcgtgaattcgggaggcggagtttgtagtgagttaagatcgcgttattgtattttagtttgggtgatagagcgagatttcgttttaaaaaaaaaaaaaaaaaaagagtgttaaaaaatggtgggtatggagtaggggtattaggtgggtagaggtagttttgttgagatggtgataagtgaatagagttttggagtagaaaattagtggatgatgggggaagagtatttcgggtaaagg

SEQ ID NO: 2352 - DNA, 2258 bp, Artificial Sequence
  chemically treated genomic DNA (Homo sapiens)
tttttattcggaatgttttttttttattatttattggttttttgttttaggattttgtttatttattattattttagtagagttgtttttgtttatttaatgtttttgttttatgtttattattttttggtattttttttttttttttttttttgagacggagtttcgttttgttatttaggttggagtgtagtggcgcgattttggtttattgtaagtttcgtttttcgggtttacgttatttttttgttttagtttttcgtgtagcgtttattattacgttcggttaattttttgtatttttagtagagacggggttttatcgtgttagttaggatggtttcgattttttgatttcgtgattcgtttattttggatttttaaagtgtcgggattataggcgtgagttatcgcgttcggtttggtatttttgaattttttttgttgttgtatttttttttttttttatttattttttttattttttaatatattatgtatttttgtatgatgtgtattttttattttttgtatttgagtagagagaatttaattttggttaggttcgttgatattttgtatatatttagaataatgtttagtatgtagtaggtgtttattaaaatgagaagaatgagagaatggattcgtgaaagttgatttttattttattttagttatttgtaattataaaatttatgaaatatatttattggtttgaattgttatttttgttagaagaatttgttgatggtgattaatgttttatattattattttattggtttttttatattgtaaaattaatgttttatatttttttttttgtagaaaaggggagtatttttatttgtgattattatttatgtatttggagaaaaatattaattaatatattttttattatattttttatatagaaggtttttattttgttgaggttgtagttgttattttagggattgttattgtttgtgattttgttattgagattttgttaaaggttttgtttttgattagtaggtttttcgagaattgtcgttcgattagttagtggtatttattaggtatttttttagggtgttgagtttttatatgatgtaaagtatagtcgaggtttcgttagtagtttagttatgatatgttttatattttatacgatttattttttgatttttaattgttttatggagggaaattttaaatttaggtttttttttttaatgaatttttataaatgtgtatgggtgttaaaaatataaaattttagtaaatgttttatatgatataatagtagattttaatttagtaaaataaaataaataaaatgattaattatgttataattgtttatttaatttttatttttgggtattattatgtgttttagttttgtaaagtgttgtgattataggtatgagttattgtatttggttaatttattttattattaatttattttttattattttttagagataggtttttattttgttgttaaggttagagtgtagtggtatatatatatatatatatatatatatatatatatatatatatatgtatatatatatatatatatatatatatatgtatatatatatataattaagatagattaaaaatttaaaaaagtaaatagtttaataattttttaaagtattttaataatttaagtttgattttttttagtttatgtgaagtaaaaaattttatagatagaagtataattaatttttaattatttatttatttgagataggattttattttgttatttagattagagtgtagtgatacgattttagtttaatgtagtttcgattttaagggttttagtaatttttttattttaattttttaaatagttgggattataggtgtgcgttattatattttgttaattttttgtatttttttttttttgtagagatagggttttattatgttgtttaggttggttttgaatttttaagtttaagtgatttatttgttttgtttttttaaagtgttgggattataggtatgagttatcgtgcgtagttagaataaatatattttaatgttaggaaaaagtatttgttgttgatgattttgtagaaaaataagagaatatgatgtttatgttgatggaattttattgattttttaaatattatgttaagagaaagaatatagggtttttttttttttttttttttttttttgagacggagtttgtgtcgtttaggttggagtgtagtggcgcgattttggtt

SEQ ID NO: 2353 - DNA, 4090 bp, Artificial Sequence
  chemically treated genomic DNA (Homo sapiens)
ggtttttaataattattgaatgaaatgttttttaatatggtattttttgtattgttatttagttttttttagtgtaggtttgattttgatttttttagacgtgaaattcgttgggataaggattagattttatttatttttttatttttattattcgtttttttgtttaatatttatttaaaggggaaagaaaggaaagatagtgaatttagggtattgataatttagaaagcgtggaggtgggggttagtgagtagagagttatttggattttaagggtgtgggtaattttggagaggaataagttattatatttatttgtttacgaatttatttatatttgtttttttttagaaagggtttgaggtggttgataaaaatatatataatataaggtaaaaaataagtcgttgaggaaattaggtcgagaggaaaataagagtaggaaaaataagatcgagtcggtttgttataagtgggttaaaaagttggttaagttttttatagtttattcgaggcggaagtttttttttttttttcgttttaggggcggttatacgttttatacggacggggagagatgtattcgagagagagggcggataggatttttttcgtatttttttagtcgttaggtcgttagttcggtgttcgggtttagtagttttcgcggttttggagagcgcgaagtggaggggcgcgcggttttggggggtagttcgagtttagatttgggttttaaggtgttggcggggagtttgtgatttgggacggggtgttggaggttgaggaatcgcgtttttatgttacgtcgtagaggttttcgcgttcgaaatcgaacgttttttagttattattatttacggtttattaagcgcgcgtttcgggtttagggtataaagatggagggagcggcgcgatttattcgttttatttttatttattagataaaggggtaggtcgttttttttttagtttttttcgcgggtttcgtcgttttttgttttttttttttcgggtcgttttttggtgatttttttttttttttaagggcggtttcgggattttttaggaattgcgttttatttggacgtggggcggggagtcggcgcgtagagggcggttttcgggtttatttttaggtcgagtcggttttaggttcgcgtttttttttttgaattcgcgttttcggtttttggcgttttttcgtttaggcgttttcgtttttattcggttaagtacgtgttgttcgggtttcgagcgtttttcgtcgtacgggtgggggttgggtttatttttcgttcgttttttatttttatcggaaatatttttgttatatttttgtaattgtaaggtttagttcgtcgttttttatttcgttttcgcgtcgggtttagggtttttttgcgttttttttatcgtcggttcgttttttgaggagggggttgggttagggtttcggttgatcggggaggaagaaggggagtagagaaaaatatgagttatagtcgtgtgttattggagcgtattttaattttttgtattataggaggtgtggaaggtcgtttcggggatcgggcgcgggaggtgcgttcgagaaggtttcgggtcggtttgtagggcgcgtcgtttcgtttgcgttttttttttttttatcgtttttttcgttatttttttttttggtttttttttcgttcggtgtaataagtttttgttaagtcgggcgtcgggcgggttaggcgtggcggagatggtttgcgtgttcggtttttgtttttaaagcgtttttaggcgatttttggtttattttttatttttatttatagttttaacggaagggtttaggtttttaagtgggtttgcgtatttttagaatattatttaagttattttaaggtatgaagttttttttgggtgtatttgttaacgagttaatcgttggtttcgttggaaggttttattttgattatggttcgttggtggttattaataaaatattttggattttataagttttacgtttgaattttataagatttgtattttattaattagttatacgcgggttgatattgaaaggtatatgttgatatttgttcgtttaggggaaatttattatttttttattttagttagggggcggcgtgtaggtcgcggaattttttaacgagcgcgtttttttttattttttgggttcgcgtggattttcgtttatttttatacgttttggggggggggtcgggtttatacgttttggaagtttttagaggtgattttttttgggatttttgtattagggaggaaggatatcgttattcgttattatttttcgttagaagttttttcgtgatttttttgcgcgtgtttttttatatttttttcgttcgggattgcgaggagtgggcggtcgattcgagttcgtagtttaggttttttatacgtttttttttgtcgttagtatttattcgcgcggtagcggcggcggcggttggcgggcggtcgtttttttaaattttcgggtttatttgtatggtttcgttttttgagtgatacggttggcgcgggcgggttcgttttttttgtttttgggtcgttttttttaagtttttttgagtcggtgttgcgtttttttaattgggatttcgagtcggggttatttttggcgttggcgcggttttaagaaggcgtgagttcgcggtcgtttcggtggttttttttttttatatttataatttaattaaattatttatttattgaggtcgcgtacgggtcgtgtttagttttttgtttttcgttatttttcgggggagggggaatatttttgttttttcgtttggttgtgatatataaatatttcgcgggggtttgggcggcgagtacgcggcggcggcggtttttgagcgtttttgttttttttcggttttagattcgtatttgttattagcggcggtcgcggcggagttaggtcggtttttagcgtttagtatcgtcgttttcggtaattcggagcgcgtatcgtaggtcggcggtcgagttcgcggtgagtcgttttcggggttcgcggcggcggcggcggaggggggcgttcgcgttttcgttcgtacgtcgttttttttgcgagtcgttcggggttgtagcgcgcgtcgtcggttttatttttaggtcggggcggcgcgagtcggcggcgggggagggtcgcgcggcgcgggggcgggcggcggggttcggcggcgcggggaggacgttcgtattttttttttcgcgtcgcgggcgttttgcggggggcggggattcgggaaaggcgcgcggtgggggagggggcgcgtagttgcggcgagcgcgagttgtgtattcggcggagttcggaggagttcggcgtatttcgcgcggcggtcgttttcgttggagtcggagttcgagttcgagttcgggttcgggtgaggggcggggagagatacgggttgcggcgcggtaggagagtggggggtcgggcgtttttcgtagtttagggaagttttggaagtgagggagatggggaggaatttttaaattcggttttacgttttttcggtttttttttcgcgtttttttcgtagatgaggtcggagcgcgggtttgggtttggggttttatttcgattttatttttggtttggttcgcgtttttttagttttaggggtcgggtttgtttttcgtttttataaattggtttcgttgttttgttgggttttgttggaattagtttttttgatttttcgtttttattttatttttttttggggttttattttgcggggaggggacggagggagggggttttttttttttttttcgcgttcgcgcgcgttaggttttttgttttaaggcgggtttgggtgttttttttggtaggaagtggggtcgggtgtattcgcgtggcggtgtatgcggtcggggtgcgttgttttttcgcgtttgtaggagcggtttgcgttttttttttcgcgcgttttggtttcgggtttcgtcggtcggtttgtaacggtcgggcgtagatatttgtagagttattttcgggtcgggtttggagtttgatgtttcgggggtttag

SEQ ID NO: 2354 - DNA, 4090 bp, Artificial Sequence
  chemically treated genomic DNA (Homo sapiens)
ttaaattttcgaggtattaggttttagattcggttcgagggtgattttgtaagtgtttgcgttcggtcgttgtaggtcggtcggcgggattcggggttagggcgcgcggggggaggggcgtaggtcgtttttgtaggcgcgggaaagtagcgtatttcgatcgtatgtatcgttacgcgggtgtattcggttttattttttgttagagggggtatttaagttcgttttggggtaggaaatttggcgcgcgcgggcgcgggggagaggaagaaagtttttttttttcgtttttttttcgtaaaataaagttttagaagaaaataaaatagaaacggggagttaaagggattagttttaatagagtttagtaaagtagcgaaattagtttgtgggggcggagggtaggttcggtttttggggttgaagaggcgcgggttaggttagaggtggggtcggggtgaagttttaaatttaggttcgcgtttcggttttatttgcggagggggcgcgagagaaaggtcgagagggcgtagggtcgaatttgggggtttttttttattttttttatttttagaatttttttgagttgcggggggcgttcgattttttatttttttgtcgcgtcgtagttcgtgttttttttcgttttttattcgggttcgggttcgggttcgggtttcggttttagcgggagcggtcgtcgcgcgaggtgcgtcgggttttttcgggtttcgtcgggtgtataattcgcgttcgtcgtagttgcgcgtttttttttttatcgcgcgtttttttcgggttttcgtttttcgtagggcgttcgcggcgcgggggaaggggtgcgggcgtttttttcgcgtcgtcgggtttcgtcgttcgttttcgcgtcgcgcggttttttttcgtcgtcggttcgcgtcgtttcggtttgggaataaagtcggcggcgcgcgttgtagtttcgggcggttcgtaggaggggcgacgtgcgggcgggggcgcgggcgttttttttcgtcgtcgtcgtcgcgggtttcggggacgatttatcgcgagttcggtcgtcggtttgcggtgcgcgtttcgggttgtcgggagcggcggtgttgggcgttgaggatcggtttggtttcgtcgcggtcgtcgttggtagtaaatgcggatttgaaatcgggagagagtagaggcgtttagagatcgtcgtcgtcgcgtgttcgtcgtttaggttttcgcggggtatttatgtgttatagttaggcggggggataaaaatattttttttttttcgaaggatggcgaggggtaggaagttgggtacggttcgtgcgcggttttaataaataaataatttaattaaattatagatataaaaaaaagaagttatcggagcggtcgcgaatttacgtttttttggagtcgcgttagcgttagaaatagtttcggttcggagttttaattagaggagcgtagtatcggtttaggggagtttaaaaagagcgatttaggggtaggggggacgggttcgttcgcgttagtcgtgttatttagggggcggggttatgtaaatgagttcggggatttaaaagggcggtcgttcgttagtcgtcgtcgtcgttgtcgcgcgggtgggtgttgacggtagggaggggcgtgtgggaggtttgggttgcgaattcgagtcgatcgtttatttttcgtagtttcggacggaggaggtgtgggaaggtacgcgtagaggagttacgaaggagtttttggcggggggtggtgacgggtggcggtattttttttttttggtataggggttttagggagagttatttttaggggtttttagggcgtgtgggttcggttttttttttagggcgtgtgggggtggacgggggtttacgcgggtttagggggtgaagagaaacgcgttcgttagagaatttcgcggtttatacgtcgttttttaattaaaatagagagatggtagattttttttgggcggataggtgttagtatgtgttttttagtgttaattcgcgtgtggttgattggtgagatataagttttgtgaaatttaaacgtgaaatttgtgaaatttaaagtgttttattaatggttattagcgagttatgattaaggtggagttttttagcgaaattaacgattggttcgttggtaggtatatttaagggaggttttatattttgaggtgatttagatggtgttttggagatacgtaggtttatttggggatttgggttttttcgttgggattgtaaataaaaataaaaggtgggttagaggtcgtttggaagcgttttgagggtaggggtcgagtacgtaggttattttcgttacgtttggttcgttcggcgttcggtttaataaagatttgttgtatcgagcgagaaggaagttaaaggggaagatggcggggagggcggtgggggaggaaagggcgtaggcggagcggcgcgttttgtaggtcggttcggggttttttcgggcgtatttttcgcgttcggttttcgaggcggttttttatattttttgtgatgtagggaattgaaatgcgttttagtgatatacggttgtgatttatgtttttttttgtttttttttttttttttcggttagtcgaggttttggtttagttttttttttagggggcgagtcggcggtggaggggacgtaggaaagttttgggttcggcgcggaggcggggtggggagcggcgggttgggttttgtagttgtaggaatgtggtaggaatgttttcggtgggggtggggagcgggcggggggtgggtttagtttttattcgtgcggcgggaagcgttcggggttcgggtagtacgtgtttgatcgggtgggggcgggggcgtttgggcgggaaggcgttaggggtcgggagcgcgggtttaaaggggagggcgcgggtttggggtcggttcggtttaggggtgggttcggaggtcgttttttgcgcgtcggtttttcgttttacgtttaggtgaaacgtagtttttgagaagtttcggggtcgtttttggaggggaaaggaagttattaaagggcggttcgaggggaggggagtagagggcggcggggttcgcgaagaaggttgggggaggggcggtttgtttttttgtttggtgggtgggggtggggcgggtggatcgcgtcgttttttttatttttgtgttttgggttcggagcgcgcgtttagtaggtcgtgagtggtggtggttggagggcgttcggtttcgagcgcgggaatttttgcggcgtggtatggaggcgcgattttttagtttttagtatttcgttttaggttataggtttttcgttagtattttgggatttaggtttgggttcgggttgttttttagagtcgcgcgtttttttatttcgcgttttttaaggtcgcggaggttgttaggttcgggtatcgggttggcggtttggcggttggggaggtgcggagagggttttgttcgttttttttttcgggtatattttttttcgttcgtgtgggacgtgtggtcgtttttgagacggggaggggagagggattttcgtttcgagtgggttgtggaaaatttggttaattttttggtttatttgtagtaagtcgattcgattttattttttttatttttatttttttttcggtttgatttttttagcgatttgttttttattttgtattgtgtgtatttttgttagttattttaaattttttttggaaggaggtaggtataaataaattcgtaggtaaataaatatagtagtttgtttttttttaggattatttatatttttgaaatttaaataattttttatttattgatttttatttttacgttttttggattgttaatgttttgaatttattgtttttttttttttttttttttaaataagtattaagtagaagagcgagtggtagagataaaaagatgggtaggatttagtttttgttttagcgaattttacgtttagggaaattagaattaggtttgtattagagaaaattgaatagtagtataggagatgttatgttagaaaatattttatttagtagttattgagaatt

SEQ ID NO: 2355 - DNA, 2380 bp, Artificial Sequence
  chemically treated genomic DNA (Homo sapiens)
ttattttaaaaagttttgtgatttttaaggaaatagttggattaaggatgaaaaagaatattagaatttttgataattttttaaatattagtatatataagaatatagggtagttacggtagtttatgtttgtaattttagtattttgggagtttaaggtaggtggattatttgaggttaggagtttaagtatagcgtgggtaatatggtaaaattttatttttataaaaaatataaaatttagttgggtacggtggtatgtatttgtggttttagttattttggagattgtagtgggagaattatttgagttcgggaagttaaggttgtagtgagacgtgattatattattatattttattttgggtgatagagtgagattttaatttaataatataaaagaatatatatttatagatatatgtaatatatatttatttatgatttttattatattttatgtatttttggtttatatttaatcgattaatagtttttaaaataatatttgtgtaaattataatttatattgtatgattaattttaaattgaaatttttattaaatttaaggatttataatgtattatatatatttttattttgtaattagaatgaagtgtgaagtatataatgtatgttggtaaggaattgaaaatttaaatttgtttttagattataaatttattcgaaaatttgtaaagttttaatagtatatgagtatatgaaggttattaatattttgaaaatagtatttagtttttgatttatttattttttattttttatttgtattagaaaaggggaataaagatgttgaatttatggttagttttttaaaggtttgttgttttttgataatgagtaaattgttttttttttaattttgtttttatttttagggaagtttttgttttaattttgagaggaaagtagaattttaattgtaaaataaaggtttttggttattttgatatatatattatttaaaagtgtaattgattttgatagtggttttgttttttaggattttttttttttttatagaatttagtatattggagagatggtagagatggtatttgatttgttgttgatgtgatcgttttttttaaaatgtttagatttcgatttattaatgttaaagtttttttacgagatattggtgttagggtggtattgggtaatatcgttgtatgtttataaatagttgtagtgaaagtgttttggtagttggtttttgagatatagaaaagtaaaattgttacgtaagttggtaattgagtagttatgttgaagtttaatgagtgttgaaaaatagagtatgttttggtatttatagaaagaagatacgtggtgtttagaatttagtattttaaattacggaagttaattaagaaaacgttatgattttatagtattgttatataataaaagattttattttattgtagtaatttgtgaagattaatttaagaattttatgtatattagttcgttagggttgtttaataaaatataataaattgggtggtgtaaaaaataaaaaatttattgttttgtagttttggagggtgggagttttagatgaaggtgttagtagagttggttttttttgagggcggtgaaggaaagatgtgttttaggtttttttttttgatttatagatggttgttttttttttgtgtttttttatatgttattttttttatgtgtgtgtttgtatttaagttttttttttttgtgaggatattattttaatttttaatatagggaaagggaaaattttagttttagttttttttgttatcgttgttgtttgtttattgttgttgttgtttgagatggagttttatttttgttatttaggttagagtgtagtggcgaaatttcggtttattgtaattttcgtttttcgggtttatgtgatttttttgttttagttttttaagtagttgggattataggcgttcgttattacgttaggttaattttttgtatttttagtagagatagggtttcgtcgtgttgggtaggttggttttaaattgttgattttaggtgatttatttgttttgtttttatgttaaataagggtagaagaaaaaagttaattgaaggttataaatttaggggtataggtttattgaaagattgagatttaattataggattaattcgatttagtgtttattgtattttagtataattttattttaattaattagatttgaaatgattttttttttaaaaaagttatattttaagatattgatagttaggattttaatatataaatttttggaatttatatattttggaatgttaatataagatatttaaataattttaaaattttattattatttttatgtgaatatt

SEQ ID NO: 2356 - DNA, 2380 bp, Artificial Sequence
  chemically treated genomic DNA (Homo sapiens)
aatatttatatgaaaataataataaagttttaaaattatttgaatgttttgtgttgatattttaaaatatatgaattttaaaaatttatatgttgaagttttaattgttagtattttagaatgtaatttttttggaaaaggggttattttagatttaattagttaagatgaagttatattggagtatagtgggtattaaatcgaattggttttatgattgagttttagttttttagtgagtttgtatttttgggtttatgatttttagttggttttttttttttgtttttatttggtataaaaataaagtaggtggattatttgaggttagtaatttgagattagtttgtttaatacggcgaaattttatttttattaaaaatataaaaaattagtttggcgtggtggcgggcgtttgtaattttagttatttgggaggttgaggtaggagaattatatgaattcgagaggcggaggttgtagtgagtcgagatttcgttattgtattttagtttgggtgataagagtgaaattttattttaaataataataataataaataaataataacgatgataaaaaaagttagagttgggattttttttttttttgtgttaaagattagagtggtgtttttataaaaagggaaaatttggatataggtatatatatggggagaatagtatatgaagagatatagggagaaggtagttatttatgggttaaggagagaggtttggaatatattttttttttatcgtttttaggaggaattaattttgttgatatttttatttgggatttttattttttagaattgtaaagtaataaattttttattttttatattatttagtttattgtattttgttaggtagttttagcgaattaatgtatatagagtttttgagttaatttttataaattattgtaataaggtagggttttttgttatgtaataatgttatgaaattatagcgtttttttaattaattttcgtagtttaaggtattaagttttggatattacgtgttttttttttataaatattaggatatgttttgttttttagtatttattggattttagtatgattatttagttgttagtttacgtggtaattttgtttttttatgttttaagagttagttgttaggatatttttattgtagttgtttatgagtatgtagcgatattgtttaatgttattttaatattagtgtttcgtgaggaggttttggtattaatgaatcggaatttggatattttggaaggagcgattatattagtagtagattaggtattatttttattatttttttagtgtattggattttatgagaaaggagggggttttaggagatagggttattgttagggttagttatatttttagatgatatatgtattagagtagttaagaatttttattttatagttagaattttattttttttttaaaattagagtaaggatttttttaaaagtaagaataaagttaagaaaagaataatttgtttattattaagaagtagtagatttttgaggaattggttataaatttaatatttttgttttttttttttggtatagatggaggatggaggataaatgggttagggattaggtgttatttttagagtattagtggtttttatgtatttatgtgttattaaggttttgtaggttttcgaataaatttataatttgaaaataaatttaagtttttaattttttgttagtatgtattatatattttatattttattttaattataagataaaagtatatgtaatgtattgtgagtttttaagtttagtgaaggttttagtttgaagttaattatatagtataaattgtggtttatataaatattattttaaaagttattgatcgattaggtgtagattaggaatatatgaagtgtgataaaagttatggataaatgtgtattatatatatttataaatatatatttttttgtgttgttgagttaaggttttattttgttatttaggatggagtatagtggtgtgattacgttttattgtagttttgatttttcgggtttaggtgatttttttattatagtttttagagtagttgggattatagatgtatgttatcgtgtttagttaagttttgtattttttgtagagatgggattttgttatgttgtttacgttgtatttgaatttttgattttaggtgatttatttgttttgggtttttaaagtgttgggattataggtatgagttatcgtgattgttttatatttttatatatattaatatttaaaaggttattaggagttttgatgtttttttttatttttagtttaattatttttttgaaggttatagagttttttaaggtga

SEQ ID NO: 2357 - DNA, 2405 bp, Artificial Sequence
  chemically treated genomic DNA (Homo sapiens)
tagttaaaatttttgaagtatatatttttttaaatttttaaattttaaattatgttcggttttttagttttatttttgtttgagtttaatattagtattttattattatatatggcgtaaggtttttttttgatatattttatttatattttaagaaataattttattattttttataaagtacgtgaaattataggtattaaatatatatgtttatttaaattttaagattaatttatttatatgttatatttaattatgagtatttcgtgaaattattatatttgaaaggaaattttttaaaatgtattttaattagttagattgatgttatttggatttaaataggaagattatattttttttgtttgtaatgtaatttttatttttatgtgtaatttttaatataattaatatatataaatttagtttgagatagtttcgtttatgttatttagattggagtgtagtggagtaattaattttcgtttattgtaattttcgtttttcggatttatgaataatttttttatcgtagtttttcgaatagttgggattataggtttgtattattagatttagttagtttttgtggggatagggttttaattatgttaacggttaagttttaggtttgaacgattttttcgttttaatttttattgaagtgtaagtattgattgtttataagcgttaagttatttcgtttagtgatatatataattaaaattattttaaattaatggtcgatggaacgttttttgaaaatttagttttcgtatattttcgaaatgcgtttaaacgggtatttgtgataggtaagtaagatggttggttaatagtagtaacgttttgtaacgtatagtttttttttgagacggtaggtggttttgaaaagagttttttgttttttttgatatagaagtttttttattaatgataattttaagttatttgttttgggttttatggtggtgatttttagtttttttgggtagtagtattgtttgaatgttaggtaggatttcgttttgggtaatggttacgtcgtttaaaagtttattgagttttttattattgcggatcgttagttgtaggtggcggggaataatgcgagtttttttgttatcgcgagacgtattgtttgttagtttaaggatttttgttgtgagatattttaatattgtcgttaaatatattggtgcgtttgtttttattcgttttgtatagttttttttacgaagtagacgatggattcggtttacgggaaattgtaaattcgttttagaagagcgagatttagatttggcgcgtgttttttttttttgtttttttcgtttagatattttttcgtattaaattgtagtaatacgagaattatatttttagggttgttattgggtttatttatagtttgattgaggttggtatttgttatttgattggttgatggtcgtttatttaattagaaagtcgtattagaatcgttttatttgtatttacgttattttttattgtttaattagattttggatatcgaacgcggcgtttgagggtcgtgtttataaatatcgtattttttattttttagttttgtttgtttatttggcgagatttggagttgaggttatttggagttgtttaatattgaagagttgttgagtattggaaagtgttgtgtaattttggaaaagaatcgtgtaacgttgtagaagtgtgtggtagttatgtcggaggtgttatttaaaggtgttattatttttaagaagggttttaagaaagttgtcgttaagatttagaaaaaggaaggtaaaaagcgtaagaggattcgtaaggagagttattttatttatatttataaagtgttaaagtaggtttattcggatattggtattttttcgaaagttatgagtattatgaattttttcgttattgatatttttgagcgtatagcgagcgaggtattacgtttggtttattatagtaagcgttttattattttttttagagagatttagatagtagtgcgtttgttattgtcgggagagttggttaaatatgttgtgtttgagggtattaaggttgttattaagtatattagttttaagtaagtttgttaagtaaacgttatttttaatttaaaggttttttttagagttatttaaatatattgaaatagttgtgggtttcgtttttgtgtagtttttaatcgtaagggttttttttttttttgaggcggagttttatttttttaggttggagtgtagtggcggaatttcggtttattgtaagttttgttttttgagtttacgttatttttttgttttagttttttgagtagttgggattataggtttttattattatattcggttaatttttgtatttttagtagagacggggtt

SEQ ID NO: 2358 - DNA, 2405 bp, Artificial Sequence
  chemically treated genomic DNA (Homo sapiens)
aatttcgtttttattaaaaatataaaaattagtcgggtgtagtggtgggagtttgtagttttagttgtttaggaggttgaggtaggagaatggcgtgaatttaggaggtagagtttgtagtgagtcgagatttcgttattgtattttagtttgggagagtgagatttcgttttaaaaaaaaaaaaaatttttacggttagaaattatataaaaacgaagtttatagttgttttagtatgtttaagtggttttgaaaagagtttttgggttagaaatgacgtttatttagtaggtttatttggagttggtgtatttagtgatagttttggtgtttttagatatagtatgtttagttagttttttcggtagtagtaagcgtattgttgtttgaatttttttggaagaaatggtggagcgtttgttgtagtgagttaaacgtgatgtttcgttcgttatacgtttaaagatattagtgacgaaggaatttataatgtttatagttttcgaagagatgttagtgttcggatggatttgttttagtattttgtagatgtaaatagaataattttttttacgggtttttttgcgttttttgtttttttttttttgggttttaacgatagtttttttaaagttttttttggaaatggtagtatttttagatgatattttcggtatagttattatatatttttgtagcgttatacggtttttttttagggttatatagtattttttagtgtttaatagttttttagtattaaatagttttaaatgattttagttttaagtttcgttaagtaaataaatagaattggaggatgaaagatgcggtatttataggtacggtttttaaacgtcgcgttcggtatttaaaatttgattggataatgggaagtggcgtgaatgtaaatgaggcgattttagtacgattttttgattgggtagacggttattagttaattagatagtaaatgttaattttagttagattataaataggtttagtagtagttttagaaatgtggttttcgtgttgttgtaatttgatgcgaggagatgtttggacgagggaagtagggaggaaaagtacgcgttaagtttaagtttcgtttttttagagcgggtttgtagtttttcgtaggtcggatttatcgtttgtttcgtaagggaaattatgtagagcggataggggtaggcgtattagtgtatttggcggtagtgttagagtattttatagtagaaatttttgagttggtaggtaatgcgtttcgcgataataaaaaaattcgtattatttttcgttatttgtagttagcgattcgtaatgatgaggaatttaataagtttttgggcggcgtgattattgtttagggcggagttttgtttaatatttaggtagtgttgttgtttaagaagattgagagttattattataaagtttaaagtaagtaatttaaggttgttattggtaaaaagatttttgtgttagaaaaaataaaaggttttttttagagttatttatcgttttagaaaaaggttgtacgttataaaacgttattgttgttaattagttattttatttgtttgttataaatgttcgtttaagcgtatttcgggaatgtacggggattgaatttttaaggagcgttttatcggttattagtttgaggtaattttggttatatatgttattgggcgaggtggtttaacgtttgtgagtagttagtatttgtattttagtggaggttggagcgggagggtcgtttaagtttggggtttgatcgttaatataattgagattttgtttttatagaaattagttgggtttggtgatgtaggtttgtagttttagttgttcgggaggttgcggtgggagggttgtttatgagttcgggaggcgaaagttatagtgaacgaagattgattgttttattgtattttagtttgggtgatatgagcgagattattttaaattagatttatgtatgttagttatgttaagggttatatatggaagtgaaaattgtattataagtaggagaggtgtaatttttttgtttaaatttaggtaatattagtttggttggttaaagtatattttagagaatttttttttaaatatggtagttttacgaaatatttataattaaatgtggtatgtaagtaagttaattttaaaatttgggtaagtatatatatttgatatttgtggttttacgtattttgtaaagaataatagaattattttttaaaatgtaagtaaaatatgttaaaaagaagttttacgttatatgtgatggtgagatattagtgttagatttaggtaggaatgggattagaaggtcgaatataatttgaagtttagaaatttggaagagtatatgttttaaaagttttgattg

SEQ ID NO: 2359 - DNA, 2500 bp, Artificial Sequence
  chemically treated genomic DNA (Homo sapiens)
tagtgtttattaaattttatattggattaagtgtttatttttttgttttttatgtaagggttgttaaatataattaataaattttagtgattaattgggttaaatgagagatgtaataaattttttatttttttacggaatttaaataatgttttaaatttattaagtaaggaggtaagtttatttgattattttttttataatttaatgtagtaattattaaattgttaacggatatattgttgtaatatttgatgtagtaatttgaaatagtattttagtaaaaattatatttagatatattttttttttaaagaaaagtagttttaatagaagtttttatagttttaataaaattattggtttgttttaattttattttaggagggttgtgaggaaattataaatatatagaattgaagtagaggtattggtttaagtttaattttagaaagtatttttaaattattaatagtttggtttgtattgtaaatagtaaatgtgttaatgttatgtttatttagaaattattttaaattgtatttattgataattaaattagaatttaaataatgtattatttaatagtttcgaaatatttaatttaatatggagtgtagtaggttttgataggcgttgggaatttagttaatgatttatgaggttattatttagtatttttagtaagaagaaggttgtattttaatgtttttttgtttggatttgttatttagtttttttttaattaggatagggtgtatatataatttttaggttttatttgtgtttataaaattcggttaaaatgattttagtgtgttttttatatttttttttatattttgaggatatttaatgagtttttttggttgtatttaatattatttttaggatagggagaaatttttacgttagatttagcgatggaagtagattttttagtaattgagatagtttattgtcgtcgagaggaagatattgttaatggtgatattcgtttgatttatttgtgttggtggaaatggtaatgtaggtattgtttgagggagttttagaaattattgttttggggtagaattcgtaattattttgtgtggttttttaaaacgttttttatttttcgttttcgaataaaatgtttttataaggaaatattagggagaattcgggtttatcgattgtatgttttaggtattttttttggggtaggtaagtagggggttgtgttttttttcgcgttggttgcgcggttttttatcgggattttttcgatggcgtgaggtaaggagtggatcgagaggttttcgagttttgagttgagcgcgtgtgggtcgtgtaggaggttttcgtgtcgtttgtagtttttgcgaggatttaggttcgatagttggtgaggtagttttcggtgcgtgtgtaggagtttagatttttggttttgtttttggtcgggttagtttgggtgttgcggttgcggttgggcgtgtagggggtttaggttgtaggggtcgttgacgtgggagtaaggattttgcgattgggggtagataggttggtagggtggggggaagtatgggggttggaagtcggtattgggggtgtgggatagcggcggggcgttcgtgtagggagattgatttatagtgtttagttggggtaatcgtgtcgtttcgttgttggtgtcgtcgtgacggttttagaagagagcgagaggaaaggtaaagaataaggaattaggcgtcgagttataattatttatataaaatttatttgataagtttgcgtgggaaatcgttcgttttcgttggttggtcgtcgggaaaaaattagttttaagttttttttaggaaatatttttaagtgaaatagatcgaataacgtagagaaattgtatatggagggggtataagagattatttaggggttttttttaaagagaggaaaagatagaaaagggttttttggaatatagtttattaaattgtagcgtgaaattttttttaagtaaaattaaaattttttttaaatattaaatagtagaagcggtttttttttttttttcgatttgaatttgtttgttattgcgttattgtttatttttttttatttatttggagagaaaaaaattataaacgtttaaagattgttatcgttttatgattatttaaatagaaatatatttcgtagaggggttgtaataaaaatatacgtttaaattattagtttaaagaaggttttaattgtaggatcggggtttgtttttttcgttttttttgttaggagtttttttttcgatagagtcgatttatggtttggatagggaaagggggacgttaagttaaggtttaaaatagaaagatttagttttattgggtttaaaagagagaggtgtatttcggggttgtggtttttttttttcgttttttttattttagttttaaagggtagaagaaacgtttgattttaggtttttttattgtaatttttttgtaaaataagcgaa

SEQ ID NO: 2360 - DNA, 2500 bp, Artificial Sequence
  chemically treated genomic DNA (Homo sapiens)
ttcgtttgttttgtaagggaattgtaatagagaaatttaaagttaggcgttttttttgttttttggggttggggtggaaggggcggggggggggggttatagtttcggggtgtattttttttttttaaatttaataaggttgaatttttttattttaaattttgatttgacgtttttttttttttatttaaattataaatcgattttgtcgagaaaaaggtttttaatagaggaagcgaaaaagatagatttcgattttgtagttaaaattttttttaagttggtaatttaaacgtgtgtttttgttatagtttttttgcgaaatatgtttttatttaagtagttatgaaacggtaatagtttttgaacgtttatgatttttttttttttaaataaatggaagagaataaataataacgtagtggtagataggtttaaatcgggggaaaagaaaaggtcgtttttgttgtttagtatttaggaggaattttaattttgtttaagagagattttacgttgtagtttaatgggttgtgttttaggagatttttttttatttttttttttttttgaaagaaatttttaaatagttttttgtgttttttttatatatagtttttttgcgttgttcggtttgttttatttgagggtattttttgaaaagaatttagagttgattttttttcggcggttagttaacgggaacgggcgattttttacgtagatttgttaagtggattttgtgtggatagttgtagttcgacgtttgattttttgttttttattttttttttcgtttttttttaggatcgttacgacggtattagtaacgggacggtacggttgttttagttgggtattgtaggttaatttttttatacgagcgtttcgtcgttgttttatatttttaatgtcgatttttagtttttatatttttttttattttattagtttatttatttttagtcgtaagatttttatttttacgttaacgatttttatagtttgaattttttgtacgtttagtcgtagtcgtagtatttaggttggttcggttagaggtagagttaggagtttgggtttttgtatacgtatcgggggttgttttattagttgtcgggtttggattttcgtagggattataggcggtacgaggattttttgtacggtttatacgcgtttagtttaggattcggagatttttcgatttattttttattttacgttatcgaggaggtttcggtaagaggtcgcgtaattagcgcgggagggaatatagttttttatttatttattttagaaaggatatttggaatatatagtcggtgggttcgggttttttttagtatttttttataaaaatattttattcggaggcggagagtgagggacgttttgaggaattatataaagtagttgcgagttttattttagaataatggtttttggagtttttttaaataatgtttgtattattatttttattaatatagataaattagacgaatgttattattaataatatttttttttcgacgatagtaaattgttttaattgttaaaagatttatttttatcgttgagtttggcgtggagatttttttttgttttgggaatgatgttaaatgtaattaaaagagtttattaaatgtttttaaaatgtaaaaggaagtgtaaaagatatattaagattattttaatcggattttataagtataagtgaaatttaaaagttatgtgtatattttattttgattaaagaaaaattaagtagtaaatttaagtagagggatattaaaatgtagttttttttttattaggggtgttaagtggtgattttataaattattagttaggtttttaacgtttattagaatttgttatattttatattaaattaaatgtttcgagattattgggtaatatattatttgagttttaatttagttattaataaatgtagtttaaaatgatttttaaataagtatggtattagtatatttattatttataatgtaaattaggttattgataatttgaaaatattttttggaattaaatttaaattagtatttttgttttaattttatatatttatggtttttttataatttttttgaaatggaattagagtaagttaataattttattaaagttgtaaaggtttttgttaaagttgtttttttttggagaggaaatgtatttggatgtgatttttattaaaatgttattttaaattattgtattaaatattgtagtagtatgttcgttgatagtttaatgattattatattagattgtaaggaaaatggttagatgaatttatttttttgtttggtgaatttaaaatattatttaagtttcgtaggaaaatagaaaatttattatattttttatttggtttagttagttattgaaatttgttggttatgtttagtagtttttgtatggaaggtaggaaagtgggtatttgatttagtataaggtttagtgagtattg

SEQ ID NO: 2361 - DNA, 2475 bp, Artificial Sequence
  chemically treated genomic DNA (Homo sapiens)
ggggggttgtaaggtttttttttttttacgaggtcgtattttaggttgttttagtggggggaaatttggataatatttaggtttttttgggtaggggtttttgcggtttttcgtagtgtattgtgtttttagttaatagagaatggagaatggcgatgatttttataaagtatattgtttgtaaatatatttttattaaggtatattttgtatagttttagatttattaaattttgatttaatatagtatatgtttttgtgagtataaggttgggataaaagttatagattaatagtattttaaagtagaataaaatggagttttttatgttttttgttttttatatagatatagtaataatttgattttttttttttttttttatatttattttattatatgatattaatattgatttttttatgtaaaatgttagttttaggttttttttatttttgtgttttgtttgtgtttttaagggtgtaattttttgttttttttttttatagttagtgtgtgtgtgtgtgtgtgtgtgtgtgtgtgtgtgtgtgtgtgtgtgcgcgttatattttgatatattattagaatttaaattaatttattttgttatatttttttgttattgataattttttatttagttatgttataaatgtattttttaaagtaagtgtttgaagagatagggttttattgtcgtttaggttggagtgtagtgttgttattatagtttattgtagttttgatttttttggtttaagtaattttttcgttttaattttttgagtagttgagattatacgtgcgtgttattatgtttggtatatatttattttttattatttgtgtttgtatgtgtttagaggtatagataatattaaaatgaaaagaggtggtagagaataggaagagaaagaaattagaggagtcgatatttttaaatgttgtggtttttaaggattgttagtaggttgtggggttagttagaaaaaatagagtttttgattttagaaggtttggagaaagcgtgagaagggagattagattagaatagattgatggaagggaaaggcggtgagggtgaagtaagagaaattcggttttagtgaaaaggatttattattgtattttagaacgtaatttgtattttatatgtaaatgaggaggttttttagaggttggattgggttgggtttagttgagtttttgtaaatagtagggatttaattttggggaattgtagattaaagtgagagagggacgtatcgtatttttaggtatatttaaaaaggatggacgagatatcgaagtagaggatataggaggattaaaggatttaggaaagtaagtagtttttcggagaagttgtcgaaatttaagattggtaagagaagtaaatttaattttttatatcgattattttttattttttgaaaagaagagattgtttttttagggaagtgaaaataatgaatttttggaggtattgtttttttgtttttattttgtttagcgtggttatttttgtgagattttatagtagttaattgagttcgttaaaaagttatgagaagttgaatagttttagtgaaaggtattttaggaaaattgtttgtaattacgttttagagaaaatgttagtttttttgtgggaaaatatattattattatttttgcgaagtgttttttgtaaggattatttgatttagaattattatattataagttttttgtcggaagaagaggttgtattttttttggtttatgttatggttatttataaggattttgatatttttgaaaggttttttagggttatttatatgttttaaaatgtttattgtgtttacgtggatgagaaagttttagttgagtataaggaatttgtgaggtagttattgagttgtttttaaaatgtttttattgttttaaagatagagtttgtggtttatgtaggtatttttagattttaggttgatttgaattgtttgaaagattttgtcgtttttgaggttttttggaagtacgttattaatatttgtggataagatttttttttgaaaattaatcgggagatagtttagtatttgaaaggatttaaagggaaaaatattattttaggggtgttgttttttgattatgtaattaagcgaattaaatatgtttattaagagtatatagataaaggtggtttttttgtgaaaaatattaatattttgaaaattttatttttatattagttgattatttattttggtattgtttatgtggcgtttattagagattttgtcgattttgttttacgtgattaaagggttattgatttattataatggttaaaagatatttatagttttgatgagtatttttgggtgatatttaatagggttttaggtaggtattaatttttattttgattgatagattgagtttgttaatattttgttcgtttagagaattgatttatttgaaat

SEQ ID NO: 2362 - DNA, 2475 bp, Artificial Sequence
  chemically treated genomic DNA (Homo sapiens)
attttaaatgagttagttttttaggcgagtagaatgttagtaaatttaatttattaattagaatggaaattagtatttatttgaaattttattaagtgttatttagaaatgtttattaggattataggtattttttgattattgtagtagattaatggttttttggttacgtagaataaagtcgataaagtttttggtaagcgttatataggtagtgttaaagtagatggttagttgatgtggaggtgaagtttttaaaatattagtattttttataaaaaagttatttttatttgtatgtttttggtggatatatttagttcgtttaattgtatggttaggaggtagtatttttggggtgatatttttttttttaaatttttttagatgttgaattatttttcggttggtttttagggggaagttttgtttataggtgttgatgacgtatttttagggaattttagaggcgataaggttttttagatagtttaggttagtttggagtttggaaatgtttgtataaattatagattttgtttttgaagtaatgaaagtattttggaagtaatttagtaattgttttatagattttttatatttagttggggtttttttatttacgtgaatatagtagatattttggggtatatagatagttttaaagagttttttaaaggtgttaaagtttttatggatgattatgatataggttaaagggaatgtagttttttttttcgataggggatttgtgatgtagtgattttgggttaggtaatttttgtaagggatatttcgtaaaggtgatggtaatatatttttttataaaaagattggtattttttttaaggcgtgattataggtagtttttttaaaatattttttattggaattgtttagttttttataattttttggcgggtttaattggttattgtaaaattttataaaaatgattacgttgagtagagtgaaagtaaaaaagtagtatttttaaaagtttattatttttatttttttggggaaataattttttttttttagggaatgagaaatgatcggtgtgagaggttgaatttgttttttttgttagttttgaatttcgatagttttttcggagggttgtttgtttttttgaattttttaatttttttgtattttttgtttcggtgtttcgtttattttttttggatgtgtttggagatgcggtgcgttttttttttattttggtttgtagttttttagggttgaatttttgttgtttgtaaaggtttagttaagtttagtttagtttagtttttaggaagtttttttatttatatatgaaatgtaaattacgttttggaatgtaatgatgggttttttttattggagtcgagttttttttgttttatttttatcgttttttttttttattaatttattttgatttgatttttttttttacgttttttttaagttttttagaattagaggttttgttttttttggttagttttataatttgttggtagtttttaggagttatagtatttaaggatatcggtttttttggtttttttttttttttgttttttgttatttttttttattttagtgttatttgtatttttgggtatatatagatatagataatgaaaaatgaatgtgtgttaggtatggtggtacgtacgtgtagttttagttatttaggaggttgaggcgggaggattgtttgagttaaggagattaaggttgtagtgagttatgatggtagtattgtattttagtttgggcgatagtgagattttgtttttttaaatatttattttaaaaaatatatttgtaatatgattaagtagaagattattagtggtagaaaaatataataaggtagattaatttagattttaatgatgtgttagaatatagcgcgtatatatatatatatatatatatatatatatatatatatatatatattgattatgggaagagggaataaagaattatatttttgggggtataggtaggatataagggtggaaggaatttaggattgatattttatatgaaagagttagtgttgatattatatgatgaagtaaatgtggggaaaagaaagagagattagattgttattgtgtttatgtagaaaatagaagatataagaaattttattttgttttgttttgagatgttgttaatttgtaatttttgttttaattttgtgtttataaaaatatgtgttgtattgaattaaggtttaatggatttagggttgtgtaggatgtgttttggtaaaaatgtgtttgtaggtagtatgttttgtaaaagttatcgttattttttattttttattaattagagatataatgtattgcggaaggtcgtaggaatttttgtttaagaaagtttgggtattgtttaggtttttttttattgagataatttgagatacggtttcgtgggaagggaaagattttatagtttttt

SEQ ID NO: 2363 - DNA, 2426 bp, Artificial Sequence
  chemically treated genomic DNA (Homo sapiens)
ttaatttttgtatttttagtagagatggggttttattatgttgtttagaatggttttgattttttgattttatgatttatttgttttagttttttaaagtgttgggattataggtataagttattgtgtttggtttaagggataatttttaagattttttgtggatgtcggatattatcgttagtattaaataatttgattattattaattagaatttatttttgtttttattttttatttataattgtaatgttttttttattttaattaagtatttattatatattatggttataatttttgtagtttgaggtatgatagtaaaattagtatatattttattttttttttttatatttttatagatggaagagttttttttattatagattatagtaatttcggtatatgatttttttttttttttattaagttaagaatttttattttgattttttatttaaaggaagtattttatagtttttttttggtatatttaaatttttaatattattatttttgtattttggggttgttgttaagtaaaataagggtgatttgaatataagtattgtaatattaggatattcgatttgagatttgagttaattacgatgtaattaatagtcggggattgtgtatagtatgggtatattggataagaggataattttattatattattgagaatggtatgtagtttaaaatttatgaattgtttatttttgaaattttttatttaatatttttggatcgtggttgattttaggtaatagaaattaaggataagtggggggtattatatatatatatgtatatatgtatgtttatttgtatatgtgtgtgtatatgtatatatgtgtatttttatatatatatatatatatataaagatatagaaggatatatagtagggattttaaattggtggtttttgaagtggaaattaatatttaaaatttttttgatttttgaattcgtttatatttgattttgtattttttattattttatagatttagatatttttgattttttaatgttaaagtttatatatttgtattaatatttatataaattaatttattttatgtatatatttatattaattttattattatttaatttatatttatattaattgtttggttttataagtatttagttcgtgattttgaatatgtttaggtattaattatggttttttttaggttatgagtcgtttttaatttttttttttttttggtttgttttgtttaattttgttaaaataaataaatatggtttttgtaataatggagaaagacgttattttaattaaaaagtaataataatgtggtttgtggttttttgggttgtttgggttacgttttattggtttttattgagtttggtttttttgggttgttgttttttttgtttttttagtttgttttaaatgtgtcgttaagtgagcggttggggtttttttttttttttgtgattggggtttagtgagagttggcggttggatattgtttgaagaatgggttttttttggaagcgtttggaaatttagttggggtttgaggtttttttaaacgttgaatttaagcgtggggatttagtttttggaaatgttaattgttttattttgattgggattgttgatagatatattgttttatgttaatgtggtattattataatatagttttatttttagttattgtaagttattaagataatatttggtttgaatttttttttattatggtttaaaaaaataaaagttgaaatttaaattatttttttaatattttgttttttttttttttttttttttttttttttttttttttgtattttagaaattttaaatgagggggaggagtttagaaattgtttattttatgtgtttttttttttattttatagatggggacgttgaggtttagggaggagtagtgatttgttatattataaattttgttaaggtaagtagtttaagttttttaggttttttatttgtaagttaggatggtattgatttttttttatattatttttaagggatttttttaaggggtagataggatggggtatggtgattagtaaggagtttaggtaagtattagttgttgttatcgtttaagggtttttagttaattggtagtagaattaggtttttttagaatttgagttttttgatttttaatggtaatgtattttataatttattcgggaggaaggattaagattataatattaatattttttaacgtgttggatgttttattaagtgttttatgaatagtgtaatattatagaggagagtaacgtgttggagtttagttacgattttgagtaagtatattatttttgaaatttttttttatttgtgaaaaatggaaatagtaatggggtaacgagattgttaagagga

SEQ ID NO: 2364 - DNA, 2426 bp, Artificial Sequence
  chemically treated genomic DNA (Homo sapiens)
tttttttaataatttcgttattttattattgtttttattttttataagtggaaagaggttttaagagtgatgtgtttgtttaaggtcgtagttgggttttagtacgttgtttttttttgtgatgttgtattatttataaaatatttagtggagtatttagtacgttagaagatattagtgttatgattttagttttttttttcgagtaaattgtagagtatattattattggaaattagaggatttagattttagaaagatttaattttgttattaattaattagaagtttttggacggtggtaatagttaatgtttgtttaggttttttattgattattatgttttattttgtttgttttttgagggggttttttaaaggtgatgtggggagaggttagtgttattttggtttgtagataagaaatttgggagatttgagttgtttattttaataaggtttgtgatatagtaggttattgtttttttttgggttttagcgtttttatttgtaaaatggggagaagggtatataagatggataatttttaaattttttttttttatttgaagtttttggagtgtaaaagaaagagaaaagggagaggaagaaaaaagagagatagagtgttaaaggagtggtttggattttagtttttatttttttaggttataatgagaaaagatttaaattagatgttgttttagtgatttgtagtagttgagagtggaattgtgttgtgataatattatattagtatgaagtaatatatttattaatagttttagttagagtaaagtagttggtatttttagggattgagtttttacgtttgagtttagcgtttgaaaggattttagattttaattgggtttttaaacgtttttaggaagggtttattttttagatagtatttaatcgttagtttttattggattttagttatagggaaaggaagggattttagtcgtttatttggcgatatatttgaggtaggttggggaggtaggaagagtagtagtttagaaaagttaggtttagtgggggttagtggagcgtggtttaaatagtttagagggttataggttatattgttattattttttaattaaaatggcgtttttttttattattataaaagttatgtttgtttattttagtaaaattagatagggtagattaggaaaaagaaaaaattaaaaacgatttatgatttagagagaattatagttaatgtttgggtatatttagagttacgaattaaatgtttatggggttaggtagttgatataaatgtgaattgggtggtagtaaaattaatataaatgtgtgtatagggtgagttaatttatataaatattaatataaatatgtgaattttgatattaaaaaattaggaatgtttgaatttgtgaagtaatggagaatataaagttaggtgtaaacgaatttaaaagttagagagattttaaatattgatttttattttaggggttattagtttgaaatttttgttatgtatttttttatatttttatgtatgtatgtatatatgtaaagatatatatatatgtatatatatatatatatatagataaatatatatatatatatatatgtatataatattttttatttatttttggtttttgttatttaaggttaattacggtttaaaaatattaaatggaaaattttagaaataaataatttataagttttaaattgtatgttatttttagtagtgtgatgaaattatttttttgtttagtatatttatgttgtatatagttttcgattgttagttatatcgtagttggtttaggttttagatcgaatgttttggtgttgtagtgtttgtgtttaagttatttttattttatttagtaatagttttaaagtgtaagagtagtgatgttgggaatttggatatgttaaagagaagttgtaaagtgttttttttaagtgaaaagttaagataaaagtttttgatttaatagggaaagaaaaaagttatatgtcgaggttgttatgatttgtggtaagaaagatttttttatttatgaaaatgtgaagaaggaaaatgaaatgtatgttaattttgttgttatattttaaattgtaaaagttatggttatagtatataataagtgtttggttaaaatggaaaaggtattataattgtgggtggaagataggaatagaaatgagttttgattgatggtaattaggttgtttggtgttagcggtagtgttcggtatttatagggggttttagaaattattttttgagttaggtatagtggtttatgtttgtaattttagtattttgggaggttaaggtaggtggattatgaggttaagagattaagattattttgggtaatatggtgaaattttatttttattaaaaatataaaagttaa

SEQ ID NO: 2365 - DNA, 2422 bp, Artificial Sequence
  chemically treated genomic DNA (Homo sapiens)
ttgtttaagggttataattttttatggttttaggttttttatatgtaaaattaggataataatgttttttattttatgaggttatttaaaggaaacggtgagattatgtgttttgatagaatatattttaaagtttttattatggtttttgatatataggaggtgtttaggaaatattaggtattattgttattgtaataattaggaaaatttttgttattatttatatgtgatagaattgagggatattagatttggaaagtagttgggttattgttttggatgatttgtttattttatgtttgaggaaattgaggtttagtatgtttgtttaagtttatatagttaattagtggtggagttaagaatagtatgagtttatattgaaaggaggttagttgtgtttatattaattttatttaatttttttaattaagttgttgatttttttagtgacgttatttatttgttttagaaatgagttatataagcgcgtttttttttattatttatttgttttttttgagaagagtatcgggttgttttaaaataagtaaagattcgagagaatatttttgttttattgtttttgttttttgttgttgatttatttatttttgggtttttgagttcgtttatattaattatttatttttagaagaatatattgcgttcggttttataggtttcgtgtagttggagttttgtaatgttatttttgggaggttttattgtaatgtaaggaaaggttattgttaggtttttttttttgtatagagtatggtatttagttaatgattatgtttagttaaaaatttttttggtttttaaaatttaagttaggtaattttaagaggaacggtatttaaatagatgtgttttttaattatatagttttaaaataattggataaaaagaatatttgttttatttttttattattaggtatttaaatttagttttaaataggtatataaatagttgggtattttaggttgatgatatttatttttagggtaagtggttaattttttttttaagttcgaataataaatgtttaattatttttttattttttttaaatagtaatgtgttttgtatttagtttgtgtttgtttgtcggtgtagagttgatattatttgattttattttatagagattttgtgtttgttagatgtttaaataagtggttgatttagggtaaaaatattagttaagttatttgttttatttagttaaagaattagtgtaggtaaagtaggcgagttagtagtttagcgtaggtaaagttgcgtgttttcgaatgatttttttagtcgttatttttgggagggttgggtttttggggtatttttaaaggaattgttttgggtttaaggtaatatttttttttagtagtttttttttttttatttttagtggttattttaattattttaataggtaattttaaagttagttagaagtaattttagtttattaagtttgaatgtgaaaaggagtaagtaaagatttgagtttttttttgtttttttttttatgagtaatatgtgattttttaaaaattattgtagtaagaatatttaatatgaaatttatttttttaataaatttttaagtgtatatgagtttttaaaataaaataatttgattttttaatgatcgttattttaattggcgtgagatggtatgttattgtggttttgatttgtatttttttaattattagtgatgatgagtttttttttatatgtttgttggtcgtataaatgtttttttttgagaagggtttgtttatattttttttttagtttttaatggggttgttttttttttgtaaatttgtttaagttttttgtagattttgtatattagttttttgttagatggatagattgtaaaaatttttttttattttgtaggttgtttgtttataatggatgttagagaggatgtggagaaataggaatatttttatattgttggtgggagtgtaaatgagtttaattattgtggaagatagtatggtgattttttaaggatttagaattagaaatattatttgatttagtaattttattattgagtatatatttaagggattataaagtattttattatatagatatatgtatatatatgtttattgtagtattatttataatagtaaagatttggaattaatttaaatgtttattaatgatagattggataaagaaaatgtggtatatatatattatggaatattaagtagttataaaaaaggatgagtttatgttttttgtagggatatggatgaagttggaaattattatttttagtaaattaataaaggaacggaaaattaaatatcgtatgtttttatttataaataggagttgaataaatgagaatatatggatatagggaggggaatatcgt

SEQ ID NO: 2366 - DNA, 2422 bp, Artificial Sequence
  chemically treated genomic DNA (Homo sapiens)
gcgatgtttttttttttgtgtttatgtgtttttatttgtttaatttttatttatgagtgagaatatgcggtgtttggtttttcgtttttttgttagtttgttgagaatgatggtttttagttttatttatgtttttgtaaaggatatgaatttatttttttttatagttgtttagtattttatggtgtatatgtgttatattttttttatttagtttattattggtgggtatttgggttggttttaagtttttgttattgtgaatagtgttgtaataaatatatgtgtgtatgtgtttgtatagtagaatgttttataattttttggatatatatttagtaatgggattgttgggttaaatggtatttttggttttagatttttgaggaattattatattgttttttataatggttgaatttatttatatttttattaatagtgtaaaagtgtttttatttttttatattttttttggtatttattgtaaataggtaatttatagaatgggagaaaatttttgtaatttatttatttgataaagggttaatatatagaatttataaggaatttaaataaatttataagaaaaaaataattttattaaaaattgggagaaggatatgaatagattttttttaaaagaagatatttgtgcggttaataaatatatgaaaaaaagtttattattattggtgattagagaaatgtaaattaaaattataatgatatattattttacgttagttagaatggcgattattaaaaagttaggttgttttgttttaaaggtttatgtatatttaaaaatttgttaagagggtagattttatgttaggtgtttttattataataatttttaaaagattatatgttatttataagaaaagaaataagagaaagtttaggtttttgtttgtttttttttatatttaagtttgataaattaaaattgtttttggttggttttaaggttgtttgttgaagtagttgagataattattggaaatggggaaggagaagttgttgagagagaatgttgttttgagtttaaggtagtttttttaggagtgttttaaaagtttagtttttttaggaatgacggttggaaagattattcgaggatacgtagttttgtttacgttgggttattgattcgtttattttatttgtattgattttttaattgagtgaaataaatggtttgattaatatttttgttttgaattaattatttatttggatatttagtaaatatagggtttttgtgaaataggattaggtaatgttagttttgtatcggtagatagatatagattggatgtagagtatattattgtttaggaaaaataaaaagatgattaggtatttattattcgagtttaggaaggaaattagttatttgttttgagagtggatattattaatttgaaatgtttagttatttgtatatttatttaaaattgagtttgaatgtttggtagtaggaagatggaataaatgttttttttatttagttgttttaaaattgtgtggttaaaagatatatttgtttggatgtcgttttttttgggattgtttgatttgaattttaaaaattaaaagggtttttagttggatatgattattagttgggtattatgttttgtgtagaggggaggatttgatagtggtttttttttgtattgtaatgaagttttttaggggtggtattgtagagttttagttgtacggggtttgtgaggtcggacgtagtgtgtttttttgaggatgggtgattgatgtgagcgagtttagaggtttaggagtaaatgagttagtagtagggagtagaagtaatgaaataggggtattttttcgaatttttgtttattttgggatagttcgatattttttttagagggagtaaataaatagtggagggagacgcgtttatgtaatttatttttaaaataagtgggtgacgttattgaaggaattaatagtttaattaaagaagttaaatagaattgatgtaaatatagttggtttttttttaatgtagatttatattatttttagttttattattaattaattgtgtgaatttggataagtatgttgggttttagtttttttaaatataaaatgagtaggttatttaaggtaatggtttagttattttttagatttaatattttttaattttattatatataaatagtggtagaagtttttttaattgttgtaatgataatagtatttaatattttttgagtattttttatgtgttaagaattatgatagaggttttaaaatatattttattaaaatatatgattttatcgttttttttaaataattttatgaggtagagaatattattattttgattttgtatgtggagaatttgaggttataaaagattatggtttttggataa

SEQ ID NO: 2367 - DNA, 2365 bp, Artificial Sequence
  chemically treated genomic DNA (Homo sapiens)
aatgtaattattaatgttatttgttataggtttaaaatattttattatttttaaaaagaaattttgtatttattaaatagttatttgtatttttttttgttttaagtatttggtaatagataatttgttttttgttgttatggatgtatttgaatatatatttttaaataattgaaaataggtatttaaataaatatttgtatatgaacgaagatttaattttaaatgggtaattttgaaaaaaattagtttgtaggttagttaattttagaaagtgagtttataaagaataggttgggtggttataatgtttattgaatttattaaaatttgtttttattttgtattttagtttagattgtttttagtgttaaaagtagaattagaagattataatggtttttagaaataagatgaattaatatgaatggtgagttttgagtgagttaggttataatttttagtaagaaaaatatagaatttaaattttattgtttttagtttttgttttaattgttttataattgggaaattttgtttttaaatgaatattattggtaaataattttttttaattgaaggtttaaaatgtttgggtaaaattaaaaatgattttttatttaaggtttagtaatagttaaggtatttaaataggagtaggttgaagaatcgtttttaggtttggttttagtaaatttgtaattatttatttttttatttagatttattttgaataaagtaaagggtaattaaagtgtattaatcgtttattgatgatttaagataaataaaaattttataatttttgttttaaatagtgtgtattgagatatatagagagagagagaaaaaaaaaatagttttttttaggtggtgaataattatttatttattagattttttttaagttaagagttttattgtttatgttaggtttttggatatcgtatataaaataaattaagttttattaatttagtggaatatttggaaatattaattttataggtgtatgagagaaaattgtagttttaagtattagagtattattaaatataatatatttcgtatgtaggggtagttatttaatattaaattaataaaatattattagtgtcggtgagagttttggttgttgatagtaggttaggtgttttatagttatgtcgtttttttgtttgtaggttaattttatatagttgtttttttttggaaattatgttttatttgaagttttcgtaagtatgataaatagtttttttaagttttagcgacggtggagaaatttgaaaatatttaggagtatttattaattagaatatgaaagaagatttagtttaattgtagtttttgattgtgtggaggttttgttattgtaagaaatgttatttgtttgggcgtgtatattttttgtaggatattgtgtaaaattattattttgagggtaaagttaagtttaaattgtatagaaattttaacgttgatttataagtggataaaattagaattaagtttttatttttaaatttagttgtttggtggtattgttgatttatatgttgttattttacgtattataaatgttagatagagttttttgtatagggagttttaaatttgtgtaggaatttaggatttataggaaaaagatatagaaaaaaagaaagattaggtgttaattgaattgtttaaattaggtttgtaatatgtaaagtatattgagattaaagttaggagaggtggatttagttgttggagtttgggatgaataatggaggaagggaggatataggtaattggtaggggttaaggatggggtggggtggttttgtgtatataatatgatatattttgagaaaaagtgaattaatatggttaaagtggagagtttatgaaaagtttatggaggtaagtagaaggagagaaatgtagatatattgaatggttttattatagaggtttttgaatattaggataggatatagattttttatttaattataggaaatgtggggtgatgagggttttgggaatatgagtgtgatataagaaggaagggtttggggaaattttattataatagttttttagattaattgatatggagagaattgagaaatgtttagtatgtttagaggattgagtaatgagagatttgtacgaggttggaattggtagtgataaaaaggaatggaatgttttaaagaattatttgaaagagagaaatattttgaaggaagtatttataggatttgagaatttattgggtgtagagagtgacgtgtgggtaggtttaggcggattttgggattttgagtttaggttatttaaataataaaataagaaaatttaaagagtaaattga

SEQ ID NO: 2368 - DNA, 2365 bp, Artificial Sequence
  chemically treated genomic DNA (Homo sapiens)
ttagtttattttttgagtttttttattttgttgtttaagtggtttgggtttaaagttttagaattcgtttgaatttgtttatacgttattttttatatttagtgagtttttaggttttataaatattttttttaaaatgttttttttttttaaatgattttttaaaatattttatttttttttattattgttaattttaatttcgtgtaggttttttattatttaattttttaagtatattgggtattttttaattttttttatgttaattaatttaagaggttgttgtaatggaatttttttaaattttttttttttatgttatatttatgtttttaaagtttttattattttatattttttgtagttaaataaaagatttatattttattttggtgtttaagagtttttgtaatgggattatttaatgtatttatatttttttttttttatttgtttttatggattttttatgaattttttattttagttatattggtttatttttttttaaaatatgttatgttgtgtgtatagagttattttattttatttttagtttttgttagttgtttatgttttttttttttttattatttattttaaattttaatagttgggtttattttttttgattttagttttagtgtgttttgtatgttgtaagtttggtttgaataatttaattagtatttagtttttttttttttttatattttttttttataaattttaaatttttgtatagatttgaagttttttgtataaggagttttatttgatatttgtgatacgtagaatggtagtatgtggattagtagtattattagatagttgagtttgaaagtaaagatttgattttaattttgtttatttatagattaacgttagaatttttatgtagtttaaatttagttttgtttttagggtgataattttatatagtgttttgtaaaagatatatacgtttaaatagatagtattttttataataataagatttttatatagttaaaagttgtagttgaattaaatttttttttatattttagttaataaatgtttttaaatatttttaagtttttttatcgtcgttaaggtttagagaggttatttgttatatttgcgaaggttttaaatgaggtatgatttttagaagaaagtagttgtgtaaaattggtttgtaaatagaaagacggtatggttgtgggatatttagtttgttgttaataattaaaatttttatcggtattggtaatgttttattggtttaatattaaataattgtttttgtatacggagtgtattatatttaatggtattttaatatttggaattgtagtttttttttatgtatttgtaaaattagtatttttaaatattttattaagttaataaagtttaatttgttttatgtgcggtgtttaaaagtttgatataggtagtggaatttttgatttggagaagatttgatgggtaaatggttatttattatttaagagggattgttttttttttttttttttttttatgtattttaatgtatattatttgaaataaagattataaggtttttgtttattttgagttattagtgagcgattaatgtattttggttattttttgttttgtttagggtaagtttggatggggagatgagtaattgtaggtttgttaagattaaatttgaagacgattttttagtttgtttttgtttgaatgttttaattattattaaattttgggtagggagttatttttagttttgtttagatattttaagtttttaattagaaaggattatttattaatagtatttatttgagggtaaaattttttaattataaaatagttaaaataaaagttgaaaataatgaaatttggattttgtgttttttttattgaaagttatgatttggtttatttagaatttattatttatattaatttattttgtttttagaagttattgtgattttttgattttgtttttggtattaagaatagtttgaattaaggtataaaataaaaataggttttaataaatttaatgggtattgtggttatttagtttgttttttatagatttattttttaagattaattgatttatagattgattttttttaaagttgtttatttaaaattggattttcgtttatatgtaagtatttgtttgaatatttgtttttaattatttgggggtatatatttagatatatttatggtaatagagagtaaattatttgttgttaggtgtttggggtaggggagagtgtaagtgattgtttaataggtatagggtttttttttgggggtgatgaaatgttttgagtttataatagatagtattaatagttgtatt

SEQ ID NO: 2369 - DNA, 2356 bp, Artificial Sequence
  chemically treated genomic DNA (Homo sapiens)
tatgtaacgggaatgtttttatttattgttataaatattataggagttataatttaattttttaatgaattattattttgaaatagtaggtagttgaaaagataatttgtagggatatgaggaagtgtttatgaaattttaaggttatatattttattattattttagaaatagtatgtttgtagtttattttttgtaaatttaagaaaattttataaaatttttatgagattgagtgatttaaaatttttttttttttaggtttatgtaaaatttttataggtgatttaaaaatgtaaattttgatttatgggataagtagaattttttagattttgtagttggtttgagtgttagtatatggtttatagtattaaggcgaaatggagaaaaaagcgtgaaaagataaaagataatttatgcgagttttaggacgaaatttggaaaaaaatttagtttttatttttttaatttaaatagttattaaaagattaatgattatataatatagtattaaaatatttatgtataaatatatatattttttattattttatttatattatgtatgtgatttttgtatataaaatataaaagaatgttagaaatagtaaagttgttaaggttatatagagattgttattttagatgatttaaaaaattttaatgatcgtatatatagatttgagagatgtagaggtatatagttgtagttttagaatttagttttatttattatttgtttgttagtattatgaattttggttgagagttgttttgtagatttgagaattttgtttttttttttaagtattttgggttgagttttttaggggattaatggaatttagaagtaatgtttttttgtttttaaatttggggtaaaataagggtaggttattaattttaaggtaggttattaatttagttatgggttttttatatgtttttgtttgtaattgtgtggtagattagatatttagttatttattttttgtaagggaagttatttaatgtagatgtttaaggaattttacgtttaaatacggttattgttgaatttgatgggagaaaaaaaggattgtatttttgttggttaatgcggtatttttggatgtttattaagttgttaaaaaatgtgaaatgatgatttattgtgaagtttttttaatttttttttttgttttaatttgtttgcggtttgaaggaatgtatattgatttgagttaaagaagaaatttgtggtttttattatagtttgtaaatatcgattgttgaaagttttaagtgtgttattattttttgttatatatatgttttatatatagtttattttggaaaatagattgggagagtatcgtgtttataattttagagtaatttaattaatggggggttggtttgtttgggggtttcgagattattattgttaatagtggaggttttttttgatgttttttaagttaaagtattaagagagaagttaaagataagttttattaaagaaagatttttttggtatttatagtggttttttgttgttttattattagtaaaagagatataaaaaaatttttgttttttttttaggttgtatttttaggttttatttttgatgttattgaaaagttggtttatttattatttttaaggttattggtaatgttattatttttgattaatgattagtttatggttaagtagtattttatggttaggtgatggttatattgaaagtttagattttagtattatgtaatatagttatgtaataaaattgtatttgtattttttaaatttatttttaaaaagtttaatttaattatgtaggagtggtagtagaatgtaaattatttagggaattattttggtagtgtttgatggatttaaataatattaagagaaagattgtagagggtattttgagatttgtatgatattttgattagggttgataagaagagttaaatggataagttttttttggaaggagatattatggatgtggtatgggtagaaaaagtataagatgtagtattagaggattcgaatgtgttttttggttttgatatttagtggttttgtgatttagggtattgttttttagatattaatatgggtatatattatttggggggtttgttaaatgtagattttgatttagtaggtgtgggtggggtttaaggttgtttattttggttattttgtatttggttgtgagaaatagagaatttggtaaggtttttaatttacgtaagttttagttttttttttaataatacggggtttagaatgatgttaattttttagggttattgggatttatggtattggtaagagtttttggtataggtat

SEQ ID NO: 2370 - DNA, 2356 bp, Artificial Sequence
  chemically treated genomic DNA (Homo sapiens)
gtgtttgtgttaggaatttttattagtgttatgagttttaataattttggaaggttggtattattttaaatttcgtgttattaaagaagaaattgagatttacgtgggttaggagttttgttaggttttttattttttatagttaggtgtaagatgattagggtgggtagttttaggttttatttatatttattgaattagaatttgtatttaataaattttttaggtgatatgtatttatgttaatgtttaagaagtagtgttttaggttataaagttattgaatgttaaagttagaaggtatattcgaattttttgatgttgtattttgtattttttttatttatattatatttatgatatttttttttagaagaaatttatttatttagttttttttattaattttggttaggatgttatgtaaattttaggatattttttgtagttttttttttggtattatttaaatttattaggtattattagaataattttttggatggtttgtattttgttgttatttttgtataattaaattaaattttttaaaaatagatttagggggtataaatgtaattttgttatatggttatattatatagtgttgaaatttgggtttttaatataattattatttaattatggaatattatttagttataaattaattattaattaaaaatgatagtattgttagtggttttggaaataatagataaattaattttttaatgatattaagaataaggtttaaggatataatttaaaagagaagtaaagatttttttatgttttttttgttgatgataaagtagtaaagaattattgtgggtattaggaagatttttttttaatgaggtttgtttttggttttttttttgatattttggtttaaaagatattagaggggatttttattgttaatagtgatggtttcgagatttttaggtagattagttttttattagttgggttattttggagttgtaaatacggtgtttttttaatttgttttttaagatgaattgtatataaagtatgtgtgtggtaggagatgatagtatatttgaggtttttagtaatcgatgtttatagattataatggaaattataagttttttttttaatttaagttagtatatatttttttaagtcgtaggtaaattggagtagggaagggggttgggaaggttttatagtgagttattattttatattttttaatagtttaatgaatatttagaaatgtcgtattagttagtaaaaatatagtttttttttttttttattaaatttagtaatgatcgtatttggacgtgggattttttgagtatttatattaagtgattttttttatagaaggtaagtgattaaatgtttagtttgttatatagttataagtaaaagtatatgaagagtttataattaagttaataatttgttttgaagttaataatttgtttttgttttgttttaagtttgggagtagggaaatattatttttaggttttattaattttttgaaaaatttagtttagagtgtttggaaaagaagatagaatttttagatttgtagagtagtttttagttaagatttatggtgttaatagatagatggtaaataaagttgggttttaaggttatagttgtgtgtttttgtattttttagatttatgtgtgcgattattaaaattttttagattatttaaaatagtagtttttgtgtaattttggtaattttgttatttttgatatttttttatattttatgtatagaggttatatgtataatgtgggtaaaataatgaaaaatgtgtgtgtttgtgtatggatattttaatgttatattatgtagttattagttttttaatggttgtttgaattaagaaggtagaaattgagtttttttttaagtttcgttttgaggttcgtataaattgttttttgtttttttacgtttttttttttatttcgttttaatattataggttatatgttagtatttaagttaattataagatttgaaggattttatttgttttatgaattaaaatttgtatttttagattatttgtgagaattttgtatgagtttgaaaggaaagaggttttgaattatttagttttataagaattttgtaagatttttttgaatttataaaaaataaattgtaagtatattatttttggaatgatagtaggatatgtaattttgaaattttatggatatttttttatatttttatagattgtttttttagttatttgttattttaaagtagtaatttattaaaagattgaattataatttttgtaatatttgtgataatggataaaaatattttcgttatata

SEQ ID NO: 2371 - DNA, 2474 bp, Artificial Sequence
  chemically treated genomic DNA (Homo sapiens)
aagtttttttgtaaatatttataattttatataatttattattatttattaggtatattttttaatttatatgttttgaaatttttaaattttgaaatgttagaagtaaatttgggaattatttagttttattatttatttaatgatgaaattttaaattagatatttttttagttgattgattgataagttttttatttttttttaaaaataatgtttttttataagtttttttaaattatttttatttatatttattaaaagtagtaatgaagttaagggttattgttttgggtagatgtttgtggatattagatttttaggaagattaagtttaggaatttagttttggaggtttaaattttttggaagtaattatatttatgtttagtttttttagatttatgagtttaaataaaaatttttttttgaggtattatttttttgtttgtagttattattagtatttttgttatagtaggttattttttttgttgttttttttgttagttttattttttttgaaatatataaaattgtttgggatataaaattttttttttttttagttttgtgatttggattattttttattatatattgaattttttcgtattttttggaagtttgatggtttgttttagaatttagtaaattgggtagagtggattttttaaaggtaagtgagtattgtgagtattatttttttaaggtgaagagtgtttttttatttagagagtattgattttgagaagttatttattgtttttgttaaagtagattttgagtttaggtgttttttagatgtgattttgaagttgagtttttttattttttaagtttgattttggataaattgttggattttttttattttttgttttgtttttttgtgtaatgggaattaggatgtcgagtttagtggttgttatgagagtttattgaagtaatgcgaaatatttagtgtagtgtttggtgtttagtaggtattttatagttttgatgtttttggggtaggtttattttagaagttttaagaaattttaaaatgagttttatgatgtttgtcgtgtttggatataaaatgagaaatagaaaatttgtttttttattttatgggtggagtgttgtttttttatattttaattttttttaataagaaaagggcgttttgaatgtggtgggaaagggtagattatatggtgggaagttatgtaatataagatatattttattgtatggcgtgtttttgtattatagatgtgtatatagatgtgattattaatagagataattagtttataagttttttttggaaattttttatcgtttttagtagaaaagtgatttttagttaaggtttgagttgaagtttagtttatgattaaagtatttttaattgttttatattgaaaagaaagaaaagagaaatgattagtagtggttttttagttaaggtgtgagattagaggttatttaaaaggtttaagtttattaaaataagtatttgttgtggttttttttttttgttttttttttttttttttttttttttttttttttatttttatttttattttttttttttatttatttttttattatatatttttttttttttgtttttttttttttttttttttttttttttttttttttattttttatagaaaaatattattttatgttaaggaaatattgagtaatatttatttatcgttgagtttgttaatgtggagagggtatatttgtttattttttaagttgtgtaattttattattattatttttattggtgatatgtgatggaagttttatgtaaatgtttaaagtagtagtttagtataataaatataatttttttaggatttaaggaaaaatttgagtttaattttggtttataatttttaattatgtagtatttttaaatatagtagttttgcggattaaataaaataaatgtatgaatataaggtatttttataatatatatggaattatagtttaagttttattttttataatagaagtagggtttgagaaatagatttaggtgtatgttattttgggtggtaaatattttaggaggaaggggagtgaaggaagtagatggagtaggtggaggagttgagtttaggatgtggttttttttggagtttggatttattttaattttatagagagttttggagtgtgaattatatatatgaagtttgtttttattttgatgtggttggttggttttttgtattttttatgtttattagtttttgtaggtgggttgtttttgggttgggggtggcgaggtaattttttaggtaaatgtttaagaggaaatttttggagaagggggtagttatgagttattagtagttttcgtttgtagtatttggggtagaggtattagtttggtaaagggcgttggttgtgatattagtagtatttattatggggtttaataaatggtagttaaa

SEQ ID NO: 2372 - DNA, 2474 bp, Artificial Sequence
  chemically treated genomic DNA (Homo sapiens)
tttagttattatttattgagttttatagtggatgttgttgatattataattaacgttttttattagattggtatttttgttttaggtgttgtaagcggaggttgttaatggtttataattgtttttttttttagagatttttttttggatatttgtttgggaggttatttcgttatttttagtttaggggtagtttatttgtaagggttaatggatatgaagaatataaaagattagttaattatattaaggtaggaataaattttatgtgtgtaatttatattttagagttttttgtgggattagggtaaatttagattttagaagagattatattttaagtttagtttttttatttgttttatttgttttttttattttttttttttttgagatgtttattatttaaaatgatatgtatttgaatttgttttttaggttttatttttattatagagaatgagatttaagttgtagttttatatgtattatagagatattttgtatttatatatttattttatttagttcgtagagttattgtatttgagaatattgtatagttgagaattatgaattagggttgaatttaggtttttttttgaattttaaaaagattgtatttattatattaaattgttgttttagatatttgtataaaatttttattatatattattaataaaaataataataataaagttatataatttagaaagtaaataaatatgttttttttatattaataggtttaacgatgagtagatgttgtttagtgtttttttgatataaggtgatatttttttatgaagaataaaggggaaggagagaggagaaagaagaagaagagagtaggagaaaaaaaatgtatgataaagaaataaatgaaagaagaaagtagggatgaaggtaggaaaaagagggagggaaggaaggagggaaaggtagaaagaaaaggttatagtagatatttgttttaatagatttaagttttttaggtgatttttggttttatattttggttggaaaattattgttggttattttttttttttttttttttagtgtggaatagttggaaatgttttaattatgggttgagttttagtttaggttttggttgaaaattatttttttattaaaaacgatgaggagtttttagggagggtttgtaaattagttatttttgttgatgattatatttgtgtgtatatttgtggtatagaaatacgttatgtaataaagtgtattttgtgttatatgattttttattatgtggtttgtttttttttattatatttaagacgttttttttttattaaaaagaattaaaatatagaggagtaatattttatttatagggtgagaaggtagattttttgttttttattttgtgtttaagtacggtaaatattatagaatttattttgagattttttaaaatttttaaagtaagtttgttttaaaggtattaaggttgtagaatgtttattaggtattagatattgtattgaatatttcgtattgttttagtggatttttatggtaattattgaattcggtattttggtttttattgtatagaggggtaaagtaaagagtgaaaaaggtttaatagtttgtttaaaattaggtttaggaaatggagaaatttagttttagagttatatttaaagaatatttgagtttaaggtttgttttagtagaaatagtaagtgattttttagggttagtgttttttgaataagaggatattttttattttgaaaaggtgatatttataatgtttatttgtttttgaaagatttattttgtttaatttgttgaattttagagtaagttattaggtttttaaagaatacgaaaaggtttagtatgtgatagagaatagtttaaattataaggttgaggagaggggggattttatattttaaataattttatgtattttaaaaaaagtaaaattagtagaaaaggtagtaagaaaaatgatttgttataataagagtattaatgatgattataaataaaagggtaatgttttagaagaaggtttttgtttgagtttatgggtttaaagaaattggatatgaatgtggttgtttttaaggaatttagatttttaaagttaaatttttaaatttggtttttttaggaatttgatatttataggtatttgtttagaatagtgatttttgattttattattgtttttagtgaatgtgggtaaagataatttaaaggagtttgtaaagaaatattatttttaaaaaagagtagaaagtttgttaattagttaattaaaaaagtatttgatttgaaattttattattaaatgggtggtagaattaaatgatttttaagtttatttttaatattttaggatttggggattttagaatatataagttagaaaatgtatttgatagatggtaatagattatatggggttataaatatttgtaaaaaaattt

SEQ ID NO: 2373 - DNA, 2412 bp, Artificial Sequence
  chemically treated genomic DNA (Homo sapiens)
agggagttttaagaaggaaatagtggttggtaatttttaaattatggaagcggtttaagtttaaaaaatattttggttgttgtagttatttggtttttagtaagattttttgtaggcgtttgagtggaggaaaagatggaaggtgtagaggatgatattggttttttgtttatatttttttggaagttattcgtatattttaaggattgtttattatgaatatttgtaattttttgtttggggtttttatttatttttattattttatggttgaagagtatttttagtttaagtatagagtaagttaaaatgatagagagtttacgtttttagatagttttgaaataatgataaatagatatttgataattaaatattttaatttattggtttttagttggaataatgttgaagaatgttttatatcgttttttagagttttttagagggattaattggtttgataatttttaagaatttgttgttttgtttttttttgatatatttttttatttttttattagtgtttttgggaattatttattaaataaattatttatttttgaatttttgttttagtggttgtttttgggaaattaaaattatatagaagaaaagagttagattagtaagtataaatttagtgagaatagttgaaaaggagtattaggaagagaaatatagttaaaaatggtttattataattaagaaagagtgttaagtttatttgattgagggtggaaggaatataagagatagaggggagagattttataggaatttatatgtagaaatatttttttttttgatgttgttggttaaaatataaaaggagaaaaaagaaaagaaaaaataataaaatttgtattataaaatttaggaaatttttttttagataagataaaggtataaaagttttttttttaaaagtataaaagaagttttgatgtttttggatttttgtgtgtttaggaatttttattatttttagaattcgtttaattattttatgatatatttttttttttttagatgtaaaaattgaggagttagttgttagttgaatattttagtattatttttttagtaattattttaaggaatgtatttgaataaaatgtagttttggtattattttaaaaaatggatgatgatttatgttttttttgcggggataagatggttgtgggtatgagttatgattgtacgttgggaagatttcgatgggaattttgtttttgttggttgagttataatttatacggatttgagattgtgcgtggtttttattaatatgtttattttgtttgttaaggttcgagttttattttttttttttcgattaaagttttgtttgtattttatatatatttgatttaaaatttgtgtttggaatttagagtggtttgggaatagtaatttggaaaaatttgattatttgttagttaaaatggaatgatgtgtttttagttgtagttgggaaatgggttatttttttgtaggggagtaaatttaaatgatagataaagttttaatttttttaatatttttgttttcgtggagtaggtttggtataaattaaaattgtttataggttaaggaaggtataaattatagtatagatttgtgttttttttaattgtataaagagtttttatatataatttttttggtgaaaaatttttgtttcggagtagatgttttatggaaataatagtgaagtttttaaggggttaaggtgaatgaattgtaagattggtttttgaagttttttaggttaaaattattttttttattgtttttggaattggtttttaaaatgtgttttatagtattgttttttagattttaatatgtatataaattatttggggattttgttaaattgtagattttgttttagtagtttttgtgtggggtttgagatgtatttttgataagtttttaggggatattgatgtcgatttatgtttatttttgaattttattttgagtggcgagtaatagagggatatagaaagttggttttgaaagattttttttaatataaagattttttagtttaataagtttaaaaaaatttatatttttgtttttttttttagaatttcgtaaattaataaattaaagattttgagaagatttgtattgataaagtttgtagttaatgttgttttttaataatttatggaatttgattttgtgaaaggaaaggataatttgatgtgcgttatttttgggaatatttgtttaggtatttaaatagattgaagggggattttagaaaatgtttgattttttttgtggtgatttttgtaattttttttaggtgagtgttattgtttttttaaataagtaagattttaagtttagtttttaatatttttagtagaataataaattttttattta

SEQ ID NO: 2374 - DNA, 2412 bp, Artificial Sequence
  chemically treated genomic DNA (Homo sapiens)
taggtggaaagtttattattttattggggatattgagagttggatttagaattttgtttatttggagaagtagtaatatttatttgagaaaagttgtaagggttattataaagagagttaaatattttttgaaatttttttttagtttgtttaagtgtttgaataaatatttttaagaatagcgtatattagattattttttttttttataaaattaaattttataggttgttaggagatagtattgattgtagattttattagtgtaaatttttttagagtttttaatttgttaatttgcggaattttagagagaaagataaaaatgtgaatttttttgaatttattagattagagaatttttgtattggagagaattttttaagattaattttttatatttttttgttattcgttatttaaagtaggatttagggataaatatagatcggtattagtattttttgggagtttattaaaaatgtattttaagttttatataagaattattgaaataaagtttgtaatttaataaaatttttaggtgatttgtatgtatgttaaaatttgagaagtaatgttgtaaaatatattttgaaaattagttttaaggataatgagagagatggttttaatttggaaaattttaagaattagttttatagtttatttattttggttttttaaaaattttattgttgtttttatggaatatttgtttcgggatagggattttttattagaaaaattatatgtgaaagttttttatgtagttgagaaaagtatagatttgtgttatgatttgtattttttttggtttataaataattttgatttgtgttaaatttgttttacgaagatagggatgttggaagagttagaattttgtttattatttgaatttatttttttgtagagaaatagtttattttttagttgtagttgagaatatattattttattttaattgataaataattaaatttttttaaattattatttttaagttattttgggttttaagtatagattttgaattaggtgtgtgtgaaatataaatagggttttagtcgggaagaaaaagatgaagttcgagttttaataagtaaaatgaatatgttaataaaagttacgtatagttttaagttcgtgtaagttatggtttaattagtaaaagtaaggtttttatcggaatttttttagcgtatagttatgatttatgtttatagttattttgttttcgtaagaaaagtataaattattatttattttttaaaatgatgttaaaattgtattttatttaaatgtattttttaaaataattgttgagaaaataatattagagtatttaattgataattgattttttagtttttatatttggagagaaaaaaatgtgttatggagtggttaaacggattttagagatggtggaaatttttaaatatataaaggtttaagaatattagaattttttttatgtttttgaagaggaaatttttgtgtttttattttatttagaaagaggttttttaagttttataatgtaaattttattattttttttttttttttttttttttttatattttaattaatagtattagaaaaaaaaatatttttgtatatgaatttttataaaattttttttttttgttttttatattttttttatttttagttaaataagtttagtatttttttttgattataataagttatttttgattgtgtttttttttttgatatttttttttagttgtttttattaagtttatatttattggtttaattttttttttttatatgattttggttttttagaagtagttattgaggtaaggatttaagagtgagtaatttgtttggtaggtgatttttagaaatattggtaggggagtagaggagtatgttagagaaagataggatagtaagtttttgaagattattaaattagttgatttttttggggagttttgagagacggtgtgaaatattttttagtattattttaattgaggattagtggattgggatatttagttattaaatatttgtttgttattgttttagagttgtttggggacgtaaattttttgttattttggtttgttttgtgtttaggttaagggtattttttagttataaaataatgaaaataaataaaagttttaagtaaggagttataggtgtttataataagtagtttttggaatatgcgagtgatttttagagggatgtggatagaagattaatattattttttatattttttatttttttttttatttaagcgtttgtaagagattttgttaagagttaaatggttataatagttagaatattttttaaatttaaatcgtttttatagtttaaagattattagttattattttttttttgaagtttttt

SEQ ID NO: 2375 - DNA, 2464 bp, Artificial Sequence
  chemically treated genomic DNA (Homo sapiens)
attttttatgattatgtagtgttttatttagaggattttagtgttgttattagagtattttgtatatattaagtgtttaataaatgatggttgaatgtagaataaaattattattgatatttttttttttaatttttaagggtatggtataagttttaataaatattaggtgatttttattgaaaataattttattgtataatttataaagtgtttaagtatttattattttatttagtttttattatagttttataagttaagtagttttatttatattttaaggtgagaaaattacgtttagagaagttagatgatttgtttagggttattaataaataagatattatgaagggaatgaatttaaatttggtgtttttgtattatttattttttgtgtagagttgattggttaaaagtttgttttttatttataagttaaggtgttaggtatatagttttgaatgttgagttttaggtttttaatgagtaatttgtattataattaaatagagttgtttggttattttaggttagtatttatggtatttatatttatgaatttatttttttttttttttataaatttataggttgataatttttttgtgtgaaaatttattgaaatgagattattttatttttgttttttgatttttggtgtgtttttttgtttttgtttaaaatatttggttttgttttgatattaagttttagtgttagttttgtgaagacgtaagatagaagttatatatgtataataatataatttatatttttaaagttataataagtagtaatatttttggagcgaaaaattttggtaaagtaaataatatatgttttggggtttgagatttaggtttgaggtttagttatagtatttttatgttttttttgatttaagttaaattatttagtttgttgagattttagttgtttttttttattttggataatgggtatgatgttgattgtttttttgggtggttttgaggattttgggaggatggatataagtgtaatttaaattttggagttttttataattgtaaggtagtattatttatttaaatataaaaataggttattaagtattattaaagggaaaagtaaatgtttagggattatttttgttgtattgttgttggggaaagaggttttttgtttttttaagagtttttagatatatttttagttatattttaaaagtttttttagttgtgtagtttaggtgtattcggtagtatagtcgtgttttgatttttttggtagatgttataatttattgttatttttatgtaggaatgtagggcgaggggtttttatgtcggttttgtgatttattgtttgataagttttgagtgttaattttaggtaggtttagcggaggtggaatattatttatttgatagtgtttgtgataaagtgggtaattagacgtatttggaaaagtttggttggaaattggttggtatttatataatattatagttaagttaggttttataaaagttaatggagaaaaatgaagttttttaagatttattttgttttttgaggaagttaggaatataggattttgtagttttatttttttttgtgttttttttatttttttattttattttttttagatagggtaatatatttttattggagatgggagtaaaggaaagcgaattgagagttgaggttttaagtgtttgattttagaggtatgttatttttttagtttttaatttttttttttttttttttttttgttttttttttatatatatatatgtatatatatatatatattttatatttttatagagtatatatattttatatttttttgtttttttgtttttgttttttttttatatatatgtgcgagtatatatatatataattatagtgttaggatttaatttggtattttggtttataatttgttttttattggagtttttggagtttggtgttagtttaagagtatgatttgtttgatatgaattttatagttttttttttatttttttttaattggatagttttagtttgtcgatgattaatgagtttggaaggtgagcgatagttattttaagggtttttaaaagtttattttagagattagttaaatttttttgttatattaattgtagcgaagttttttgtttaatagtttatggaaaataattgtttgattttcgttttttttttaaattaagttgttatgagcgtagttttgtttattggttaatagtgtgtatgttttttttatcgtttttttttaggtagacgaatattttatttatgagaagtaggaagtttattgtgaggttggtttaatattggattttatttggatgtggaggatttttgaaattggaaagttaggattgatttggaaaatgtgtttatagatagtggaataggaaaatgattcgttttttaaggttagtttttttttttt

SEQ ID NO: 2376 - DNA, 2464 bp, Artificial Sequence
  chemically treated genomic DNA (Homo sapiens)
gaggaggaggaattggttttggggagcgaattatttttttgttttattatttgtaagtatattttttagattagttttgattttttaattttagaaattttttatatttaaatgaggtttagtattggattagttttataatggattttttattttttataggtaaaatgttcgtttgtttgaaaggaagcgatagagagaatatgtatattgttggttaataaatagagttgcgtttatggtagtttggtttggggggggggcgggggttaggtagttattttttatgggttgttaaataggaaatttcgttgtagttaatgtagtaggagagtttggttagtttttgaaataaatttttgagagtttttaagataattgtcgtttattttttagatttattaattatcggtaaattgaagttatttagttaggaggaaatgaagagagggttgtagaatttatgttaaatagattatgtttttgaattggtattaaattttagaaattttagtgagaggtaaattgtaagttaaggtgttaagttaaattttagtattgtgattgtgtgtgtgtgtgttcgtatatgtgtgtgagagagagatagagatagaaagatagagaaatatagagtgtgtatattttatagaagtatagagtgtgtgtgtgtgtgtgtatgtgtgtgtgtgagagagagatagagaggaggggaagagagaggattgaagattaaagaaataatatgtttttgagattaaatatttaagattttaatttttaattcgtttttttttatttttatttttaatgagaatatattattttgtttgggggaaatagagtgaaaaggtgggagagatataaaaagaaataaagttatagagttttgtgtttttgatttttttagagagtaaggtagattttgaaggattttatttttttttattaatttttatgaagtttgatttggttgtaatgttgtgtaaatgttagttagtttttagttaggtttttttaagtgcgtttaattgtttattttattataggtattattaggtaaatggtgttttattttcgttgggtttgtttgaggttgatatttaggatttgttaggtaatggattatagagtcggtatgggggtttttcgttttgtatttttgtatgggggtgatagtaaattatgatatttgttaggaagattagaatacggttgtgttatcggatgtatttaagttatataattaggaaggtttttaggatgtgattagagatgtgtttgaaagtttttaaagggataaagagtttttttttttagtaatagtgtagtagagatgatttttgaatatttatttttttttttgatgatgtttaatgatttatttttatgtttgagtgaataatgttgttttgtagttgtaaagggttttagagtttaagttgtatttatatttatttttttaagatttttagaattatttagagggatagttagtattatgtttattgtttaggatgaaaaaaaataattgagattttagtaggttgagtgatttggtttgggttaaaaagaatatgagagtgttgtggttaggttttaaatttagattttaaattttaaaatatgtgttgtttgttttattaagatttttcgttttaaaagtgttattgtttattgtagttttggaagtatggattatattgttgtatatgtatagtttttattttacgtttttataggattgatattgaagtttaatattaaaataaaattaaatgttttaaataagaataagaaagtatattaaaaattaagaggtaaaaatgagataattttattttagtgaatttttatataaaaaaattgttaatttataagtttgtaaagagaaaagggggtaggtttataggtgtaaatattataaatgttgatttaaaatggttaaataattttatttggttataatataaattgtttattggaggtttgaggtttaatatttaagattgtatgtttggtattttgatttgtaaatgagagatagatttttgattagttaattttatataaaaagtggatgatgtaaaggtattaaatttgaatttattttttttatgatgttttatttgttgatgattttgagtaagttatttaatttttttgggcgtaatttttttattttaaaatgtggataaaattatttagtttgtagaattgtagtaaggattaaatgaggtagtggatatttaagtattttgtaaattatatagtaaaattatttttagtagaaattatttggtatttattgaaatttgtgttatgtttttggggattaaaaaagaaagtgttagtaatgattttattttgtatttagttattatttattgagtatttggtatatgtaaggtgttttaataataatattgggattttttaaatagaatattatatgattatggagagt

SEQ ID NO: 2377 - DNA, 2429 bp, Artificial Sequence
  chemically treated genomic DNA (Homo sapiens)
tataaatatttatgtttatgggttgtttatatgtgtatttatatatatatgtatatattattatgatagtttaataggaaagatttttgtatattataaaatttagatttattattaattttagttttatgatattgattagaaaggaaggattagaaataatggttttttttagttttagattgggtgatttttattatttatgtatattttatttgattggtataatatagtggagtatatgagtaggttatgtatataatttttttttttttttttgaaggttaagtatataagaatataagagtgaagttttaaaagattttgtagataaatgattgtaataagatgattatcgatatttaggtatgttttaaaaggatagaaatttaatttgttgttttttattgtattgtttttttaatatttatttaattgtttttattattaaatatttataattaattgattgtatgaagaaagtaagaaataagtgaataaaaaatatgtttatattaaatgatatatataaagtataaaataatgattagttagattataaatattttagtttttgtagtttatatagtttttgttgtaattagttaattttattattttagagtaaaaataggtatggataaagtataaataagtgagtgtggttgtattttaataaaatattgtttattaaaatagtttataggttgaatttattttatgggttatgttttgttaagagttgatttaaggtattaagggtagttttttatttttaaaataaataattagtttataggtattttaataatttgtaagattttatgaaaggatcggtttagaggaaatataatttatttaaattttttattgataagttattagtatatagatggtgtataggattaagtaggtttttagatttttttttttttttgttattaaattttttttggttttgttgtattttatgagttatttttgtttttagtttaatacgaggaaaatgggtagatggtataagaggatattgaatgtattgaaggtagtttaaatattttatgtattagttatttcggatatttagtggagtgaatgcggtatttattaatgtttaatgtcggttcgggtaaagtttagatagtttgttggtagtaagaaagttaaaggtaagaaggtttgtgtcgattgtcgtttgtatttacgaggttgagaaatagtagttatgaattagtttgtttgagattttgttgttattatttgtagtagtaaggaagataatattttaaaaagtttttaggaataaaatgagttttaattattagaggaagaattatagtttgtagttatattgtttagaggtttaatgatgatttattgtaaattagattaattaagaatattttttatattgtagttttgagtggtttagataagattattggttttttttgatttttgggattttaaaataaatgggattttagagatttttggtttagggtttgtggaatgttagaagtatgaggtattttattggagatttggttaatttatttttttatagatgcgtaaattgagttttggtgaggtaaatgatatttagtgatttataattagtcggtggtgaggtagaaattgagttagtatttttgattttgggttgatagtttgatttttttattaagataattgttatgtatttaattaatgtagtttgtatattgttttttaaagtgattttattagagaattttttttgtttttttatatggtttagagaagattagagttttttagaatttattttaggaaattttttaatgattattcgatatttttaagtttttttaattttatttatatatgttgtttttaagtttggaaaatgagatttaaagagattaggttgttggtttttgattttgtttgtatattagaagtatttatagattttttaaaaattttaattttaagttatatttagattaataaattataatttttaggggtaggatagagatattatattttttgacgttttttaggtgattttaaagtatagataaattttgggagttattgggatagggtatttttatttttgttatattttatataggaaggtattatttattatggtgaaaatatgatttgaggatattagaagagatggaataatattttttgaaaggatgttttgttattattgtgaatatatattagagtagttttgaagaataaaggaataaatataggtgaaagtgttttagaaaattgaaggatttatataatatattttttttttattttaggaggtatttagatttgagttagttgtgaatgttgttttatttaattatttattaggaagaattattttgaaattagagaattagtaaatttttaaaagtatttaatttttgaaa

SEQ ID NO: 2378 - DNA, 2429 bp, Artificial Sequence
  chemically treated genomic DNA (Homo sapiens)
ttttaaaagttaagtgtttttgaaaatttattgattttttgattttagaataattttttttagtaaatagttagataaaatagtatttatagttagtttaagtttgaatattttttaaaataaaagaagaatatattatataaattttttagttttttagagtatttttatttatatttgtttttttgttttttagaattattttgatgtgtgtttataatggtggtagggtatttttttaagaaatgttattttattttttttaatgtttttaaattatgtttttattataatggatgatgtttttttatgtgagatatagtagaggtagaaatgttttgttttagtggtttttaaaatttgtttgtattttaaaattatttgggaaacgttaaaaaatatgatgtttttgttttgtttttggagattgtgatttattggtttgggtgtggtttggagttggaatttttaaaagatttgtaggtatttttaatatataggtaaggttaggagttaataatttagtttttttggattttattttttagatttgaaaatagtatgtgtgggtggagttgaaagggtttgaaggtgtcgggtagttattaaagagttttttgaagtaggttttggagaattttggttttttttgaattatgtgaggaaataaaaggggttttttgatgaaattattttggaaaataatgtgtaaattatattggttgaatatataataattgttttaataaaagaattaaattattaatttagaattaagagtgttggtttaatttttattttattatcgattaattatgaattattggatgttatttattttattagagtttagtttacgtatttgtaaagaaatgggttgattagatttttagtgagatgttttatatttttaatattttataagttttgaattagaaatttttgagattttatttattttaggattttaggagttaaagggaattaatgattttatttaagttatttaagattataatatggggggtatttttaattggtttaatttgtaatgaattattattaagtttttaggtaatgtagttgtagattgtgattttttttttagtggttaagatttattttatttttgaaagttttttaaaatattattttttttattgttgtaaataatgatagtagagttttagataggttgatttatagttattgttttttagtttcgtaagtatagacgataatcgatataggtttttttgtttttagtttttttgttgttagtagattgtttggattttgttcgggtcgatattgggtattaatgaatgtcgtatttattttattggatattcgaagtgattaatgtatggaatatttgggttgtttttagtatatttaatgtttttttatgttatttatttatttttttcgtattaggttggaaataagaataatttataaaatatagtaaggttaaaaggaatttagtggtagggaggagagaaagtttaaaggtttgtttggttttgtatattatttatatattgatgatttgttagtagaaagtttgggtgaattgtgttttttttgagtcgatttttttatgaagttttgtaaattattaaaatatttataagttaattatttattttgagaataaagggttgtttttgatgttttaaattagtttttgataaagtatgatttatgggataaatttagtttgtagattattttagtaaataatattttattggaatatagttatatttatttgtttatattttatttatatttgtttttgttttaaaatggtagagttgattagttgtaatagagattgtatgaattgtagaagttaaaatatttatgatttaattgattattgttttatattttatatatgttatttggtatagatatattttttatttatttattttttgttttttttatgtaattaattaattataggtatttaataatgaaagtaattaagtaaatattaaagaaataatataataagaaataataaattaagtttttgtttttttaaaatatatttaaatatcgatagttattttattgtaattatttatttataaaattttttagaattttatttttatgtttttatatgtttggtttttagggaaaaaaaagagaattatgtatatgatttgtttatgtgttttattatattatgttaattaaataaaatatatataaatggtaaaaattatttaatttaaagttaaagagaattattatttttggttttttttttttagttaatgttataaaattagagttggtgataaatttaagttttataatatgtaggaattttttttattaagttattataataatatatgtatatatatgtaaatgtatatataaataatttataaatatgaatatttgtg

SEQ ID NO: 2379 - DNA, 2431 bp, Artificial Sequence
  chemically treated genomic DNA (Homo sapiens)
tatagatgagaaatttgagattcggaaagtttatttatttgtttgaaatggataatggtaaagttatgattaaatttttaagttttaagattttgtttaattttttagtgttttggttttataagaagaaagtaattgatttgggattttttatttatatttttttttttttttttttaatgtaaaattatttgattgaatttggtttttaataaagtaatttagagttatttgataatttttgtattgtaattaatattttttttttttttttttttaaattattttaggggaaagaagggagtaagatagagatttaaaaatatatatatgtatagtgtcgggtttagtggtttaggtttgtaattttagtattttgggaggttgaggcgggtggattatttgagattaggagttagagattagtttggttaatatggtgaaatttcgtttttattgaaaatataaagttaggtgtggtggtatatgtttgtaattttagttatttgggaggttgaggtaggagaattatttgaatttgggaggtagaggttttagtgagtcgagatcgtattattgtattttagtttgggtaaaaaaatgtgaattttcgttttaaaaaaaaaataagaagagatttagagatagaaagagggtttgggtttgtaattttttgtttttttgtgaagtaaattttttaatttattaaaaatatagtattaggaaatgttgtgtttttaagtgttagcgtgtttttttttgatttttgatttatgtttgtttatttgatgaagttattagtggtttgtagtttgtataggttaggagggttttaatgatttaggatattttcgtcggatgttgtggttgaaattatagtatttttggtagtaaagtgaggggtgtgtgtgtgtgtgtgtgtgtgtgtgtgtgtgtgtgtgtgtaggtaggtaggaggagtaatttaaaagagagattttagtatgagggatgattattttttaaaatttattatttaggtttttgtaggtaatattttgaatttaaaatgatttttagttaagtcgtgtttgtatttgggaattgtgagaagtattgaaagttttataaaggagaggaaatttgattacgataggaagtgatttatagtttttgaggtttagatgtattgatataaggtagtgaagtaggaaagaattacggtttttaaaaagaagtaggattttggttttttttttattttagtgtgatgtgtgtgttttagaataaaattttttaattatagtgtaaaagtgatatttatgtaataggagtggtttaaattttttgtttttgtgggtttgatatagaggaaagttagaattttttttatgatttgtttatcgtgtgttagtgttgtggtttttaagtgttgtgtaaatttgattttttaagttttaggtgggttatgtgggtgatggtagcgtttaaaagtgcggaagaaatgagttaaagttagtaagttatttggagattgaggttgtggttgttcgatttatagtagtatatttttttgtgtgtataaattgttagatatttttattttttagtattttttgttgtttgatttttttttatgaatattttttgttgttttatttgaagtaataagggatttgatatttagtagtaggtgagtatataaaaagttgagtatgaattgtattgttggtgtgtgaattgttttggaagaattatgttattggaaaatttgatatttttttgaaaagatgatgggttttattagtgagatgtttttattttagaggaagttatttttttaatgtaatattttgtttgatatattgttttaagattaattttaggagaattttgagtgtagtaaaagtattttgtattattttttagtaagtgattttataataaataagattattgaattttattttttgagttaggttttataatattaatttttattagtgttttttatatgtagttggggtgaaatgtgtttagtttgttttttttttttagtttattttttttcgttttttttatttaaaatttagtgttagagggatagtttgaaataatttgaagggatggtatatgatgatttttgaggtcgtttttttgatttttagatgtttttttgttttgtatgatttgttatttgggggtgagcgggggaagttagtggaataaatatatttttatttgtaaaatcgagtattggttttgaattaatatgaagggataaatggaaagtaaggtgaaagtatatgatgtaagagagttgattaatatgaaaatattggtagaaagtgttgtaattttttaagcggtttgtataggagaaaaagttgtttatttttaggtaagattggttaaatatcgtgggttaagtttaggttttacgtatatgtgg

SEQ ID NO: 2380 - DNA, 2431 bp, Artificial Sequence
  chemically treated genomic DNA (Homo sapiens)
ttatatgtacgtggggtttgaatttggtttacgatgtttagttaattttatttaaagataaatagtttttttttttgtataagtcgtttaagaagttatagtattttttattagtatttttatgttgattaatttttttatattatatatttttattttgttttttatttgtttttttatgttaatttaaagttagtgttcggttttgtagatagaaatatatttattttattggtttttttcgtttatttttaaatggtaggttatgtagaatagggaaatatttggggattaagggaacggttttaaaagttattatatgttatttttttaggttgttttaaattgtttttttaatattgggttttggatgaaggagacgaaaagaagtgaattgaaaggggaaaataaattgagtatattttattttagttatatgtgaagaatattggtagaaattagtattatgaggtttggtttaagaggtaaagtttaatggttttatttattatgaaattatttgttgggaaatggtgtagaatgtttttgttatatttaagatttttttgagattgattttgaagtagtatgttaggtaaggtgttgtattaaaaaaatagttttttttggagtggagatattttattggtaaggtttattatttttttaaaagaatattaaattttttagtgatatggtttttttaagatagtttatatattagtaatgtagtttatatttagttttttgtatatttatttgttgttggatattagattttttgttgttttaagtggagtaataagaaatgtttataaagaagaattaagtaataagaaatgttagagaataagaatatttgataatttgtgtatataaagaaatgtattattatgaatcgggtagttataattttagtttttaagtaatttgttggttttagtttatttttttcgtatttttggacgttgttattatttatatagtttatttggaatttggaaaattaggtttgtatagtatttggaaattataatattgatatacgatgaataagttatagaggaaattttgatttttttttgtattagatttataaaggtaagggatttagattatttttgttgtatgaatgttatttttgtattgtggttagaggattttgttttaggatatatatattatattgggataaaagagaaattaagattttatttttttttgaaaatcgtaatttttttttattttattattttatgttaatatatttgagttttaggggttgtaagttattttttgtcgtggttaggtttttttttttttatgaagtttttaatattttttatagtttttaggtgtaaatacgatttggttgaaagttattttgaatttagaatattgtttatagaggtttagatggtgggttttgagaaataattattttttatgttaaagttttttttttaagttgttttttttatttatttatatatatatatatatatatatatatatatatatatatatattttttattttgttgttagaaatgttgtggttttagttatagtattcggcgaaggtgttttgggttattggaatttttttgatttgtataggttgtaagttattgataattttattagatgggtagatatgaattaggggttaggaagggatacgttgatatttaaagatataatattttttgatgttgtgtttttggtaagttgaaaagtttattttatagaagaataagaaattgtagatttaggttttttttttgtttttaaatttttttttattttttttttgagacggagatttatatttttttgtttaggttggagtgtaatggtgcgatttcggtttattgaaatttttgttttttaggtttaagtgatttttttgttttagttttttaagtagttgggattataagtatgtgttattatatttggttttgtatttttagtagagacggggttttattatgttggttagattggtttttaatttttgattttaggtgatttattcgttttagttttttaaagtgttgggattataggtttgagttattgggttcggtattatatatatatatatttttaaatttttgttttgttttttttttttttttggaatggtttaaaaaaaaaagagagaaggatattaattataatgtaggagttattaagtgattttaaattgttttattaaaaattaagtttagttaggtggttttatattgaaaagaaaaaagaaaaggtatgaatggagaattttaaattagttattttttttttataaggttagggtattgggggattggataaggttttagaatttgggaatttaattatggttttgttattgtttattttaggtaagtaggtaaatttttcgggttttaggttttttatttata

SEQ ID NO: 2381 - DNA, 2460 bp, Artificial Sequence
  chemically treated genomic DNA (Homo sapiens)
tttgtaattttagttattcgagaggttgaggtaggaaaatcgtttgaattcggggggtagaggttttagtaagttaagatttcgttattgtattttagtttgggcgatatagcgagattttgttttaaaaaaaaaaaaaaaatggataatttttattttatttgttttaattttttataagtgttagttagatttttggaggggaaaagaaatgagtggtagaatttagttaataatttagttatttgaatttagaatggtataaggtagtggttttaagagatatttgcgtttttaggagatatttggtaatatttagaggtattttttgttgtattaataggattagggattgaggagggtgttgttattagtatttagtgggaaaagattagaaagattataaaatattttataatgtattatttaatttaaaatgttgaggtaatgataatgttgggaaattttagttttaaagatttatgttaaagtgttaatagtagtttgttttttattttttatatttgtaatttttttataatatttgtgtgttgttttattaaaaaggaaaataataaaagttatttttatttttaagataaagtggttatagtatgttagaagtttagatgtggttaaatgttggtgattgttgataaagaaaataataaatttggtttttattaatagtttttggtattttttggaatttttcgtggaatgaaaatagtgattaagaggaagagagattggatttgatagagtttatttatagatatgtattattaaaaaagaaatttagtaaggtaattcgtgtttagagatttagtttagtggattttacgttggttgattttttttttgtttatttaaatggtatgaatttttagttgttgatattattgtatgggtggtgtggggtatgttagggagtatttagttttggttttataggtttattatggttggttagttttaattaaaagattttttttgttttgtttttaggatttttagatatggaattggggttttatttttggttttgggtatttatgttgttttttgttatgttgttagatttatacgtaagttaaggtagttttagaggaatatttttttttttttatttttattttttagtatagttttggatttatagttaattaagcgtattatagaagagttagtaattttgacgtgtaaaacgtttatgttttgttatttttaatatgttggtatttttgatagtttttaattagagtagtacggttaattttagtttgttatttgtgtgggttaagttgtttgaaaaatttttgagggattagttagtggtgggaggatgatttttttataaataaatgatggaatttcgatgtttggaagatattagttgtggtttggtttttggggttttttgaggggatagaaatgttagttttttttttttttggttttttgggttgttttatagttgggattgatgttttttattttagtattggaagatttttaggaggttttcggattatagagatatttggttttagttttattttattattgttagtgttaaaggtgtaatatttatttttaagtgattatataaaataatttttttaagggagattttgggtatgaagtttatataaatattttagaatagttagaaaagtttattttgattttagaataatgttttataaggattgagttattaaaattattttttttataagtttattttattgggagaatatttatataaaaatttttaatattggggtcgtgggagggaaagtgtgtagataatgtaaaaggattttaatttcgaaagaaataaagaaaaaaagaagaggattagtatatttagttttgttttacgtgatttgaaattttatttgattttttagtagattgttattaaaattttgatattagaaagaagtttttatttatttatatataatatgatagtttatgtagaaatttgtaagaaatttataaaaaagtattagaattaatatatgagtttattaaggttacgggatataagattagtatttaaaaattaattatatgtttatatattagtaattaattattggaaattaaaattttaaaaaataatacggtttaaaaattatatagtttggatatggtagtttatatttgtaattttagtatttttagaggtaaaggtaggaagattttttgagtttaggagtttgagatttgattgggtaatatagggagattttgtttttataagaaatttaaatattagttaggtatggtggtatgtatttatagttttagttatttaggaggtagagtttaggaggttgaggttgtagtgagtcgtaatggtgtttttgtattttagtttgggtgatagagtaaagttttgttttaaaaaaataaaataaaaataaaaataagatgtaattatgtata

SEQ ID NO: 2382 - DNA, 2460 bp, Artificial Sequence
  chemically treated genomic DNA (Homo sapiens)
tatatataattatattttgtttttgtttttgttttgtttttttgagataggattttgttttgttatttaggttgaagtgtagaggtattattacggtttattgtagttttagttttttgggttttgttttttgagtagttggaattataggtgtatgttattatatttggttaatgtttaaattttttatagagatagggtttttttatgttgtttagttaggttttaaatttttgggtttaagagatttttttgtttttgtttttgaaagtattaggattataggtgtgagttattatgtttagattatgtaatttttaaatcgtattattttttaaaattttgatttttagtagttgattgttaatgtatagatatatgattgatttttaaatgttgattttgtatttcgtgattttgataaatttatgtattaattttggtgtttttttgtagattttttgtaaatttttatatagattattatgttatatgtgaatggatagagatttttttttaatattaggattttggtaataatttattgagagattagataaaattttagattacgtaaaataaaattggatatgttggtttttttttttttttttttgtttttttcggaattaaaatttttttatattatttgtatatttttttttttacgattttaatattaaggatttttgtataaatatttttttagtgaaatggatttatgggaagagtggttttggtgatttagtttttgtgaaatattattttaaaattaaaataaatttttttagttattttgaagtgtttatatgaattttatatttaggattttttttgaagaaattattttatatagttatttggggataaatgttatatttttagtattagtaatgataaaatgaaattggaattagatatttttgtggttcggaggttttttgagggttttttaatgttggaatggagagtattagttttagttgtgagatagtttagagagttaaggaagaagggagttgatatttttgtttttttaaaaggttttaggaattaaattatagttagtattttttagatatcgaggttttattatttgtttataggaaaattatttttttattattggttgattttttaaggattttttaaatagtttaatttatataaatgataggttgaagttaatcgtattgttttaattgaggattgttaaaaatattagtatgttgggggtggtaggatatgggcgttttgtacgttagagttgttggtttttttatgatacgtttgattggttgtggatttagaattgtattaaggaataagaataaagggagggaaatatttttttagggttgttttagtttacgtatgaatttggtaatataataggaagtagtatagatgtttagagttaaaaataaagttttagttttatgtttggaagttttgaagataagataaagggagttttttaattaggattggttagttataataaatttatggagttagaattagatgttttttggtatgttttatattatttatatagtggtgttagtagttaaaaatttatattatttgagtgaatagaaaaaaagttagttaacgtgaaatttattaggttaggtttttaggtacgggttgttttgttaagttttttttttaataatgtatgtttatgagtagattttattaaatttaattttttttttttttagttattatttttattttacggggggttttaaagagtgttaagggttgttggtaagaattaggtttattattttttttattaatagttattaatatttggttatatttgaatttttgatatgttatggttattttgttttaaaagtaaaagtagtttttattgtttttttttttagtaaagtaatatataaatattgtagaaaaattataaatatagaaaatagaagataagttgttgttaatattttggtatagatttttaaaattagggttttttaatattgttattattttaatattttgggttggatgatgtattgtagggtattttgtagtttttttggtttttttttattagatgttggtaataatattttttttaatttttaattttgttggtataataaaaaatgtttttagatattgttaaatgttttttgggggcgtaaatattttttaaaattattgttttatgttattttgaatttaggtgattgaattgttgattgaattttattatttatttttttttttttttaggagtttaattggtatttatgaggaattgaggtaaatggaataaaaattatttattttttttttttttttgagataaagtttcgttatgtcgtttaggttggagtgtaatggcgagattttggtttattaaaatttttgtttttcggatttaagcgatttttttgttttagtttttcgagtagttgggattatagg

SEQ ID NO: 2383 - DNA, 2489 bp, Artificial Sequence
  chemically treated genomic DNA (Homo sapiens)
taaatttggaatagaattttagattatagtggttaaagaaattgattttgtttgtaagtaagttggattaagatttatatgagagttttggggttaagggaaataaagtattgttttaagaaggaagattttgttttgataaaatatttttttataatgtgatttttttaagaaattataaaagagtagttagggatttatttatgtattttaatatttgaagagttttagattgattgtatgtttgatagttataggaattttatttttataagaatttatttataaaaataaaagtatatttattatttttaaatttatatatttgagttttaaaaatatagtttttttttagtttttgttagtatatgttgttaaatttttttatgttgttagatttatttaaaaattaatttttttaatgtatgttatattttatgttgttttggttgtttttgtatattttgaagaaaatagggaagataatggtttttttttttaatttaatatatatatgcgatagagaaatgtaaggatgttgtatttttagaggattaaatttaaaatgataatagattcgattgatttttttaaaaaagaattttattttatgtaatttggataataaggtatatatggttggattaaaaatattgtgtttttaagatttttttttaatttttattttataattataaagaaatgaggttatgtgttgttgtaagaagttttattgtaaatatatgtatgtgtatgtttgtgtgtgatttgtaaatttagttttagaaaggtgtaataataaaatggaattgaatttagttatggtttttacgagcgtgagtaaagtatgtatgtggaaatttaagatgttaatgaaattagtatagattttaatggtattttggtgtttttaaaagatcgttattaaataaagtttaatgtgttaaaatggaaattttaagtaagagaaatgtgggaagaagtttaaggaatagaaattgtttggggaagatgatttgaatgttttttaaaattttcgagaagtattaagtttaagtttagttttttatttttgataaatattatattgtgtatttgtttgttatttcgtggttttgttgtttttgttagtttgttaaatggaattttggttttagttagatgaaaatgtggtaatttttgtgttttgtttgtttcggcgttcgaggagcggttgtgttcgattgtgtgaggtcgtttagtgttaagggtaattattggtatttgtattgatagtaagtagtttgtagtaatagattgaaaatgttttttttagatttttagattggaattttagttttatttttaaaagttttatgtttatagtacggttgataaaataaattattaaattaattgttttgggagtttttaagttgtgatattaaggtagttgcgagttattatttttgatgaaggagtagttttagaaattgtgtgtatttgatggaggtttggtaaagtgtgtaagtttgtagatttatggtaaataggttttatttttaagtatttatttttagaaagggaaaaaaagagttgtttatttttaatttcggatttattttaaattatttatagggaaatgggtgttttatttaatggtattgtttatttttatagagaaatgtttgtagtgaaaatgtaaaatattattttttttttttgttgaggttttttattttatggtgtttattttatttttttagtagagaatgtagaaaagtattaaaggtagtattatgaaacgtagagttgttaatttttaatttcgttagagttttgtttttttttttatttggggagttgaattgagttattagaattttttttttatattttttttagaatataagttttgataaaattaaagggttttatatttttaaagttttagaaattttatagggtacggtgagggtaggggtggggttgaagggatgggaaatttataggttaaaaataaaaatttgggcgaaaaatttaggttttgttagttattattagtgggattttagttagttatttagatatttggttttttgtttatttgtttgtgaaatagaaatgattatatttgttttatgtgtttgttggaaatatataaaataagataattttaggagtaaagtgatttatatttgtaatgttgaaatggataaaaaataaaatagatatgtgagtgtatagatgataaatatgttataaaataaaggtagtaaagtgttagtaattgtaaggagagatgtgggtgtatgtatgtttgttatataatttttttaatttttttgtgtatttgaaagtattttaattaggaggaagcgatttagaagggtaaattttttttatgtaagtataattttcgtattttttgtttttagttaaattttagatgtaggtatacggttatattgaattttagcggagaatggaaaaaaatatattttttttat

SEQ ID NO: 2384 - DNA, 2489 bp, Artificial Sequence
  chemically treated genomic DNA (Homo sapiens)
atgaaaaagatatatttttttttatttttcgttgaggtttagtatggtcgtgtgtttatatttggaatttaattagaggtagggaatacgggaattatatttatatggaaaagatttgtttttttaaatcgtttttttttgattaagatgtttttaaatgtatagaaaagttgagagaattatataataaatatgtatatatttatatttttttttataattgttaatattttgttgtttttgttttatgatatatttattatttatgtatttatatatttattttattttttatttattttaatattgtagatataaattattttgtttttgaagttattttgttttatatgtttttaataagtatatgaggtagatatgattatttttattttataaataagtaagtagagggttagatgtttaagtaattagttgaggttttattgatagtaattggtagagtttggatttttcgtttaagtttttgtttttaatttatgaattttttatttttttaattttatttttatttttatcgtattttgtagaatttttgaggttttaggggtataaagttttttaattttgttaggatttgtattttagagggagtgtaaaaggaaagttttaatggtttagtttagttttttaaatgggaaggagggtagaattttgacggagttgggaattaatagttttgcgttttatgatgttgtttttggtgtttttttgtattttttgttgggagagtaaagtgggtattataggatgaggagttttagtagagaaaagaaatggtattttgtatttttattgtaaatatttttttgtgagaataaataatgttattaaatggggtatttatttttttgtgagtaatttaaaataagttcgaaattgagaatggatagttttttttttttttttttgaaaataaatgtttagaaatgagatttgtttattataggtttgtagatttatatattttgttaaatttttattagatgtatataatttttgaagttgtttttttattaagaatgatgattcgtagttattttaatgttatagtttggaagtttttaaagtaattggtttagtaatttattttgttaatcgtgttgtggatatgaaatttttaaaagtaaagttgaagttttaatttaaagatttgaaaagaatatttttaatttgttgttgtagattgtttgttgttagtgtaggtgttagtagttatttttggtattgggcggttttatatagtcgggtatagtcgtttttcggacgtcgaggtaagtaaagtatagagattattatatttttatttgattgaaattagagttttatttaataagttgataggagtaataggattacgaaataataagtagatatatagtgtggtatttgttaaagataaagggttgagtttgagtttaatgtttttcgaaggttttggaagatatttaaattattttttttaaatagtttttgttttttgaatttttttttatattttttttatttggggtttttattttgatatattaagttttatttggtggcgattttttgaagatattagaatgttattaaagtttatgttgattttattaatattttaggtttttatatgtatattttatttacgttcgtaagagttatggttaaatttaattttattttattgttatatttttttagagttaaatttataaattatatataaatatgtatatgtatgtgtttgtaataagattttttgtaataatatatagttttatttttttatggttataaagtaagaattagaaagagattttaaaaatataatatttttaatttaattatgtgtgttttattgtttagattatataaagtaggatttttttttaaaaaaattagtcgaatttattgttattttaggtttgattttttgggagtgtaatatttttatatttttttgtcgtatgtatatgttaaattggaaaaggaaattattattttttttgttttttttagaatgtataaaagtagttaaaataatatgaaatatggtatgtattagaagaattaatttttggatgagtttggtagtatgaaggagtttgatagtatatgttagtaaaagttaaagagaagttatatttttaaaatttagatatatagatttagagatagtagatatatttttatttttatagataaatttttataaaaataaaatttttatagttgttaaatatgtagttagtttgaaattttttaaatattaaaatgtatggatggatttttaattgtttttttatggttttttaggagaattatattgtaagagaatgttttgttaaggtaaagtttttttttttgggataatgttttattttttttagttttaaagtttttatatagattttgatttaatttgtttataagtaaagttagtttttttggttattatgatttagagttttattttaagtttg

SEQ ID NO: 2385 - DNA, 2500 bp, Artificial Sequence
  chemically treated genomic DNA (Homo sapiens)
tagtgatattatttgggtggtaaggttattgatgaggtaaatgttattttattttttgagttataatttttaaattttttgtaataaatatttattatttttataataagaaaaataaataaattttattagaaaaaaattttaaaatataatgtaaggttgtaattttttttttttagattttattgtattaagtatgtataaaaggtttaagaaataatttttggtttttttaaattttgtgtggaaaggatgtgtgtaaatgtataggtgtttttgattgtatttgtgattatggaaagacgttattatattgagtggtttttttaggttgtgtttattttatttgagaagtgattttaggaagtattaatttgagagtagggaaatgagatagatagtggaagaaagttattattgggtaaatggggttttattttattgggatttttgagagaaagagggatatattgtagcgttattttttttgaggagtaaggaagttgggggtattttttcgtcgtttttatttgttattggtttaaggatgattttagagtatgttaattatttggtatttttagtttttatgtttaggtcgagtacgttttagggatttgagaaattttttatttttttaaaattatatagtatttgttattggaaggtatcgggttgatatacggaagcgtgatgagtgttgaggggatatgggttaggtattaataaaatttattgttatagtattttgttttttttgttaagtattattttagtaattttattgatgattttgttttggtggggttgggattgtggcgggaagggagtaggaatggtagggatgtagtaggtttataagggaaattttgtgattgggtttggtgttattttgttttttgttaaatgtttgagtgtttatttaaaaggttgattttgtttgatgattttgggaatatttaaaataaaagatgtgaaatttaggttttaatattaatttagtatggttagaggaattgaagaatgtattatgaaaatatgatattagaatttagagatgtttatttatgagtttggtaaggttttaaaaatttttttatgatgcgtttgagtttttttgtatataaggtaaaattttattaattcggttagtttataaaattttttataaatcgttttatgatgtgtttgaaatattttaggttgagttatttgttgataatttgttttttatttttgatatttcggttgaggattattttttttaaaatagaattgttaattttttggagatttgtgattattgtgtgttagtaatgttagtttattaggtatataaatatttatttattggtgttaagtaggtagtaatagaattttggattttagttgttggagaagaaataaagatttttagaattagaattataaattgtttattttatggttgaggaaattgaggtcgaaggttatttagttaatttgatgtggagttggaatgaaattttattatttcgttttatgaagtcgtttttgtataaggttgattggcggtttattttggttggttgatgaaggatattggttttataatttagcgattcgttttaagtgttagattagtttttttatagtgggatttgatatttttttcgtattggttattgagtggttggtagtaattttattttttatggtttttttgggttttttagttttttagattttaaattggttaggattgtgtattttagaaaatattgatcgattatttaagaatattgttaattagttagaacgaattgttatgggattttaatataatattttggagtgttagatatagagagaagatatagttgggagttggtatatttaagttttttggtttggttttttttttattttggtggaggtaattttgaagataaataaattatgtgagtaaattattttatggtgaggttaagtttattagagattaaatgtttagaggggaaaagggaagttgatttttttgatgatttaaaaagaacgttagttgaagttaaagtataatattttagggttattcgttggttggtggaggaaggtatggtttttttatagggtaaggatagataagataggtagataattatagtttgtgtttgggtagtgtatgtgtaaatagggcggagaatttgtaggttattaagttaaggaaataatttttttttgttgttatgtatttattagtaaaattggaataatttttatttttttttattgtttggaaagattaattaggataaaatagaaaaagtatatagagaattattaagaatgtagtgtgtgttgagtagatattatttatgtatttgttatttatttttttatttatttatttatttatttatttatttattttattatttatttatatattttatttttatttatttatatttatttatttatttatttatttatttatttatttatttattatttattattt

SEQ ID NO: 2386 - DNA, 2500 bp, Artificial Sequence
  chemically treated genomic DNA (Homo sapiens)
agatgatagatgatagatagatagatagatagatagatagatagatagatagatatagatagatgaagatgggatgtatagatagatgataggatggatagatagataaatgggtggatagataaagagatagatgatagatatatagataatatttatttagtatatattatatttttggtagttttttatgtgttttttttgttttattttaattaatttttttaagtaataaaaagaaatgaaaattattttaattttattaataaatgtatggtagtagagagaagttatttttttggtttaataatttataagtttttcgttttgtttgtatatgtattgtttaagtataagttgtaattatttgtttgttttgtttgtttttgttttgtgggaaagttatgtttttttttattagttagcgggtagttttagaatgttgtattttgattttagttgacgttttttttgaattattaaagaggttaatttttttttttttttttgagtatttaatttttaatgaatttaattttattatagggtggtttgtttatataatttatttatttttagaattgtttttattaggatgggaagaggattaggttagagaatttaagtgtgttagtttttagttatgttttttttttgtatttgatattttaaaatattatattaggattttataataattcgttttagttgattagtaatatttttaggtaatcggttagtgttttttgaagtatatagttttgattaatttagaatttaaggaattaaaaggtttagaaaagttataaagggtgaaattattgttaattatttagtggttaatacgaggagagtattaaattttattatggggagattgatttggtatttagaacgaatcgttgaattatagaattagtgttttttattagttaattagaatgggtcgttaattaattttgtgtagaggcggttttatgggacgagatggtggagttttattttagttttatattaagttggttgggtgattttcggttttaatttttttaattataaaataaataatttgtgattttagttttaaaagtttttgttttttttttagtaattaaggtttagaattttgttgttatttgtttaatattaataaatgaatatttatgtgtttggtagattgatattgttagtatatagtggttataggtttttaagaagttagtaattttattttggggaagataatttttagtcgaggtgttaaaaataaaggataaattgttaataaataatttagtttgaggtattttaaatatattataaaacgatttgtgagggattttataggttggtcgggttgatggaattttgttttgtatgtagaagaatttaaacgtattataaaaaaatttttaaaattttgttaaatttataaataaatatttttgagttttgatattatgtttttatggtatattttttaatttttttggttatattgggttaatgttgaaatttggattttatattttttgttttgaatatttttagagttattaagtagggttagttttttaaatgaatatttaagtatttgataggagataggataatattaagtttagttataggattttttttatggatttattatatttttattatttttgtttttttttcgttatagttttagttttattaggatagaattattagtaagattgttgaggtggtgtttaataagaaaagtagaatgttatggtagtggattttgttggtatttggtttatatttttttaatatttattacgttttcgtgtgttaattcggtgttttttaatggtaagtgttgtgtggttttgggaaggtaaagagttttttaggtttttggagcgtgttcggtttgggtatggaggttggaagtgttaaatagttgatatgttttgggattatttttaaattaatagtagatgggagcggcggagaaatatttttagtttttttgttttttagggagaataacgttgtagtgtgttttttttttttttagaggttttagtaagatgaagttttatttgtttagtagtggtttttttttattgtttgttttatttttttgtttttagattggtgttttttgggattattttttaaataaagtgagtataatttaagaaagttatttaatgtaatgacgtttttttatggttataaatgtagttagagatatttgtgtatttatatatattttttttatataggatttaagggagttaaaaattattttttgagttttttatatatgtttagtgtagtgggatttaaaaaaaggaaattatagttttgtattatattttagggtttttttttagtaaaatttatttattttttttgttgtaaaagtgatagatgtttattgtagaaaatttagaagttatagtttaaaaaataggataatatttattttattaataattttgttatttaggtggtattattg

SEQ ID NO: 2387 - DNA, 2460 bp, Artificial Sequence
  chemically treated genomic DNA (Homo sapiens)
agtattttatataaaagtatttagaggttttttatttgttttgagtatgttttagatgtataaatattatttattttaaattttaaattaaaaggtgtattgtaattgttttaaataaaatattagttaagattgaaatatatataaatttaaagtaatattttttttttttatttatgtgaagggagtttagttaataaattttaggatatacgtcggaggaattgtttagtaatatattttaagtaagtaagtatttaataaaggaatttatttttagttttttaaagataaatattataaatttattttatagttaagttgcgaagttagttttttgttgtagatttttttaaatgtttgtttgaataagatggggggtaaaattgattttgaagaagtgaagtttattagtgaaatgtatttagggtgtttatttgggggggtattttgaaaaaatgaagaaaaatatttagttataggtttagttttatataaatttgtttgtagtatgagggttatgaaggttgatgagtggaattttagttttgggagaaaatttttttttgtgagtatttaaattaatatattagaaattatagtatattttagagaatatggtagaaattgtgaaaaatagagtaagatttttttttgtttttaataataataataataagttttaaggattatattaataaagtagattgattcgtttaggaataaaatttttaaataattttgtgaaagataagtattttttattgtagtaaaaataatgagtatgatttttttttttcgatgaagattttgtttaatgttttaaaaatattttgtagtgatttttatttttattttttttttttttagttttttttttgaatatggaattagagtgttttttgttgtgaagtatttttgggaaagaggcgttaattttgtatcgtttttgagtgtaatatatattttttattttaaatgggagtttataatgatattgtgtggaagggattttaggtttttgtgattattattatgtttttttgagttgcgtttttggaaaaaaatgtgaaggaggtagttttttggaatgaataaattttgtcgtttgtttgtaattatttattaaaatagattaaagaaataggttaaaaaggaattcgttatttatgttagagatagtataataagagtatatagaaagggaaaattaatattagggaggaaggaatgttagatatgtgtttttaagaatacggttatgtttgtattgttggtttatacgtagatatacgttcgggttttttatttggtagggtgggttgtgttgatgaaaacgtgggttattaatattgatgtgtatgtttttaattaatattagaattgagtggtaaatataattaggagagtatttaagagagaaatgggttaaaagagaagttaatgtgtagagaggagggggaagagacgggttggagagaagaaatcggttagtttttgtttagatgggtttaatttagttatttgagttaaaattggaaatttgttttttagtataattgtttttgtgtttagtgggtgttgtttttgtaggcgttttttattgtaggtgaattttataaatagtatattattattaaattattttgggggttaattttttttatttgtgtttttagtttttacgtaagtatttttatagtgttttttaatatataggatttattttcggttttgagaagagtttttaaatttaattttttattggagtattaatttgtttttttatttttaaattagtattttcggttaatttttattagaaacggtagatttttttagtatggttattcgagaaatataggtttgtgttaattttttgttttgttttgtggttgtttttgtttgtgattgttgggagaataatagggtgggggagattttgatgatggtcgttgatattatttttgtatttttgttttttaaagtttaaagtatataattggaaatatttgtggacggttgttttaaaaatatttttaattatattcgtttaaagaaaataaaaattattatttatttttaaaaaaaggaatgttagaatttatttttgtttttttattttggttttttttatgatatttgagtggaataatatgttatgatgtttatgtatgaaaaatagaatatatttgtatatgttatgaggaagaaagttgtttttaggaaaacgaattttttttttttttttttatgttttaggaaatgatttattaaagtaataaaataatttattgggaaagtagtgttatttataaaaataattagtttttgatttttttttatttttataaggttaatgtaataaggatgttgtagaggtaaaaatgaattcgaatttttttaattatatgaatatttatgaattttattgtagtttttatgtaattattttattta

SEQ ID NO: 2388 - DNA, 2460 bp, Artificial Sequence
  chemically treated genomic DNA (Homo sapiens)
taaataaagtggttatataggagttgtaataaaatttataagtgtttatatggttaaaaggattcgagtttatttttgtttttgtaatatttttgttatattagttttataaaaatgaaaggaagttaaaggttgattgtttttataaataatattgtttttttaatgagttattttgttattttgataaattattttttaaaatataaaaaaagaaaaaaaaagttcgtttttttagaagtagtttttttttttataatatatgtaagtgtattttgttttttatatataaatattatagtatattattttatttaaatattatgggaaaagttagaataaaaaagtaaaaataagttttggtatttttttttttaaaaataggtagtagtttttattttttttaggcgaatatgattagaaatatttttaaggtaatcgtttataggtatttttagttatgtattttgaattttaagaaatagaaatataagaataatattagcgattattattaaaattttttttattttgttgtttttttagtagttataaataaaaatagttataaaataaaataaaaaattaatataaatttatgtttttcgagtggttatattaaagaaatttatcgtttttgatgaaagttaatcgaaagtattggtttaaggatgaagaaataaattagtattttagtgagggattaagtttaaaagttttttttagaatcgaagataaattttgtatattagaagatattataaaagtatttgcgtaagagttaaaggtataagtggaaaaagttgatttttaagatggtttgatgatggtgtgttgtttataaaatttatttgtaatgaaaggcgtttgtaaggatagtatttattaaatatagaagtaattgtattagaaaataggtttttagttttgatttaagtgattaaattaaatttatttgaataagggttgatcgattttttttttttaattcgtttttttttttttttttttatatattggttttttttttagtttattttttttttgaatgtttttttagttatgtttattatttaattttaatgttaattagagatatatatattagtattagtaatttacgtttttattagtatagtttattttgttaaatgaaaaattcgagcgtgtgtttgcgtgtaagttaataatgtagatatggtcgtatttttgaaagtatatatttaatatttttttttttttggtgttaattttttttttttatgtatttttattatgttatttttaatatgggtggcgggtttttttttagtttatttttttaatttattttaataaataattataggtaggcggtaggatttatttattttagagggttattttttttatatttttttttagaggcgtagtttaaggagatatggtgataattatagaggtttggaattttttttatataatgttattatgagtttttatttaaaatgaaaaatgtatattatatttaaaagcgatataaggttagcgttttttttttaggaatgttttataataagggatattttggttttatatttaggaaaggagttggaggaagaaggaatgaaaataaaaattattataaaatatttttaagatattaaataggatttttatcgggaaaaaaagattatatttattgtttttgttataatagggaatatttattttttatagggttgtttgagaattttatttttaaacggattaatttattttgttagtatggtttttggggtttattattattattattaaaagtaaaaagagattttattttgttttttataatttttgttatgttttttaggatgtattataatttttaatatattgatttaaatgtttatagaaaagggtttttttttagggttgaagttttatttattagtttttatgatttttatattataaataggtttgtatagagttgagtttgtagttgaatgtttttttttatttttttaaaatgtttttttagatgagtattttgggtatattttattgatgagttttatttttttaaaattaattttattttttattttatttaagtaaatatttaagagagtttgtaatagaaaattaatttcgtagtttagttgtagagtgggtttgtaatatttatttttggaggattgggaatgaatttttttattaagtgtttgtttgtttgaagtgtgttgttaaatagttttttcgacgtgtattttaaaatttgttaattgagttttttttatataaatggaaaaaaaaagtattgttttgaatttatatatattttagttttgattaatgttttatttaaaatagttatagtgtattttttgatttgaagtttaaagtaaataatatttgtatatttgaaatatatttaagataaatgaaaagtttttagatgtttttgtgtgagatgtt

SEQ ID NO: 2389 - DNA, 2463 bp, Artificial Sequence
  chemically treated genomic DNA (Homo sapiens)
ttatgaagtgggtggggaggaaagatagatttaaaaatttattagtatttaattttgttaagattttttttattatatgttagtataataatttatttgaaatgtgtattaattatttttgttgtattttgtgtgtacgttttttacgtagtttttgattttttcgttaataattttgcgttgtattcgttgatttgaaataaattgaatttagtggtatttatttaagaattgaattatatagtttttttaattggtgttttatttaaatgtgagaaagtaacggtttgttatttgtaatacgtttttaataaaataaaattagaattttaatatttttttttattttagggaaaggtttggttatgaaaatattatttttgtatgattttaaaaataaaattttttgaattttttttattgttaatgtcgtgaaaattgtttatatagatatatattaattggagagatttatgtaaattagttgggttaggaaggttttttttggaagtggtttttaaaataggcggtaatttgttttcgttgttaatagttatattgtttttttttttttagtttttggatttcggattatgtgatttaatatattttcggttggtaaaataggaagcgttaagataggaatatgttaagtatttgaagatattttttattgtatttgttagttttaagtttttgagtcgtattgtttgttggttggagggggtagaaatttaattttaggagtttagtgatgtttttttattgacggttttataggtaatagatattgcgggtaatattgtttttaatatcgtttatttatgttttttttcggaggatttttgtaagcgatcgaatagataggagtagttggaaattttgggttttgttttttaattttagtgtgaaattaattgttttaattgtaaagaacgatttatttttttatttattatatttaatttaaaaatgtaaatgttattagtggattgattattgataagggtgtttttgtgttcggttttaatttttattagtgaggattatgaggacgtagttatattggtattttttaagtgttatcgtgatagtatttgttgtataaatgtttagttgttatcgtgagttttattatttagttttttttttcgaatgtagattaataagtttagaaattataattgtttttttgtcgaatttgtgataggcggaaataatgatattagtgttttgttaatttttttgtttttgcgtttggtattgttttattgagttatttgttatatttcgttttgatgaggcgaatttaatttttttgttgtaatgataatggggttattttaatgtttggaaatgattatgtggaagttttatcgtgttttgttttggtaagtaaattaaggtattgtgtacgttaggagagcgggttttggttgttaggtaggtagtggagatgttgagttattattaggatttagacgtagaagtcggttttattttgagtttttggtggtggttttgtaggagggaagaaggatggggaggggaaaggtgggattattgttgtagaagtatagttattggttaattttttagttgtttgtataaatttgtttttagaagggttttttaggttatttgtgttgtttaaggaggttagggtggttggagtttataaataatcgtggtgatattattaatattatttgttggggtttttggtgtgtggattgtggattttttttttaggatattaattgaattaaattatttttatattaggtttgattttttttggttttttgagaataatattgttgtagaataaaaaaatatatataatttggaaaatattaggtgttaatgaggatttggagtaattagattttattattgatgttgatttttaaaattattttagaaaagtagtagtttttattgaagttagatatatataaatttagtaaattttgtattgatatagaatattttatatatttataaagtgtatgtgagtatttgttatatgtatagaatgttaaaattagtaattttgtttttaggtagataattaatagagatgtaagtgtgtatttgataaaatatatgaattagaatgtttatagtagtattttttatgataatgttaaattgtaattcgtttaaatgtttattaatagtagaatgttttaggagttggtttttggtggaatattatatagttatcggaatgaatgaattataattgtgtggatggattttataaataggatgttggatgaaagaaattaagtatgatagagtatatatgtaaagaattttaggttgggtacgttgatttatgattgtaattttagtatttcgggaggttgaggtaggtagattgtttgaggtcgggagtttaagattagtttgattaatatgaagaaattttgtgtttattaaaaatataatatatta

SEQ ID NO: 2390 - DNA, 2463 bp, Artificial Sequence
  chemically treated genomic DNA (Homo sapiens)
taatatattgtatttttagtagatatagggtttttttatgttggttaggttggttttgaattttcgattttaggtaatttgtttgttttagtttttcgaagtgttgggattatagttatgagttaacgtgtttaatttggaattttttatatatgtattttattatgtttggttttttttatttaatattttgtttatgagatttatttatatagttgtagtttatttatttcgatgattgtatggtattttattaaaaattaatttttaaggtattttattgttgatgggtatttggacgaattatagtttggtattattatgaaggatgttgttatgaatattttagtttatgtgttttgttaaatatatatttgtatttttgttggttatttatttaggaataaaattgttggttttgatattttatgtatgtaataaatatttatatgtattttataaatatgtaaaatattttgtattaatataaaatttgttgggtttatatatgtttggttttagtagagattgttgtttttttgaggtggttttagaaattagtattagtagtgggatttggttgttttagatttttattgatatttagtgttttttaagttatgtgtatttttttgttttgtagtagtgttatttttaaagaattaggaaagattaggtttggtgtaagagtaatttgatttagttaatgttttgaagaggaaatttataatttatatattaaaagttttagtaaatgatgttggtagtgttattacgattgtttataagttttagttattttggtttttttgaataatataggtggtttgggaaatttttttagaggtaaatttgtgtagataattaagagattagttaatggttatgtttttgtagtagtgattttattttttttttttttatttttttttttttttgtaaggttattattaaaggtttaaaatgaagtcgatttttacgtttaaattttaataataatttagtatttttattgtttgtttgatagttagagttcgtttttttggcgtgtatagtgttttggtttgtttgttaagatagagtacggtgaagtttttatataattatttttaaatattaaaatggttttattgttattatagtagggagattgaattcgttttattaaagcggagtgtgataggtgatttaataggatagtgttaagcgtagaggtaagaagattagtagggtattgatattattattttcgtttattatagattcggtagggaggtaattgtaatttttgggtttattagtttatattcggagggaaaaattgagtgataaaatttacggtgatagttaggtatttgtgtagtaagtgttgttacggtgatatttagaaaatgttaatgtggttacgtttttataatttttattaatagaggttaaagtcgggtataaaggtatttttattagtgattagtttattaataatatttgtatttttaagttaaatatagtaagtaaaggagtaagtcgttttttgtagttgggataattaattttatattggaattagagagtaaagtttaaaatttttagttgtttttatttgttcgatcgtttgtaagaatttttcgaggaaagatatgagtgaacggtgttaagaataatgttattcgtagtatttattgtttgtgaagtcgttaataggagaatattattaaatttttgaaattagatttttgttttttttaattaatagataatgcggtttaaggatttaaaattaataaatgtagtggaaaatatttttagatgtttaatatatttttgttttaacgttttttattttgttagtcggaggtatattaaattatataattcgaaatttaagagttggggagggaaaggtagtataattgttggtaacggagatagattgtcgtttattttaagggttatttttaggaaaagtttttttagtttagttgatttgtataaatttttttaattaatatgtgtttatataggtagtttttacggtattggtaatgaaaaaaatttagagaattttatttttgagattatataagaatgatatttttatggttaaatttttttttagaatggggaaaaatattagaattttaattttattttgttggaaacgtattataggtggtaagtcgttatttttttatatttaaataagatattaattaagaagattatgtaatttaatttttgagtgagtgttattgaatttaatttgttttaggttaacgaatgtaacgtaaagttattaacgaaaaggttaggggttgcgtagaaagcgtatatataggatataataggggtaattagtatatattttaaatgggttgttgtgttggtatatggtggagaaaattttaataggattagatgttaataaatttttaagtttgttttttttttttatttattttatga

SEQ ID NO: 2391 - DNA, 2499 bp, Artificial Sequence
  chemically treated genomic DNA (Homo sapiens)
gttgtagattgagattttttgtttatttggagggtgaatttggggtgttgaagggtattggggtgtttagggttttttatgtttttttttagtgttatttttgggattttattttgttagagtttttgatattttatgagaaagttggaaatttaggttttttttttttttaattagaaatgttaggatttaaaaatataagtagttaattaaaaatttaaaaatttttaattattgtgtaagttaaatgaaataggtataataaatatgagttgttatgtttttaggtgtttggttagttgggatataggtgaggggttgacggtaggtgtaggtgatttttttgtttattgtttgtttattttatgtgttgttgtttggatttattaatattgtttgttttatatttttgtttgaagaaagttttgttacgtgggtgagttttgtttatattgagagtagggttgagttgtagttagttataaagtttatttttagtgggatattataagggtttatatgaattgaattaataatatttttatatttgaggttatataattttaaaggaaatgtgatttttatagagagaatgaagatgtttttagtatttttaaatatatcgagcgttttttaataagtgtattttttttattttgtgtattttgtgtatgaaagttttttgtgaggttatgtttatgaaaataaacgttttttttttttttttttataaaagcggaataatgaaagataaggttaaggttatattatggttatagtggttgttaataagttttttgagattgtttttttttgttgaaattagttaatgaattggagttttttattgagtttatagaaggtagttttttagatttgggagtagataattagagagatattttttttatgtagtatgttgaagggtattatttggttttgtggttatattagttgagtttggtttaggattaatttcgttaattattataggtggatttttggtttaaggaagtaaataaggttttggggtatttttttatggtcgttttgggattttttagaagtgataagtcgttaatttggaagttgtttgggtgataatgattttcgaatgggtttttatgtggacgagtaatatgatttaaggtattagggatattagaaaggatattttttatgtagtttgaaatgtgagtagagagtaaaatagattttaaaagacgagtatcgtcgttttttcgatattataaagtgttttttgagtgataatagtgtatttttgtgtatgaattgtatttaagttttgtatttttggaaaataataatttgtgttttttggttattatagatttagtatgggtttagaggttttatgtgtgtaggattttattcgtgtaatttttttagtgattgggagaggtaggagtggtttttgtttttattttataggggaggagacggagatttttaagttagtgaaggatttagttgggattttttagttgaagtttgtggattttaaagtttgtgtttgttgaggattaagagatgatagaatttgtagtggtttggatgtggtaggaatttattttatttatttttttttaagatatgggtggtgggagtcgttaggttgatagagtatttgacgggaagttaaaagaaatttagtttggttagtagtgtgtttggaattattttgtagggtttattttaaattatggggattgttgtagatttattatttatgtaaaaaaaaaaagttttttagtgatgttatgggagggttattgtggattattgtttgattaattacggttgagtagggagagttgttgttattttttttttttttttgtttttgtgaagttttttatttttttattttagttagatgtttttattaattttatttttttttagttttttgggaaatttattatatttgttttttttttatttttgaatagtttttttttgttaattggattttttttatttttttttttattaatgttgtaaaagttgaaagaattgtatagagaaaattacgtatttattatttagatgttataattggtatttgttgtatgtgttggattatatatttggttttttgtttatttttttaatcgtttattaagattttaaaaaaatgtattttaaagtaggttgtagatattatatattcgttttttatatattttagtttgtatattattgattagattttaagatttatttttgttgttttttttgttaagtaaaaatttatagtgaaatgtataatttttatatgtagtattgggtaagttttttttattagtttttaatatatttgttaattttttttattaaaaaattaagttaaatttgtttttattttaggtttatttagttattgtttcgaattgtttttttttatttttaattagatttttcgaaagtattgtattcgttttttttttttagtttttttttgtatttatttggttt

SEQ ID NO: 2392 - DNA, 2499 bp, Artificial Sequence
  chemically treated genomic DNA (Homo sapiens)
gggttagatgggtgtagggagaggttggagagaagaaacgggtgtagtgttttcgaaaagtttgattggaaatgaggaggagtaattcggggtagtagttgaatgggtttgaggtgagggtagatttggtttggttttttaataggagagattagtagatgtattaaaagttaatggggaaaatttgtttaatgttatatgtgagaattatgtattttattgtaaatttttatttaatagaaaaagtaataaaaatgaattttgaaatttggttagtggtatgtaggttgaagtgtgtaggaagcgagtatataatgtttgtaatttgttttgaaatgtatttttttaaagttttggtgggcggttagaagaatggatagaagattagatgtgtgatttagtatatatagtaaatgttagttgtggtatttgggtggtaagtgcgtgattttttttgtataatttttttaatttttgtaatattggtgaaaaagaaaataagaagagtttagttgatagaaaaagattatttaaaagtaaaaagaaaatagatgtggtaagttttttaaggagttgggaggagatggggttgatgaagatatttggttgagataggaaggtgaggaattttatagaaataagagaaaaaggaaaatgatagtaattttttttatttagtcgtgattaattaagtagtaatttataatggtttttttatggtattattgagaggttttttttttttatatagataatgaatttgtaataatttttatgatttaaggtaaattttataaggtgattttaaatatattattaattaggttaaattttttttaatttttcgttagatgttttattagtttgacgatttttattatttatgttttgagaaaagataagtgaaatgagtttttgttatatttaagttattgtaagttttattattttttgatttttaataagtataagttttgggatttatagattttagttagagagttttagttggattttttattagtttagggattttcgtttttttttttgtaaaatgggggtaagaattatttttgttttttttaattattgaaagggttatacgaatgaggttttgtatatataaaatttttaggtttatattgggtttatagtaattagaaaatatagattgttattttttaaaaatataaagtttaagtgtaatttatgtataaggatgtattgttgttatttagaagatattttataatgtcgagagagcggcggtgttcgttttttgaaatttgttttgttttttatttatattttaagttgtataaaaagtgttttttttggtatttttggtgttttaggttatgttgttcgtttatataaaagtttattcgagaattattattatttaagtagtttttagattggcggtttattatttttgaagggttttaaggcggttatggagaagtgttttaaagttttgtttgtttttttgggttaaaggtttatttgtggtaattagcgagattggttttggattagatttagttggtgtagttataagattaaatgatgttttttaatatgttgtatggaaaaagtgtttttttgattatttgtttttagatttgaaaagttattttttgtgagtttagtggaaaattttaatttattaattgattttaatagaaaaagataattttaaaaggtttgttgataattattgtagttatggtgtaattttaattttattttttattatttcgtttttatgaggaaaagaaaaaaaggcgtttgtttttatggatataattttatagaaagtttttatatataagatgtataagatgaaaaaaatatatttattggagaacgttcgatatatttgaaagtgttaggaatatttttattttttttgtagaagttatattttttttaggattgtgtagttttagatataaaaatgttgttaatttaatttatgtgaatttttataatattttattgaaggtagattttataattgattgtagtttaattttgtttttaatatagataagatttatttacgtagtagaattttttttaaatagaaatatgaggtagataatgttaatgggtttaagtaataatatatggaatggataggtagtgggtaagggggttatttgtatttgtcgttagttttttatttgtattttagttgattaggtatttaggaatatagtagtttatgtttattatgtttattttatttggtttgtataatggttagggatttttgaatttttagttagttgtttatatttttaaattttgatatttttgattaaaaaaaaaaaaaatttggatttttagtttttttatgaaatattaggaattttgataaaatggagttttagaggtagtattaagggaagatataggaagttttagatattttagtgttttttagtattttaaatttattttttaaataaatagaaaattttagtttgtaat

SEQ ID NO: 2393 - DNA, 2323 bp, Artificial Sequence
  chemically treated genomic DNA (Homo sapiens)
tgagaatttatgttttttaaaggttttaggtgattttgtataaggggttttcgttatattagttggacgttttgaggtttttcggagtagaatgaggtgttaaggtgttgtgtttaaacgtatggtttggttaagtgttttagtgtagtgatttttagagggttagatgtagcgaaagtgaaaatgagtatgtgggttatttagatattttaagtttattattttgtttgggttagggtgtatgacgtttatttttgtaaaatagagtgagtaggtagggttgttttttttttttgtagttgggaagttttagttagtttgttttattgaatttttagttttcggagttggtttatttttttttagagaaaatagttttattataaatatataaatttgagttggggcgggggttataggtttttgtttaagtttattttgtaaaattgatttttttgttaatgagaatatagttttgtttttattttttttgtgtgttttggtagtttttgtttggttgtaaaatttatttaaggaaaattggtatttattttgggtttatttgtatttagtaaaattgataaatagatgggggttggttaggttacgggtaatttggttagtattttataaaatataaatgttattttttatttttatagggattatttattgtgaattaggaagttattggtttgttatattttaataggattatttattttagttaagggatttatgtttttattataaagtggtggggggtgttttgggtggaagagattttttggtattgttggtaataaaggaataaaatggttttgttgggtttgcgtatgtatatatagggtatttatttgtgaagattgtgaaaaaagaaagaagtaaagaaagaaattaataagatttgatggggaagtttgtaaaggagattagaatttagattaaatgttttattttagtgtttttggagtttttttttttttgtgttttagttaaaggtattgggaggattagagattttattttagttttgtttattttgggaataatcgttggtgtatgaataataatgtttttttttgattatgattaattgaattgtagtttgcgggtagtggggaggggttttgtcgggttagtttattacggcgttttttaagtagttatcgatagtgatggatgtagcggcgttttttagagtgtattttcgaatatttaagagtaggggtatgaatttgtatttcgagtttttattagtcggggtttggtagagaggacgggaatggcggtagttaaagatgagttggttgattaaaaggaagaggagaggtagttttttttttaattttttttttttatatttgattttaagtaagttttgtttatggggataaatgagaaaatatttatcgtgtgattatgtaggttttagtggggttatttttgttgaggtcgtgtttgttaaaagtattgggtttgtttggggtgtagtgggaattttggtttggaaaataaaaaaggtaaaatagttaaagatttgttttgttagaggatgtttagaagttaataaatgaggtagaagaggagatagaaagataagagagaagtaggggtagttggaaacggagtttatggttatgtttataatttaataatggattatatagggattttaatatttggtcgttttgttgtttgcgttgtgtttatatagtagaattatgtagttggggttttgggtttagtcggattttgtttttatagtatgaaggtgatttttggtgaattgcgattcgggaagtttgtgtagtttagtagtttttatggtggtttggatataggggaagtcgtttaattatagggttattgttttttattttagtcggatttagttcgggttaaattttagattggtatttttttatgagagttgtgtacgttattttggttttttttggtggtagaggttggttgaaattttaggcggattttggaggtagatgttggttttaagggagttttggttggtttgttttttttggaaagttttgataaaagtattcggggtaggggttatattttttttgtatttaaaattttgaaattttaaatttttttaaatagttttttataatttttttgttagtttattatgttttaaaaattatttataggttttagtattaatagttattttattgtatagaagttttttagttttttttttttatttaagaatgagatattttttgtttattttgaattttataggaataatttagggtgttttgtttttataaataaaaaatttttaaaaaat

SEQ ID NO: 2394 - DNA, 2323 bp, Artificial Sequence
  chemically treated genomic DNA (Homo sapiens)
attttttaaaaattttttatttataagaataagatattttgagttatttttgtaaagtttagaatgggtagagagtattttatttttaaataagagaagggagttgagaaatttttgtgtagtaaaatgattgttggtattaagatttatggataatttttaaagtatagtaagttaataaaaaagttataagaaattgtttggagggatttaaaattttaggattttagatataagagaagtatagtttttgtttcgaatgtttttattagggttttttaagaggagtaggttaattaaagtttttttaaagttagtatttgtttttaaaattcgtttggagttttagttagtttttgttattaaaaggagttagggtggcgtgtatagtttttataaaaaggtgttaatttggggtttggttcggattaaattcgattgagatagaaagtagtgattttgtaattggacgattttttttgtgtttagattattatagagattgttgggttgtataagtttttcggatcgtagtttattaggggttatttttatgttgtgagaataaagttcgattgagtttagggttttagttgtatggttttgttgtgtaaatatagcgtagataataggacgattaaatgttagggtttttgtgtgatttattgttggattatagatatggttatagatttcgtttttaattgtttttattttttttttgtttttttgtttttttttttattttatttgttggtttttaaatattttttaataggataaatttttggttgttttgttttttttgttttttaagttagggtttttattgtattttaaataagtttagtatttttaataggtacggttttagtagaggtggttttattgaggtttgtatggttatacgatgaatatttttttatttgtttttatgaataaaatttgtttaaaattaggtgtgggaggaggaggttaggaaaagggttgtttttttttttttttttaattaattaatttatttttaattgtcgttattttcgttttttttgttaggtttcggttaatagaaattcggaatgtaggtttatatttttgtttttaggtgttcgaggatgtattttgggaagcgtcgttgtatttattattgtcggtggttatttgagaaacgtcgtgatggattggttcggtaaagtttttttttattgttcgtaggttgtaatttaattagttatggttagagggaggtattattatttatatattaacgattgtttttaaagtaaatagagttgggatgaggtttttgatttttttagtgtttttagttgggatataaaagaaaaaaaattttagagatattggggtgggatatttgatttgaattttgattttttttgtaagtttttttattaaattttgttgatttttttttttgtttttttttttttttatagtttttatagataagtgttttgtgtgtgtatacgtaaatttagtagggttattttatttttttattgttaataatgttagaaagttttttttatttaggatattttttattattttataatagggatatggattttttaattggagtgaatgattttgttagaatataatagattaataattttttaatttataataaataatttttgtaaaaataaaggatgatatttgtattttgtaaagtgttaattaaattgttcgtggtttggttagtttttatttgtttattagttttgttgagtataagtgaatttaagataaatgttagttttttttggataaattttatagttaagtagaaattgttaaagtatataggagaggtaaaagtagagttgtgtttttattgatagaaaagttaattttgtaggatggatttaggtaagagtttgtgattttcgttttaatttaagtttgtatgtttataatagggttgttttttttgggagggaatgagttaatttcgggagttgaaagtttaatggagtaggttggttggggttttttagttgtagggggaagaaatagttttgtttgtttattttgttttgtaggagtgagcgttatgtattttggtttagatagggtgataaatttggggtgtttggataatttatatgtttatttttattttcgttgtatttgattttttgaggattattgtattgggatatttgattaagttatgcgtttagatataatattttagtattttattttgtttcggagagttttagagcgtttagttgatatgacggaaattttttgtgtagagttatttagagtttttaagaaatatgaattttta

SEQ ID NO: 2395 - DNA, 2466 bp, Artificial Sequence
  chemically treated genomic DNA (Homo sapiens)
gtttgaaataaataaataaataaataaataaagggtttttatgtatgatgtttgtgttttaagtaattcgggtaagagtgatattattgtttgtttattagtatttgtaaagaaaaattaattattgttagttttttttaaaaaaatgtatttgttaaaattgtttgatgatatggaaatttatattgaggtgtttatatttaggggtaattaagttttttttgtagttggggtttataattatattttttttattttataaaaattaaaagtttaggaattacgaggaaggagtaagaataaatattattataaattttaaattaatagcgttgagagattatagtagttttattttgttatttggggttagagattgtttatatttattttgtggttagcgtttattggaaagtaacgtagtatatattacggttgtgtttgagttgatatttattaatattgaattaattgtattttaatttaaagatttcgtaagtgtttttttttttaattgggaatttggtagaatgttatatttaaatattaaacgttgttaattatgttagcggtattttagtttggataaaatgttttttttattgtagttaattgtttgaatatttgtagattgatatattttttgtagatatttatgttgttttttttttataattttattttattttttttttatttttggtgttgatttaaagggtttttattattttatgttgataatttgtgttttatggtcgttggtgtgattgggagtagttgaagtcgcgtgtaataatatatatatataaatatttgaataggaaaaagaaggtttgtttgatgtagattaaggaagaaatgtatttaaataaataatgttattagagggattttgattttgaattacgaataggtagggttagatttggaagggtatttttttattgttcggtttgtacgggtgggcgttagtgttacggtttattttaaaaagtaggtttttttaggttttatggtatagggagtcgagttgggtttatgttagtaggtttatgacgttattgttgtagtttgtttatttggttaggattattaaaataattttttttgagaagaataaatttgtttttgtagaaagttaaagatttgagaggttttaattagtttattttgttttcgtttttggtcgttaaacgttattgtagagtttaaagaatatgatgttgtgtgttttttttttttatttttgcgtgggggttttttttttttttttagtattttttgtgaatagttgaaaatgagtggtaaaatgatattcgatttagaaagtaagagtattaggaagtaaaattggaggtaaatatagtagttaattttattaggtatagttggtgttgttcgcggttgtttttgatagcgcggtcgatatagaattatttgtgtttgtttattagttttttttaatttgcgagaaaatggttcgggtcggttatatggtagttagataggttaggtattatgggaatataaaagtcggagtttttagtagagttaattattaatgcgttttttttttgttttatttaggagtgttgatagggttttgatagtttgtatttgttattagtcggttgtagttttagttaggtattaatgagatttttggttttaggttttttggtagagtttagagtttagtttggatttaggtgttgttattaatttgaagtttgtttgttttttgagtttttttttgttgttcgttgtgtttttattttttaggttttgttttggttgattatttatttgtttggaattttgtacgtttttgtaaagtatttgtttgagtttagcgaagtaaggttaggaaatgtgtgattataaagtttataattttttttttttttgtgttattttttttttagttaggaaaaaaaaaaaaaaaattagaaagttaagttgaattttttttttgtttgtttggatgtgtattaaggatggattgttttgttttaatattagtggggtgttttttttttaaaatttagtttagagagttatttacgggtatattttaatatttttatttagtaagtaaaatgtaggtgtttttgatagtaatttttttaaatagaaaattttattttaatatttttaatggtaagtagtttgtgtgttaatatgattggagttagggtgaatgagaattatattaaaattttttagttattagtttttttttttttttttttttttttttgtgatggagttttgttttgtcgtttaggttggagtgtagtggtgcgatttcggtttattgtaattttcgttttttgggtttaagtaatttttttgttttagttttttgagtagttgggattgtaggcgtatgttattatttttggttaatttttgtattattagtagagatggggttttattatattggttaggttggttttgaat

SEQ ID NO: 2396 - DNA, 2466 bp, Artificial Sequence
  chemically treated genomic DNA (Homo sapiens)
gtttaagattagtttggttaatgtggtgaaattttatttttattaataatataaaaattagttaggagtggtggtatgcgtttgtagttttagttatttaggaggttgaggtaggagaattgtttgaatttaggaggcggaggttgtagtgagtcgagatcgtattattgtattttagtttgggcgatagagtaagattttattataaaagaaaaaagaaaaaaaaaaaagaattggtagttggaaggttttaatgtggtttttatttattttagttttagttatgttgatatataagttatttattattaaggatgttaaggtgaggttttttatttaaaaaaattgttgttagggatatttgtattttatttgttgagtggaaatattagaatatattcgtgggtgattttttaagttaagttttggaaagaaaatattttattgatgttagggtaaaataatttatttttggtatatatttaaataaataaaaaaaaaatttagtttagttttttaatttttttttttttttttttagttgggggaaggatgatataggggaagagaggattatgggttttataattatatattttttagttttgtttcgttgaatttaggtagatgttttgtagaaacgtgtaggattttaggtaggtgggtgattaattagaataaggtttaaggagtgggggtatagcgggtagtaggagggagtttagggggtaggtaggttttaggttgatggtagtatttgggtttaggttgggttttgggttttgttagggagtttggagttaggggttttattagtatttggttaggattgtagtcggttgatggtaaatataggttattaaagttttgttagtatttttgaatgggataaagaaaaggcgtattaatgattaattttgttaaaagtttcggtttttgtatttttatggtgtttggtttatttggttgttatgtgatcggttcgggttattttttcgtagattggggaaagttagtgagtaaatataggtggttttgtgtcggtcgcgttgttagggataatcgcggatagtattagttatgtttggtgaaattagttgttgtgtttgtttttagttttgttttttggtgtttttattttttaagtcgaatgttattttgttatttatttttaattatttataggaggtgttaaaaagggggaaaaggtttttacgtaaaaatgggaaagggagatatataatattatgttttttgaattttgtaataacgtttggcgattaaaggcgagggtagggtaaattaattaaaattttttaggtttttaattttttgtaagagtaaatttattttttttaaagggaattattttagtgattttgattaaataagtaagttataataatgacgttataagtttgttggtatggatttagttcggttttttgtgttatggggtttggaagaatttgttttttaaaatgggtcgtggtattagcgtttattcgtataagtcgggtaatgagagggtgtttttttaagtttgattttgtttattcgtggtttagagttaaggtttttttagtggtattatttgtttaaatgtattttttttttggtttatattagatagatttttttttttttgtttaaatatttatatgtgtgtattattgtacgcggttttaattgtttttaattatattagcggttataaagtatagattattagtatgaggtgataaaggttttttgagttaatattagaaatgaagagaaaatgaaataaagttataaaaagaggatagtataaatgtttataaagagtatattagtttgtagatatttaagtaattagttataataggaaagatattttatttaaattaaagtatcgttgatatgattaataacgtttgatatttaaatataatattttgttagatttttagttaagaaagagggtatttgcgaagtttttggattggaatgtagttagtttagtgttagtgaatattagtttaaatatagtcgtggtgtgtgttgcgttgttttttaatggacgttgattatagaataaatgtgagtagtttttagttttaaatggtagggtgaggttgttgtaattttttagcgttgttggtttgaggtttgtagtggtgtttatttttgtttttttttcgtggtttttaaatttttgatttttgtgaaatgaaggaaatatggttataggttttagttgtaggggagatttggttgtttttgggtataagtattttagtgtggatttttatgttattaagtaattttagtagatatatttttttgaagggggttgatagtaattggtttttttttgtaagtgttgataggtaggtagtggtgttatttttgttcgaattatttagagtataagtattatatataaaaattttttatttatttgtttatttatttattttaaat

SEQ ID NO: 2397 - DNA, 2473 bp, Artificial Sequence
  chemically treated genomic DNA (Homo sapiens)
tttagtttataattagtttttagtttatggtggtttttttttattttttaaatgttaaagtttttagttttttattttttttttatttttgattttaagtttttaaattgggtgattattaatattattgttaggagtatttttagagtattttatatttatagcgtttttttttttttaaattgttttcggtttttttttcggaataggtattaaaaatattttattggataaatttttttttttagaagatatattatgaatatggttggagaaggtaggattataattcggagaatttagggttgattttttttatttttttgtttttttgttgtaaagttcggagttttaggaagtgtcgttaaattattttttattttttttttaagagtagggtagaataaattgttattttgtttggttttgttttttatatataaggttttttaggttttggaatttaggttattggtattttaattaatgttaatgattgggatgattttttttttattgaatttgagtaagggaaataaataggtaaattcgaataaagttatgtgcggatgtggtattttttagaaaagttgattttttcgatggttggttagggtttttaattaggtttatattttttttttatatatttttaattttgaatttttttagtttaaatagaaattggttgtagggggaagtaggtagatttttttttttaatatataaatgattttgggttttcggaattagaatttttatttttttattattaggagtatttttattttgagattaatataattagaatgtgtttaattataattttataataatagaaaagatatatagtaaatgtttttaaatatttggaatttggttttgaaatcgatttggtatttaaatcgatatgtatattttagttgggttaaaatatagttaaggttttttttagagatattttgttttatttttttttttaagtaaatttttatttttttttttaatttttatagtttaagcgttttatttagtttaaacgttagggatttaaattgttattttagtggaagaggtttgattaaaatttgtgtttttattaaattattggatagtggtttttgggttttgtttatattagtgttaattttaatttaaatttcgtataattatatttgtttcgttaaatgtatttattaggaatatattataaattattttgtattatgagtcgagtttttttgtttattgtaaagtgttttgaaattagtattataagtaattagttgtaagtgttattttatttttttaatgttttattaattaaattttatggtagttgatgtgatgtttaagtttttaatatataagattagtattatttattttttgtatttgattacggtttttaaatttgatttgttatttgtgtatttgttttcgttggagttttgttttttttttagtggttttttaatacgtggggttttgtatggatattagttgtatgtgtattttttgtagaaattggaaataaaaatttattttttatgttgtggaaatgtatagttttaaagttaggaaatttttttaatggaagaagagttttatttatttttttgagttatttatagtgattttttatgatttttagattaatgttaaaatgttataatggaaaaatttttttgggtaagtttttttttatgttaagaattagagaaaggaattacgtttatttaggtagattataatttttattttggttttagttttttaaaaaattagatatatttagtttaagtatttaattaggaaaaaaaaatgtattttttttttattatgtgatacgaattattttgtattaaatataaaattttagaatttatgtttgtaaagaaatatagaataatttatatttaataattttattatatgtatatataaaattatagtaaaatatgatatattttataggatttttttgtttttttatgatgttatcgaatatttgtaaatgtttaaatggaattttttttttattttttatataagtttaaaaatataaatatatacgtatatatatatatttatatatatgtatttttttaattaaaggtaatatttattggtgttaaaattaatagttttattggataatggttttatggatattttagaggtagttttaagtttgttgtgggtataggtatgtcggatatgatttttttgtagggatgttttttcggtggttgtgggggatgtttgcggtttttcgtttgttagcgttgagtttagttttatagtgagtcgagatgaataggtgtttttttttttggcggcggcggtacgtgaggtcggttttttgtagaatagcgttttagtgggagatttttagttttacggtttttttttttgattatttagtaggaaaaatatacgaaagcgtttttttttgttagttttgtcgatg

SEQ ID NO: 2398 - DNA, 2473 bp, Artificial Sequence
  chemically treated genomic DNA (Homo sapiens)
tatcgataaaattggtagaaaaaaacgttttcgtatattttttttgttgggtggttagaaggaaaggtcgtgaagttaaaggttttttattgagacgttgttttgtaaggagtcgattttacgtgtcgtcgtcgttagagaagagagtatttgtttatttcggtttattgtgaggttgagtttagcgttggtaggcgaggggtcgtaagtattttttatagttatcgagagggtatttttgtagggaaattatattcgatatgtttgtgtttatagtagatttaagattgtttttaaaatgtttatgaagttattgtttagtagagttgttagttttaatattagtgagtattatttttggttaaaaggatgtatgtgtataggtgtatgtgtgtgcgtgtgtgtttgtgtttttggatttgtgtggagaatgaagaaagggttttatttaggtatttgtaaatattcgatggtattatgaaaagataaaaaaattttataaaatatattatattttgttatgattttgtgtgtatatgtaataaaattattaagtataaattgttttgtatttttttgtaagtataaattttaaaattttgtatttagtatagaataattcgtattatataataagggaaaaatatattttttttttttgattaagtgtttagattaaatgtatttggttttttggggaattgaggttaagatggaaattgtagtttgtttgggtgaacgtaatttttttttttaatttttgatatagagaaaaatttgtttagggaaatttttttattatggtattttagtattaatttgaaaattatggggaattattgtggataatttaggggaataagtggaattttttttttattaaaagaattttttgattttgaggttatgtatttttataatatgggaaatgggtttttatttttaatttttgtaaagagtatatatgtaattggtatttatataaagttttacgtgttgggaggttattgagggaggagtagagttttagcgagggtaaatgtataaataataaattaagtttaaagatcgtggttaaatgtaaggagtaaatgatattgattttatatgttaggggtttggatattatattagttgttatggagtttgattaatgaggtattaaggagatggagtgatatttatagttagttatttatggtgttaattttaaaatattttgtaatagataaagagattcggtttataatgtaaagtaatttgtggtgtgtttttggtgaatgtatttagcgaagtaaatatagttatgcggaatttaaattaaggttgatattaatgtaaatagagtttaagaattattgtttaataatttgatgaggatataggttttaattaagttttttttattaaaatagtaatttaaatttttaacgtttaaattggataaaacgtttaagttgtaaaggttggggggaaaaatagaaatttatttgaaaaggaaaatgaaatagagtatttttgggggaaattttgattatgttttgatttaattgggatatatatgtcgatttaaatgttaggtcgattttaaggttagattttaggtatttgaaggtatttgttatgtattttttttgttgttgtaaagttatggttggatatattttggttgtattgattttagagtaaaaatgtttttagtaataagaaagtggggattttgatttcgaggatttagaattatttatgtattaaaggaggaaatttatttgtttttttttgtaattaatttttatttgaattaaaaaaatttaaaattgggggtatatgaggaaggagtatgggtttggttagagattttggttagttatcggagaggttagtttttttagagggtattatattcgtatatggttttgttcgggtttgtttgtttattttttttatttagatttaatggggaggaggttattttagttattaatattaattaaaatgttagtagtttaggttttagggtttgggaggttttgtatatgagaaataaaattaaataaaatagtaatttattttgttttgtttttggagggaaaataaggggtagtttggcggtattttttggggtttcggattttatagtaaaagagtaggaaggtaagggaaattaattttgaatttttcgaattatgattttgttttttttaattatatttatgatgtattttttaaggaaaggaatttgtttaatgaggtgtttttaatatttatttcgaagaaaggatcgagaataatttgggaaggaaaaaacgttgtaaatgtaaagtgttttgaaaatgtttttagtagtaatattaatggttatttaatttaaggatttagagttaggaatggaagggaaatgggaagttggagattttgatatttgggggatgaaggggggttattatgaattgagaattgattatgaattagg

SEQ ID NO: 2399 - DNA, 2437 bp, Artificial Sequence
  chemically treated genomic DNA (Homo sapiens)
ttgggaaggttggggaggtagagttggttttttagtagtttggggttttttcgggtggtttttgtgtaagttaaatatgttaagaaagtttggttgtaggattagtgtttgattagatgtttttgttttttattggttggtgttgttatatatatatatatatatatatatatatatatatatatatttttgatgttgtgagatttggtagttataggtttattgggtatttttttttggagaattgttcgaggttggtagaattatttggttttaaaatgtttggaggtttagttttttttatttatttttagttgattcgatgggtttttcgttgtgttttttttttaaggtaggatttgttgtggataatttattttttatatttttgttcggttttttttatttttttatttagttttgtttatttttttttttttaataatatataagtattaaatttttgttttaggatttgtttttaggagattatttaagttaagtggttatttggtttagttaatttttaagattggtatttatatggttgtaatacgtagaattgtatatttaaaagggtgaattttattgttttttaattatattttaataaatttgtttttagaaataagatgaattttatggaaaaatagttattgttattttggagaaaatatttaaatatgttaattaatgaaaaattttagaaaagtaaaaagggaggtagggaaaagttattttgtatttaaaatatttttttggtttatcggtttgtagttgttataggtggaggataagataaggggtgggtttttttagggtgttttaggtgttgattgagtagttagtatgtgataaaattttttttttgagagaaaaggaggaagtataagatagggaagggaagcgtagttttaggaaaggggtgggcggaggggttatggtttttgttgtgttatttaaacgcgtgtcgtagggatttttgagggttgtgtttttatttgtttggttgttttgtgtttatagggttagtatgtgattatttgggatttggtgtgggtttttttttggttgttttattttttatttattagttgcgtgttaatagaaagttttttgattgaaggatttgttcgggatttttgtaataaaaatagaaggatttgttataaacgttggaaggattttttgtaaaagtggtattttttacgtgattatgagttttagaatatattgttatttcgggttgtaagtttggtttttttattgagtggtagtgatagatgttttttgttaatgtttagtgattgaatgttattgtagaggttcgtttttatttatataatttgtttttttttttttgtagttattgtgttacgtttgttataaaatttatattttttgtatattgttggttttttttagtagtgagtttttgtgttaattttgttttgtttttttttcggtttattttcgaggatattgggggataaatagtattattattgttaagtgataataaaggttggtaggaatatatttttagtttggggcggttataaggaaggaaagaaataaagaaaaaagtttatgaagttgttggagttatagtttttttttgggaatttagtttaagaatataatttattagaaataaaaagttttatttagatggagatttattgaagtatttgttattataataaaatattgagaataatttgaaaatttttttataggtaaataaatgatgataaatttttttgattggttacggtaggatttttaataattatggggtattggttaaacgtggtaaattgagtagtagtttttgtttttattgtttttttaagtattattaaaataaaagtaaaagggaaaagtatataaatgtatagagataaagaaaacgggaggggagaaaaaggtaaaggaaatagtagataaggaaggttaataaagatggaaagagcgtgaatagaaaaggtttaagtttttgaggaggggatattattaaaatgtgggttatcgtgtgttatagaaatttagaaaggtttaggaattggattttttaagtattagggaaagtaggatgaggttggagttaagagggaaagtttgtaggggaaataagtagatgtttagaagatattgttagggttttagtggttttagaattatttttttttagtcgtcgggaagtgggagtgttttttttggagaaatgatttagatatatttttaaggtggagatatttagtagtgggggtaggattaaggtattagatagaaaggagtgattatgatagaaaaatgtgagattatttaggtttaggttattagtttggtgtttaatgatttgtaggaaaatttataggttagtaagtgtttttattatatttacgtgtatatttttatatgtatttatatagat

SEQ ID NO: 2400 - DNA, 2437 bp, Artificial Sequence
  chemically treated genomic DNA (Homo sapiens)
gtttgtatgagtgtatgtgaggatgtgtacgtgagtgtggtgggggtatttgttgatttgtgggtttttttgtaggttattaggtattaggttagtgatttaggtttgagtgattttatatttttttgttataattatttttttttgtttggtgttttagttttgtttttattgttggatgtttttattttggaaatgtatttaagttatttttttagagaagatatttttatttttcgacggttgggggaggatggttttggggttattggagttttgatagtgttttttaggtatttgtttgttttttttgtagatttttttttttagttttagttttattttgttttttttggtatttggggagtttaatttttgagtttttttgggtttttgtggtatacgatgatttatattttagtggtgttttttttttaggaatttgggttttttttgtttacgttttttttatttttgttgattttttttgtttattgttttttttgttttttttttttttttcgttttttttgtttttgtgtatttgtatattttttttttttgtttttattttggtagtatttggggaagtaatgaaaataaaaattgttgtttaatttgttacgtttaattagtgttttataattattaagggttttgtcgtaattaattaagagaatttattattatttatttatttgtaaaaggatttttaagttgtttttagtgttttgttatgatagtaagtgttttaataaatttttatttaaatagagttttttatttttgataaattgtatttttgggttgaatttttaggaggagattatgattttagtaattttatgagtttttttttttatttttttttttttttgtagtcgttttaagttgaggatgtgtttttgttagtttttattattatttagtagtgatggtattatttgttttttagtgttttcggggatgggtcgaggagggagtagggtagggttggtataagggtttattgttggagaaggttaataatgtgtagaaaatgtggattttgtgataagcgtgatatagtggttgtagaaagaaaggaataggttgtgtgggtgaggacgggtttttgtagtgatatttaattattggatattaataggggatatttgttattgttatttagtgaggaggttaggtttgtagttcgggatgataatatgttttggggtttatgattacgtgaaaaatattatttttgtagagggtttttttagcgtttgtgataaatttttttatttttattatagaaatttcgggtaaattttttagttaggggattttttattaatacgtagttggtaagtgaaaaataaaataattaagagaaaatttatattagattttaaataattatatgttggttttgtgagtatagggtagttaggtagatgagagtatagtttttagaggtttttgcgatacgcgtttgaatggtatagtagagattatagttttttcgtttattttttttttggagttgcgttttttttttttgttttgtgtttttttttttttttttaagaaggagattttattatatattggttgtttagttagtatttggggtattttggaaagatttattttttgttttgttttttatttgtggtagttgtaagtcggtgggttaggagaatattttaaatgtaggatagtttttttttgtttttttttttgtttttttgaggttttttattggttaatatgtttggatattttttttaaaatagtagtaattatttttttatgaagtttattttgtttttaagggtaggtttattgaggtataattgaaaagtaataaagtttatttttttaaatgtatagttttacgtgttatagttatataaatgttagttttggaggttgattaagttaaatgattatttggtttaggtggttttttggaagtagattttaaggtagggatttggtgtttgtgtgttattgaggagaagggagtgagtaaagttggataggagagtggaaggaatcgagtaaggatgtgagggatgaattgtttatagtaagttttgttttgaggaaggggtatagcggaggatttatcgggttagttgagggtgagtggaggaagttgggtttttaggtattttggagttaggtggttttgttagtttcgggtagttttttagggaaggatgtttagtgagtttgtagttgttaagttttatagtattaggggtgtgtgtgtgtgtgtgtgtgtgtgtgtgtgtgtgtgtgtggtagtattagttagtaaaaggtaaaggtatttggttaggtattgattttataattaaatttttttagtatatttaatttgtataaaaattattcgaggaaattttaggttgttaggaagttagttttgtttttttagtttttttag

SEQ ID NO: 2401 - DNA, 2215 bp, Artificial Sequence
  chemically treated genomic DNA (Homo sapiens)
aggggtttagattggtaggttttagtttttcgtttattgttttggggtttttttggaaaataggatgggaggtgaaaggtggatataggtttggatttttatattttttgaaataatttaggggtatagtatagaatttttaggagggagggtttggggatagtttttattttgtggatgagaaaattgaggggttttatttttattaaaagggagagagtttgaagttttatattttttatgtgtttatttatagttttttgtcgggtttgggggatggaaaaatgatattttagaatggaaataaaacggtttattgtggtttttatttttgaatgtttattatgtgttaagtgtagaagtgttataattttgtaggttaagtttatattttgtatttattttgtataggagtatattgaattataaggtaataatttattttttaaaggatattattttaaatattattgtattttaagtagtacgttgtgtgattttgagtaagttgtttattttttttgggttaggttttagtttagttttgggatatagtagtgattaaaggagtcgtggtttttgtttttttagagtttatagtttgggtagggaggaggaggtaaggaatggtaaatatataagaaaataaagattatttttgatggtaatgaatttagtgaataagagtaggagaatgtaaaagaaagtagtttagggggatttgagaaggtttttggggaggcgatatttgatttgagatttgaagaatgaggagtttggtaaagatttggggttgattagtgttttaggaataagtaatagtaagggtaagggttttgaggtaggatagagttattaatagtttaaggagggaggtttttgggttggtgagagaaagggaaggggtttagttgggtagtgggtaggggaggagtttggattttatttttcgtgagatgtgttggttttggtggtagtgggggggtttgtagttttttgttataagggttgggggtgtggggatagttagagttaaaggttttttttttatagtttcggtagttttagtttagaggcgtcggtttggcggttggaagattgtattgtgggtatatttggggagtagttgtcgagttagggttagagtgggttacgtggtatagggtaggatcgttttggagtttataaggttaagatttttaggaggggtagtggagaatattttggacgagaatagtgcgttaacgaggaggaattgtgtattgtagacgtttaggtatacggttttttgtagttttatatagtttttgttttaggatagagtgtttgggtttaatgttattttttagttttgtgatttgaaataagttatttaatttttttgggttttatggttttagttgtgaaggggatatgatattattattatagttttataggttgttttttttttttttttttttttttttttttttttaattttttgagacgtagttttattttgttgtttaggttggaatgtagtggtattattttagtttattgtaatttttgtttttcgggttcgagcgatttttttgttttagtttttttagtagttgtagtagttgggattataggttttcgttattaggtttggttaatttttttatatttttagtggagatggggttttattatgttggttaggttggttttaaatttttgattttaggtgaattatttattttagttttttaaagtgtttttaggttgtttatttttaatttaataaatattcgttgagtattttttatatgttaggtgttgtatgaggttttgcgtgatagtagggaataggattttcgtggtttttttttttttaagtatataattaatgttttagaattaggtttggtattgaggaaatttttagtaaatgtaagttatttgtttggagttttggaggttagaggaggtattttggaaggtagagaaggaggtgtggtgatagaaaaattttaaggaaagtgtatttttttttattattaggtgttgtagttggtttttggtatggtttattttatttttataattattttacgaagagggatgagtattagttttaatttatggatgaggaaattgaggtttagtttgttaatggtatagttaggattggaggtagtgaagggttggtttttttttttttttggggtttaatatttttatttgt

SEQ ID NO: 2402 - DNA, 2215 bp, Artificial Sequence
  chemically treated genomic DNA (Homo sapiens)
atagatgggaatattgagttttagagagaaaaagggattagttttttattgtttttagttttggttgtgttattgataaattgggttttagtttttttatttataaattggagttaatgtttattttttttcgtagggtggttgtgagagtgaaatgagttatattaggagttaattgtagtatttggtgataaaagggagtgtattttttttaggatttttttgttattatatttttttttttgttttttagggtgttttttttggtttttagagttttaggtaaatggtttatatttattaagagtttttttaatgttaggtttggttttaaagtattaattgtgtgtttagaagggaagggattacggaggttttgttttttgttgttacgtagagttttatgtagtatttggtatgtgggaagtgtttaacgaatatttgttgaattagaaataaatagtttgggagtattttgggaggttgaggtgggtggtttatttgaggttaagagtttgagattagtttggttaatatggtgaaattttatttttattaaaaatatgaaaaaattagttaggtttggtggcgggagtttgtagttttagttattatagttattagggaggttgaggtaggagaatcgttcgaattcgggaggtagaggttgtagtgagttgagatggtgttattgtattttagtttgggtaatagagtgagattgcgttttaaaaaattaaaaaaaaaaaaaaaaaaaaaaaaaaaaaaagaatagtttgtggaattgtggtagtaatattatgttttttttatagttgaggttatgagatttagagaggttgagtgatttgttttagattataaagttgggaggtggtattgaatttaggtattttgttttgaggtaggggttgtgtggggttgtagggggtcgtgtgtttggacgtttatagtgtatagttttttttcgttgacgtattgttttcgtttagagtgttttttattgttttttttaggagttttggttttgtaggttttaggacggttttgttttgtgttacgtgatttattttggttttggttcggtagttgttttttagatgtgtttatagtgtaattttttagtcgttaggtcggcgtttttgggttgggattgtcggagttgtgggggagagatttttggttttggttgtttttatatttttaatttttgtaataggagattataggtttttttattattattagaattagtatattttacggagaataagatttaaattttttttttgtttattatttaattgggtttttttttttttttttattagtttagaggtttttttttttaaattattaatagttttgttttgttttagggtttttgtttttgttgttatttgtttttagaatattgattagttttaggtttttgttagattttttattttttaagttttaggttaaatgtcgtttttttagaggtttttttagatttttttaggttatttttttttatatttttttgtttttatttattgaatttattattattagaaatgatttttgtttttttgtgtatttgttattttttgtttttttttttttgtttaggttatgggttttaagagagtaggaattacggtttttttggttattgttgtgttttagagttgaattagggtttggtttagagaaggtaagtaatttgtttaaggttatatagcgtattatttgaaatatagtaatgtttagagtagtgttttttgaagaataaattgttgttttatggtttagtgtatttttgtgtaaaatgggtataaaatatgaatttaatttgtagagttatgatatttttgtatttagtatatggtaagtatttagaaatggaaattataatagatcgttttgtttttattttggggtgttatttttttattttttaaattcggtaggaggttgtgggtgggtatataaagggtgtggggttttaggtttttttttttttaataggaatgaaattttttagtttttttatttataaaatggggattgtttttaggtttttttttttaaggattttgtgttgtgtttttgggttgttttagggagtgtgggggtttaggtttgtgtttattttttattttttattttgttttttagagaggttttagaataatggacgggaggttggagtttattagtttgggttttt

SEQ ID NO: 2403 - DNA, 2431 bp, Artificial Sequence
  chemically treated genomic DNA (Homo sapiens)
tatattagatttattgagttaggtacgttgagggtggggtttagtaacgtatattttaataagtattttaggggatagtgatgcgtgtttaagtgtgaggattattgtgttaggagagggatttgtaaattttgatagataataggttttttaatgtaggtatttatgggttaaggagttagtagttatttttttgtgattttagtgtttagttagttaagagtttgttttagggtgagaatattttttttttttttatagttttttgaggggttatttttgtatagtttgattgagttagatacgggagagttgttgagtttgttgagtggatgttttatttttttagttaagattttatttttagaatgaagacggagggaagaatgtttttttatatgtttttttaataagttatatgatagatgaggaaatcgaggtttagagtttaagttatttatttaaagttatgttgttaataaatggtagagttagaatttggatttacgtttatttgttttttagtgttttttttatcgtagtaatttgtattttttgattagagttagttttaggaggatagggtttggttttttttggatttgagttggagtttttattgaatttttgattttgttgtgggaatttttagttaagttttttagatattgggaggtaggttttttttttgtttttattttgttagtatagcgggtatttcggattatgttggatttcgttagggatgtggtagttgttagttagttaagttataagttttagtaggtttgaatgatagttaaggtggttatcgtgttaagtggattgtagttaggaggtgttttgtttagtttattttttattttttatttggaggttttttattattttaggtagggttttttttttttagtagttgtttagagtttgttatgtattttttggtttttatggtagtttagtttagtaaacggatttgaagttttataaatagcgtaatggtaggttgggaagttgttttgtgtaagaggatagaatatgtattttttgtttttcgagttattttttgggatcgggtgatgggagtgatttttagtgtagataaagtcgaattatttttattttttaggtttatattttatatttggttttgtttttattgtttggtatgtttgtggtttttttttattgtttttgtttttatgtgatggtgtttttaagtttgttttcgggacgttttttgtttttggaatagttgtattagtttggggtatttttttgttatttgattttatagggaggtgtttagtggttgtgggtaatttttagatgattttgttcgtttgacgttattagatcgttatttttggttttgttgtttatgttgtagaagttgggttggaatgggagaggaggaatgaaggaggggttgtttttggttttttattgttttagggttttattaagtaggtgtatttatttttttatatttatagagtatttattgaatgttaggttttagggtaattaaattgattttttatttatttatgaatttattttttaatgggtattgttttgtggtacggagtagtaattaaatgtgagggttttggagtaagagagtttggatttaaattttagttcgttatttattatttttgaaatttttttgtgttttagtttttttttggaaatgggagtgattatagtatttattttataaggttgttttgaagattaaaagagttaatatttttgtttgatatattgtaaatatataatgaacgttagtggttattattattaattataatagtattacgtattgtattaggtatttgggatatgaaattgaatgtgatgtagtttgtatttgttttgtattggtatttggattttaagggttttagatattgggatggggtatttagttaatatcgttagaaagaatatttgttgtgtgtattattttttttattttatgttggagggtatttaagggaaatagaaattgaagtttttggttgggcgtagtggtttacgtttataattttagtattttgggattatagggaggttaaggtgggtggattgtttgaggttaggagtttgagagtagtttggttaaaatggtgaaattttgtttttattaaaaatgtaaaaaattagttgagtatggtagtgtataattgtaattttagttatttaggaggttgaggtagaagaattatttgaatttaggaggtggaggttgtagtgagtagagattgtacgattgtattttagtttgggtaaaagagtaagatttcggtttaaaaaaaaaaaaaaaaaaagaaatatataaaaaagaaaatgaagtttttgttttaggaaagttttagattagtggttttttattttgttatatattagaattttttggagagat

SEQ ID NO: 2404 - DNA, 2431 bp, Artificial Sequence
  chemically treated genomic DNA (Homo sapiens)
atttttttaaaagattttgatgtgtggtagggtgaagagttattgatttaaggtttttttaggataggaattttatttttttttttgtatgtttttttttttttttttttttttgagtcggagttttgtttttttatttaggttggagtatagtcgtgtaatttttgtttattgtaatttttattttttgggtttaagtgatttttttgttttagttttttgagtagttgggattatagttgtatattattatgtttagttaattttttgtatttttagtagaaatagggttttattattttggttaggttgtttttaaatttttgattttaagtaatttatttattttggtttttttataattttaaagtgttaggattataggcgtgagttattgcgtttagttagaaattttaatttttgttttttttgaatgttttttaatataaggtaggaaaaatagtatatatagtaggtattttttttgacggtgttgattgggtattttattttaatatttgagatttttggagtttagatgttagtgtaaaatagatgtagattatattatatttaattttatattttaagtatttagtataatacgtggtgttgttgtggttagtagtaatagttattaacgtttattgtgtatttataatgtgttagatagagatattaatttttttaatttttagagtaattttatgaggtagatattataattatttttatttttaaaaggaaattgaggtatagaggagttttagaggtagtaaatggcgggttggaatttaaatttaaatttttttgttttagagtttttatatttaattattatttcgtattataaagtaatgtttattgaaaaataaatttataagtgagtgaagaattagtttggttgttttagggtttgatatttagtaggtgttttgtaaatgtggaagaataaatgtatttatttggtaggattttggaataatgggaaattaagagtagttttttttttatttttttttttttattttagtttaatttttgtagtataaatagtaaagttaaaaatagcgatttaatgacgttagacgaataaggttatttgaaaattgtttatagttattggatatttttttataggattaagtagtaggagggtattttaggttggtgtagttgttttaagaataggaaacgtttcgggagtagatttggaagtattattatataaaggtagaagtagtagggggaaattatagatatattaaatagtagaagtaagattaagtgtggagtatagatttagaagataagagtaattcgattttatttgtattagaagttatttttattattcgattttaggaaatggttcgaggagtagagaatgtatgttttgtttttttatataggatagttttttagtttgttattgcgttatttataaaattttaggttcgtttgttaaattgggttattataagaattagggggtgtatggtaagttttgagtagttgttgggggaagaagattttgtttgagatggtgaggggtttttaaataaaggatgaggggtgggttaggtaaggtattttttggttgtaatttatttggtacggtgattattttggttattatttaggtttgttgaggtttgtgatttaattgattggtagttgttatatttttgacgggatttagtatggttcgagatgttcgttgtgttgatagggtgaaagtaaggagaggatttgttttttagtgtttgagaagtttagttggaggtttttatagtaaggttaagagtttagtgagggttttagtttaaatttagaaaaagttaggttttatttttttggagttggttttggttaagggatgtaagttgttgcggtagaaaggatattggagggtagatggacgtgggtttaaattttgattttgttatttattagtagtatgattttggatgagtaatttaaattttgagtttcggtttttttatttgttatatgatttgttggaagaatatatggaaaagtattttttttttcgtttttattttgggaatggagttttggttaaggagataaaatatttatttaataagtttagtagttttttcgtgtttaatttagttagattgtataaaggtgattttttaaggggttgtggaagggaggaagatgtttttattttgagataggtttttgattggttgggtattaaggttataggagagtggttgttggttttttggtttatgggtatttgtattaggagatttgttgtttgttaggatttgtaggttttttttttggtatagtggtttttatatttaggtacgtattattgttttttggagtgtttgttaaaatatacgttgttgggttttatttttagcgtgtttgatttagtaggtttagtgtg

SEQ ID NO: 2405 - DNA, 2460 bp, Artificial Sequence
  chemically treated genomic DNA (Homo sapiens)
tttgttttgggagattaagtttttttttgtttttagggtggtttagataaaggcggcggtgtgttcggttttttggtattcgggttgtttttttgttttttttttttttttgttttagggtattcgtagaggttttttttataaaggagttggaggatggggggtagggttgggtagttttaaggtaggggaagggagtattggtgaggttacgttttgttaggtttgattttttttttagtttcgttatataggtatttagtgggtattaatcgtggtttgttgaataatgattattttgagtattgagtgtggttagggtggggttttggtatacgtggatattattaattttttcgataagagatggggttttatatttaggttgaggaggggagcgtgttaagggagttattatttttttagtgtagttaagaggaaattgaggtttagagaggtcgagttatttgtttaaggttatacggtttaaagtgggataaatttattttcgatttaggtttatttgattgttatagatggtatgttattcgttgttttaattgttatttaataaataattaataataaaaagagaaataatgaatatttagtaagtatttaatatgtggtaggtattgtgtttaaggtattatttatattaagtgatttaatttttttaataattttatgaggtaagaattgttattatatttattttatagatgaagaaattgaggttggtaaggtggggtaatgtattaaaggataaatagtaaggatttggtggagtgggttttaatttagttttttagaatttgtgcgttaaattatagttttattttggacggttggatgggggacggatagattgacggatgggattgatgattgatagttttgttttatttgtattaggtttgaggttgggtatttagtaggagtttagttagtatcggttataagaatattgggtatttttacgtagtgtttgtcggaggggttttatgtttttagtagggtcggagtttgggggcggtgggtagtgtgtttgggttgttgggggggtttaattttttttcgagtagagttacggcggtatgacggatgtgttcgttatcgcggggagtttagggtatagtagttgtttggaaataggttgttttcgcggtttatatttagatttttgttattattttaaggatttttttttttttttttttttttttacgatggagttagattttgtacgtaggtgagaaatcgtagttaattttattagtagttttttgttattagggattatgggggtttttggggtttggttgcgggtggggaggtaggtgggtgtcgggaggatgaggggaatttgtagcgggaagttagcgttttacgggcggtttagtcgaggtttggaaaaatttcgacgttggaatgttttttttattggttttattttttttaagtttttttgataaaaaacgaggttgagtttttttttttaatggcgtaatataagaagtattagtttttagagtcgagggtgtgtttaaaggatttgggtagggttgggtttttggggggtttagagtaggggataggtgtggtgtttttagtatagtaggtattaattggtttttatgtcggtggttttgagaggggattaattgggttttggggaattggttggggatggggttacgttttagttagggttgggtttggggataggagtgtggaggagtaatagtgaggattttggggttattttagtatgggtttaaattttagttttgttttttgggtaagttatttgttttttttgtgatttagttttttttttaatgaatggggaggatttaaaagggtggttatgagaattaaataatataattcgtgtaaagtatttagtatattagttgggtatggcggtacgtgtttgtagttttagttattcgggaggttgaggtgggaggatcgtttgagtttgggaggttgaggttgtaatgagtcgtggttatgttattgtattttagtttgggtgatagagtgagattttgttttaaaaaaataaataaataaataaataaaatatttagtatatagtaagtgtttaatgaaagattataggcgcgtttatttcgagggttatggggtgtttggttttaggtatgtcgttaggattattttatttttattttaagtatttagggaggtaggaagtttatagtttatttattggttataggtagaattgaggttttaggaggaatggtatttgtttagtgatattggggagtatgagatgttagattgatttttattttttattcgtttattaggttttcggttttattgttttagttattattttaattttttcgattagtagtgttgaacgttgattttgaaaattagattttaacgtcgtttgttttaaatatttttgggttttttagtgtt

SEQ ID NO: 2406 - DNA, 2460 bp, Artificial Sequence
  chemically treated genomic DNA (Homo sapiens)
ggtattggggagtttaggaatgtttggggtaggcggcgttgaggtttgatttttagggttagcgtttagtattgttaatcggggaggttgagatagtggttgagatagtgaagtcggaagtttgatgggcgggtggggggtggaagttaatttgatattttatgttttttagtgttattaggtaaatgttattttttttggagttttagttttgtttatggttagtgagtggattgtggattttttgtttttttgagtgtttagggtgagaatgaaatagttttgacggtatgtttggagttaggtattttatggttttcggagtaagcgcgtttgtggttttttattgagtatttgttatatgttagatattttatttatttatttgtttatttttttgaggtagagttttattttgttatttaggttggagtgtagtggtatgattacggtttattgtagttttaattttttaagtttaagcgatttttttattttagtttttcgaatagttgggattataggtacgtgtcgttatgtttagttaatgtgttaggtattttatacgaattatattgtttgatttttataattatttttttaggttttttttatttattgaggagaaaattgagttataggggagataaataatttgtttaagagataaagttgggatttgggtttatgttggggtgattttagagtttttattgttgtttttttatatttttgtttttaagtttaattttggttggggcgtggttttatttttagttagttttttagggtttagttaatttttttttagggttatcggtatgagagttaattagtgtttgttgtgttgggggtattatatttgttttttgttttgggttttttagaggtttagttttgtttagattttttgggtatattttcggttttggaagttgatgttttttgtattgcgttattaagaaaaaggatttagtttcgttttttgttagggaagtttggggaaaataaagttagtgagagaagtattttagcgtcgggatttttttaagtttcggttgggtcgttcgtggagcgttgatttttcgttgtaggttttttttattttttcggtatttatttatttttttattcgtaattaggttttaagggtttttatggtttttggtgatagggggttgttggtggggttggttgcggttttttatttgcgtgtagggtttggttttatcgtgaaaggaggaagagggaaaaaaaggtttttgagatggtgataaaggtttgagtgtgggtcgcgagagtagtttgtttttaggtaattgttatattttgggtttttcgcggtggcgggtatattcgttatgtcgtcgtggttttgttcgggagggagttgggtttttttagtagtttaggtatattgtttatcgtttttaagtttcggttttgttggggatatgaggttttttcggtaggtattgcgtgagaatgtttagtgtttttgtggtcgatgttggttaagtttttattgggtgtttagttttaggtttggtgtaggtgggatagagttgttaattattagttttattcgttagtttgttcgttttttatttagtcgtttaggatagaattgtggtttggcgtataggttttggagggttgggttgaaatttattttattaaatttttgttgtttgttttttggtgtattgttttattttgttagttttagtttttttatttatgaaatggatataataatagtttttattttatagggttgttgggaggattaaattatttaatataggtaatgttttaggtatagtgtttgttatatattaaatgtttgttaaatgtttattgtttttttttttattattaattgtttgttaggtgatagttggggtagcgggtagtatgttatttgtggtaattaggtagatttgggtcgggggtgagtttgttttattttgaatcgtatgattttagataggtggttcggtttttttgagttttagtttttttttgattatattggggaaataatagtttttttgatacgtttttttttttagtttaagtgtgaaattttattttttgtcgggaggattagtggtgtttacgtgtgttagggttttattttggttatatttagtatttagaatggttattatttagtaggttacgattggtgtttattgggtgtttgtgtgacggggttgggagaggagttaggtttggtagggcgtggttttattagtgttttttttttttgttttggggttgtttagttttgttttttattttttagtttttttgtgaaaagaatttttgcgagtgttttggagtaagaggaggaggaggataagaaggtagttcgagtgttagggggtcgggtatatcgtcgtttttgtttgggttattttggaggtagagggaggtttggttttttagggtagg

SEQ ID NO: 2407 - DNA, 2408 bp, Artificial Sequence
  chemically treated genomic DNA (Homo sapiens)
agttgtttttgaggtgtgaggataggaggggttgttgtttgaggttttttgtttatttttatttattgggattttttgtttggtttaggttttggataggtgcgtcgtatcggttgtagaggtggttttgggttgtataaggttggagtttattattttgggttttttttttattttggtttttgttattatttttttttattgttttagggttttttagtattttaaaaaagtttgtttaaaatttaaaaaaattattaatttttttagatttttttagtagggagggttggtttgaaattattttatttgttatttttttttttttttttttttttgttagggtttcgttttgtcgtttaggttggagtgtaatgggattttggtttattgtagtttttgtttttcgggtttaagcgatttttttgttttagtttttcgagtagttgggattataggtatgtattattatttttagttaatttttgtatttttagtagagatagggttttagtattttggttaggttggttttaaatttttgattttaagtgatttattttttttagttttttaaagttttaggattataggcgtgagttattgtgtttagttttatttgttatttttgtattataataatggttatggtggtaaaatgttttattgagtggtatggttgtttttatttttaatagttttttatttagggggtagttagtttattttttatttttttgacggggtggttatgattaatgttgttttagtaatgttttttttatatagggattattttttttggttagattttgataagtgttatttttgagttaataggtttttattaaacgttttagtgcgttttagtttgtattgttttgtgatatagggtagaggaggttttgtttttaaaagtggtttatgttgtagtagggggttttgaacgtttgtttttttagtggatggaggggaggggttaaggtaggttggagattatttttgggagtggaggtttcggtttttttagtagtttttagttgtgtgttttttataggtggtgagtggttgtttgcgcggtatagtgagtgtgtgggaggtcgtgacgggtaggaagacgatggagtttgttgtgtttgggggttagtacgtggagatgatcgttatggttttggatgagttagagcggtgtttgtttataggtttgcgggatggtataatgaagatgtggaattataatattggtaaatgtttgttgattttttttagttcggaatagttggaggttagttttgtttgttaattatagttagggacggttttttgggaagtaaagtatagtttttttgattttgggatgtattattttttgtatttttttgaaagggtgtttattatagttaggtggtttggttttaaatttttttgagtttttgtgtttttatgtatgaaatgaagataggtaatagtgtttggattaatgggtttttattaaggttagttattgttgttttttaaatttgttagtattttttattttatatattggagttttggattgtatttttagtagtgggattagttaatttatagttatttatggttatttttatttgggaaatgtttgatggtattatagggttagtttatgggagtggtatagggtaaagttagtagttttattttaatttttgtgatatagttttttaattaatttagaaagtgtatttagttggttaggtagtggtttacgtttgtaattttagtattttgggaggtcgaggtagggggattatttgaggttaggagttcgagattagtttggttaatatggtgaaattttcgtttttgttaaaaatataaaaaaaattagttaggcgtggtggtggttgtttgtaattttagttattcgggaagttgaggtaggataagtcgggaggtggaggttgtagtgagtcgagatttcgttatcgtattttagtttgggtagtaagagtgaaattttgttaaaaaaaaaaaaaaagaagaagaagaaagaaagtgtatttagttaagatgttaggggttgagtattgttttagattttattatttagtagtgatttgattttagttaggttatttgtttattttttagttattttttttgtaaaatggatatggatgtttattttattttatttttttaagtttattaaatgagggaataggatgtgagaatatgatgataaatatatggtggtattatttgtaggtgattttcgttatttagagatttgattttttgtttggtatttttaggaagatatttagggtttagagttattttttttgataagttttttagttttgtttttttttatttttaatagattagtgggattatttatatgaataaagtgttttatg

SEQ ID NO: 2408 - DNA, 2408 bp, Artificial Sequence
  chemically treated genomic DNA (Homo sapiens)
tatagaatattttgtttatatggataattttattaatttgttgaagatgaaagaaaatagaattagaaaatttattagagaaaatggttttgggttttaaatgtttttttaaaggtgttaagtaagaagttaaatttttggatgacgaaaattatttataggtgatattattatgtatttgttattatgtttttatattttatttttttatttgatggatttaggggagtgagatagggtaggtatttatgtttattttatagagaggatagttgggaaatgggtaagtgatttggttaaggttaagttattattgagtgataggatttggagtagtatttaatttttggtattttggttaagtatatttttttttttttttttttttttttttttttttgatagagttttatttttgttgtttaggttggagtgcgatggcgggatttcggtttattgtagtttttatttttcggtttgttttgttttagtttttcgagtagttgggattataggtagttattattacgtttggttaattttttttgtatttttggtagagacgggagttttattatattagttaggttggtttcgaatttttggttttaggtgatttttttgtttcgattttttaaagtgttgagattataggcgtgagttattgtttggttagttaagtatattttttgagttggttaaaggattgtgttatagaagttagggtggaattgttggttttgttttatgttatttttatggattggttttataatattattaggtattttttaaataggggtgattatgggtggttgtgaattaattgattttattgttagaaatgtaatttaaagttttagtatgtggaatgagaagtgttagtaaatttaaagagtaatagtagttaattttagtggaaatttattagtttaggtattgttatttgtttttattttatgtatgaggatatagaggtttagggaggtttgaagttaggttatttgattatgatgaatatttttttagagaggtataaaaaatagtgtattttagggttaaaggagttgtgttttgttttttaagaggtcgtttttggttgtaattgataagtaagattgatttttagttgtttcggattgggaaaggttaataggtatttgttaatgttgtagttttatatttttattgtgttatttcgtaaatttgtgagtaggtatcgttttgatttatttagggttatggcggttatttttacgtgttggtttttagatatagtaaattttatcgtttttttgttcgttacgattttttatatatttattgtgtcgcgtaggtagttatttattatttgtagggagtatatagttgggggttgttggagaggtcggggtttttatttttaagggtggtttttagtttgttttggttttttttttttatttattgagaaaatagacgtttagggttttttgttatagtataagttatttttgaaaataggattttttttgttttgtattatagggtagtgtaaattggaacgtattggaacgtttggtgaagatttgttaatttagaaatggtatttattaggatttagttaaagaaaataatttttatatggaaaagatattattgaaataatattaattatgattatttcgttaaaaaaataagaaataaattaattgttttttaagtagggaattgttgagaataaggatagttatgttatttaatgaaatattttgttattatgattattgttataatgtaagagtagtaggtaaggttgggtatagtggtttacgtttgtaattttaaaattttgggaggttgaggagggtggattatttgaggttagaagtttgagattagtttggttaaaatgttgaaattttgtttttattaaaaatataaaaattagttgggggtggtggtgtatgtttgtagttttagttattcgggaggttgaggtaggagaatcgtttgaattcggaaggtagagattgtagtgagttaaggttttattgtattttagtttgggcgatagagcgagattttggtaaaaaaaaaaaaaaaaaaaaaagtagtaagtgaggtggttttagattaattttttttattgagaagatttagaaaagttgataatttttttaaattttaaataaatttttttaaggtattgaagagttttgaggtagtgagagagggtggtggtaggagttaggatgggagagaagtttagaatggtgagttttagttttgtgtagtttaaggttatttttgtagtcgatgcggcgtatttgtttagagtttgggttagataagaggttttagtgggtgggagtgagtagagggttttaggtagtagttttttttatttttatattttagaagtaatt

SEQ ID NO: 2409 - DNA, 2461 bp, Artificial Sequence
  chemically treated genomic DNA (Homo sapiens)
aattttagttgttagggttaagattagttacgtgttttttttttttggttatggttttggatattttaagttggtagtgagtgttaggtgagggggttgttaggagtcggtaggggggattttatttttgtgttatttatgtttttaattaggggtaatttttttaaatttgtatttttaaattttttttttagtttgattggagaaattattttaatttttaatgatagtaattttaaattatagtaataataatttattgagtgtttatagtgagttagatatagtgttagtattttgtattagtagtttttaaattttttggttttaggaattttttatattttaagaatgattaaggtttttaaagtttttgtttatgtgggttgtatttattattaattattattttaggagttaaaataaattttaataatatttatttataatttatttaaaatagtaataataaatattatatgtgagtataaataatatatttttatgataaataattatattttataatatataaaatttaaagagaaggaagtgtggttttgttttatatttttgtagatttttataatgttagttttaatagaagatagtttgatttttatatttgtatttgtaagtttttgagatattatatgttatgtagtttttgtaatattttattgggagttttaaaaagtttttattgagagtaaaaaatttttataaataatatgtttgtattattgttaatattattttgaattttatggattatttgaaagggttttagagattttagaggtgtttataatatattgtggaaattgttgtttgatatatatgatgggtagtttttaatattgttttatttttatatatgaggaaattgaggtataaggagattaaagtgatttgtttaaggttatgtagttaggtattaaagttagttggggagttatttgattttggtgtttagggttttagtattgagttttgaaagagagggtaggaattgggtatagaaaaagtcggaagggtaggttgggttatgagtgggggagttgggtgtgtagtgaggggtgggggtgggaggggatcgggggattagttagttattaagtggttttggtgatagggttggagatggtagttggcggcggatgtagtttcgggttggaaaattaataggtgattagcggtttaggggtaagttgtttattaggtgcggtagaggggtaggggtaggggcgggggggttgggaggaaatattattgattttcggtaggattgattaaatagttagatatttaaggttaaatttattaataaagtgagatatttagtttagttcggcggttgttgttgaaggttttaaaaaaatcgtttattggggagtttttgataaattgtttttgttttttgaggtaagtgggagggaggatagattgtggggaggtttggttcggttgtcgtttggtttgggatttatggtttgttttaggtttggattatagaattttggtgtttgtatggtatgtgtgtttgtattatagtatatgttatttgtatagggtatgtgtagatatatatgtgtatattatgtcgtatatatttaaatgtgtttgtatatgtttttgtacgttcgtgtatatgttataatttatatttgtttatggtatgtgtgtatatatatgtatgtgttatagtatatgtgtataaatatgttttgtatgtgtgtatagatatgcgtgtatcgtattatatggtatttatatatgtatatgttatggtatatatgtgggtataaatgtgttttgtatgtgtgcgtatacgtgtatgtgtcgtagtatatagaatttgtttttgaggggtgagtatgtgtgtttgggggttaaattttttttttattgttttattgatattattattttttttgtttgtagttttaaaggtgttatatttgtaatgatagttatgattattatggggtggggagatggacggaaaagtagggattggaaaattgtatttaaaaggttaagttgtataatagagagaggtaggtgtgaataggaagaaagagggggaggaaaagtgaagggtcggtatggtaagggttaaatatcgtttggattgggagttgagggagagaaaatggtaggattcgggggtggttgggtagttgttgggggagtaaattaaagaataaaggatatgtaaatataatttttatttttattgatttattttttttaagatagagttttattttgttttttaggttggagtgtagtggcgtgattttagtttattgtaatttttattttttgggtttaagtagtttttttgttttagtttttagggtggttgggattatagttttatgtagttacgttcggttaatttttatatttttagtagagatagggttttattatattgtttaggttggtttcgaat

SEQ ID NO: 2410 - DNA, 2461 bp, Artificial Sequence
  chemically treated genomic DNA (Homo sapiens)
gttcgagattagtttgagtaatatggtgaaattttgtttttattaaaaatataaaaattagtcgggcgtggttgtatgagattgtagttttagttattttggaggttgagataggaaaattgtttgaatttaggaggtggaggttgtagtgagttgagattacgttattgtattttagtttggggaatagaatgagattttgttttaaaaaaaataaattaataaaaataaaaattatatttgtatattttttattttttaatttgtttttttaatagttatttagttattttcgaattttgttatttttttttttttaatttttagtttaaacgatgtttagtttttattatgtcggttttttattttttttttttttttttttttttgtttatatttgtttttttttgttgtatagtttagttttttagatatagttttttagtttttattttttcgtttatttttttattttataataattatgattgttattataaatgtggtatttttgggattataggtagagaaagtggtgatattagtgaaataatggagaaagagtttaatttttaagtatatatgtttattttttaaaggtagattttgtgtgttacggtatatgtacgtatacgtatatatgtaaggtatatttgtgtttatatatgtgttatagtatatgtatgtgtaaatgttatgtgatgcggtgtacgtatgtttatgtatatatgtaaggtatatttgtatatatgtgttgtagtatatgtatatgtgtgtatatatattataagtaaatgtaggttgtagtatgtgtacgggcgtgtaaagatatgtgtaggtatatttgaatgtgtgcgatatagtgtgtatatatgtgtttgtatatgttttgtataaatggtatgtgttgtagtgtaagtatatatgttatataagtattagggttttgtggtttagatttggggtaaattatgagttttaggttaaacggtagtcgagttaggtttttttatagtttgtttttttttttatttgttttaagaaataaagatagtttattaagaattttttagtaagcggtttttttaagatttttagtagtagtcgtcgggttgagttgaatgttttattttattagtgagtttggttttgggtgtttggttgtttgattaattttgtcgggggttagtgatatttttttttagttttttcgtttttgtttttgtttttttgtcgtatttgatgaatagtttgtttttggatcgttgattatttattgattttttagttcgaggttatattcgtcgttagttgttatttttagttttgttattaggattatttggtgattaattgatttttcggtttttttttatttttattttttattgtatatttagtttttttatttatggtttaatttgttttttcggttttttttgtgtttagtttttatttttttttttagggtttagtgttgggattttggatattaaaattaagtgattttttagttagttttgatgtttggttgtatgattttggataagttattttaatttttttgtgttttagtttttttatatgtaaaaatggggtaatattggaagttatttattatgtatattaggtagtagtttttatagtgtattatgggtatttttggggtttttgagatttttttagatggtttataaaatttagaataatgttgataataatataaatatgttatttgtgggggttttttgtttttagtgaaagttttttaaaatttttagtggaatattataggggttatatgatatgtggtattttaaaaatttgtagatgtagatataaaaattaaattgttttttattaaggttgatattatagagatttgtaaaaatataaaataaagttatatttttttttttttaaattttgtgtgttgtgaaatatagttatttgttataggaatatattatttatgtttatatgtagtgtttattattgttattttaaataaattataaataaatattattaaaatttgttttgatttttaaaatggtaattagtgatagatataatttatatgaataagagttttgagggttttgattatttttagggtgtaaagggtttttgaagttaaaaagtttgagaattgttggtataagatgttagtattgtgtttggtttattgtaagtatttagtaaattattattgttatgatttggagttgttattattgggagttagagtgatttttttagttaagttggggaggggatttgggggtgtagatttggggaggttgtttttgattagggatataagtggtataaaggtgagattttttttgtcggtttttagtagtttttttatttggtatttattgttagtttggagtgtttaaagttatggttaagggaaaggagtacgtggttgattttggttttagtagttgggatt

SEQ ID NO: 2411 - DNA, 2417 bp, Artificial Sequence
  chemically treated genomic DNA (Homo sapiens)
tatagtttgagtatatttatttattttttattatttatattagaatatttgaaattgggtgatttatgaagaaatagaatttattttttatagttgtggaggttgaggagtttaagattgagggtatgtatttgttgagagttttttggttggtggtgtagagtttcgaggtggtgtaaggtattatattatgaggggtatttgtttgttatagtagtaagtataatttaagttaattttttttgtttatggagaattttttgttagtaagagaaatgaggtatttatttaagtgttttagtatagagatgatttataggaattttagattttggaggatgattttttacggtgatattaggttgttttgttatgtggtataattgtaggaggagttatttatattttttatgtgaatagtatttttcgtatttgtataatttgttattttgggtaggatttttagaggagtgggtttgttgttgagattttaaggatgagtaggaattttatttatggagatggggaaaagttattgtagttggatgaaatagaagggatagagatatagtatatggaaaattagaggtatgtatgcgtgtagtagtaatagttattagtgtttattgagtaggaacgataggttagatagtgtgttaagttttttatatatattagtttatttaattttataatagtttgtgtaaatttagatattttggttttagagtttgtgttttaaattttttaatagattttgtttattattattaatattggtatagtattttatagtttataaaatttttttggatttatgatttgtttttattatggtaatagagtaattgtttttattttataggtgaagaaatagtattaacggttttgtgatttgttaaggttatatagagagtaaattgagaggttaagatttgaattttattttttggttttagataaaggatgttatagtaaggtgtttgtaaagtagtttttttttttttttttgttttgtagggaggtgaggtgtttatatttagattattataaggagttgttgagagaatgtttttaggttatgaatttagttttatacgtaaatttattgtagatttaggagaaggttaggaataaacgggtgggagaaggtttttgattttaaatagaaattgagttgattaaatatagtttgagtatacgtagaggttgtaggagggaaacgagattaattttaaattttgtgtatttagaagttttttttagaatttaggttttattggtaggaaattgttatttcgtgtatttgtttattttttttatgttttttgttaggtttcgtgttttattgagtttttattttttttgtgtatgtttataggttgttgggttggaaatagtttaaagttatttagattattttaggtattgagttgtattaaggatattttttgtgggtagagtaaagatacgtttttattttttagttgggtttattgaggtttttttttattggggaattggttgggtttttttggtagagatgtttgttatttattaaaaatgtacgttttttttattgtggtatagagttgtttttgagaaatatagtttaattaggaattatattttttagttaattttgtagttaagtgaggttatgtgatttgtttttattaatggaatatgaatagagtgataggttttttatttgggtaaaatagagttgatgtgttttttttatattttcgtttagtttttgtttggatttagattttagggaatggtagagttataagatgaaagtaaattgggtatttataaagagaaaatatttgtgttagtttattaaaatgatgagagttatttgttatagtagtaagtataatttgaattaatatatttttttttttgatttttggtaattttagttttttatggagataggggttggaatattatttgtttttttaaagagagttgtaatttattgttttttgttgtgtgttggttttatttttatatttggttttttgttttagtttttttgaatagaatagtagattttttttaagatagaggtgatttttatttaagtttatttgggattgattgtttagttttggttaatattaaaatgcgttaagattttagtgttataattaatgtttatttattttttaatttatgtggttattgtttagtaattttgttattgtatttgttttttttgaggttgttattggttgggtttgggttttaaatagtttttagttgtattggtggtttgatattagaaatttgggagaagaatggtgtaagaggaagagtgtattagtttatttttacgttgttgataaagatatatttgagattgggtaatttataaaaaaaaagaggtttaattggatttatag

SEQ ID NO: 2412 - DNA, 2417 bp, Artificial Sequence
  chemically treated genomic DNA (Homo sapiens)
ttgtaagtttaattaaatttttttttttttgtaaattgtttagttttaggtatgtttttattagtagcgtgaaaatggattaatatatttttttttttatattattttttttttaagtttttggtattaagttattagtatagttagagattgtttggggtttaaatttagttagtagtaattttaaagggaataaatatagtagtagggttgttgagtagtggttatatgaattggggggtaggtggatattaattataatattggagttttagcgtattttgatgttgattaaggttgggtagttagttttaaatggatttggataagagttatttttgttttaaggggaatttattattttatttaggaaaattgaggtaggaaattaggtgtgagggtgaagttagtatataatagggaataatagattatagttttttttgggggaataagtggtattttaatttttgtttttatggggagttaaagttgttaagagttaggaaggaagatatattaatttaagttatgtttgttgttataataaataatttttattattttagtaaattaatataagtattttttttttatgggtatttagtttatttttattttgtggttttattattttttagggtttgaatttaggtagaagttgagcgagaatgtggagaaagtatattaattttgttttgtttaggtgagaagtttattattttgtttatattttattggtgagaataggttatatgattttatttagttgtaaggttagttgggaaatgtagtttttggttgggttgtgttttttagagataattttatattatagtggggggaacgtgtatttttgataagtagtaggtatttttgttagaggagtttagttagttttttaatagggggaggttttagtgagtttaattggagagtgggagcgtatttttgttttatttataagaaatatttttgatataatttagtgtttgaaatggtttgaatggttttgggttatttttaatttagtagtttgtggatatgtatagagaagataaggatttagtgaaatacggagtttggtagaagatatgggaaaaataaataaatgtacgaagtgataattttttgttagtgggatttgggttttggggaaagtttttgagtatatagggtttgagattaatttcgttttttttttgtagtttttgcgtgtgtttaggttgtgtttgattagtttagtttttgtttggagttaaggatttttttttattcgtttatttttggtttttttttggatttgtagtgaatttgcgtgtaaggttgaatttatagtttgaggatatttttttagtagttttttgtaatgatttaaatatagatattttatttttttgtagagtagggaggaagaaagagattgttttgtagatattttgttgtggtattttttgtttaaggttagaggatggggtttaagttttggttttttaatttattttttgtgtaattttgataagttataagatcgttagtattgtttttttatttgtaaaatgggaatagttgttttgttgttataatgaaaatagattatgagtttaaaagagttttgtaaattgtaaagtgttgtattaatgttagtgatagtaggtaggatttgttgggggatttaaagtataggttttggagttagagtgtttgaatttgtataggttgttgtgagattgagtgagttaatgtatgtaaagagtttagtatattgtttggtttatcgtttttgtttagtagatattggtggttattattgttgtacgtatgtatgtttttggttttttatatgttgtgtttttgttttttttgttttatttagttgtagtggtttttttttatttttatgggtggggtttttatttatttttggagttttagtaataggtttatttttttgggaattttgtttagggtggtaggttgtataaatacggggagtgttgtttatatagaaaatgtgaatggttttttttgtagttgtgttatatggtagaatagtttggtattatcgtgagaaattattttttagagtttgaagtttttgtaagttatttttgtattaagatatttgggtgaatgttttattttttttattggtagagagttttttatgggtagggaaggttagtttgggttatgtttgttgttgtaataaataagtgttttttatgatgtgatgttttgtattatttcggggttttgtattattagttagaaggtttttaatagatgtatgtttttagttttagattttttagtttttatagttataagaaataagttttatttttttataaattatttaattttaggtattttgatataagtaatagaaaatggatgaatatatttaggttgtg

SEQ ID NO: 2413 - DNA, 2486 bp, Artificial Sequence
  chemically treated genomic DNA (Homo sapiens)
gttaaggaatttggatatttgtagagtttagttagattgtatataacgttagttgggtgtggtggcgtatttttgtagttttagttatttaggaggttgaggtaggagaatcgttttaattttagaggtagaggttgtagtgagtcgagattgtattattgtattttagtttgggtaatagagtgagattttgtcgtaaaaaaaaaaaaaaaaaaaaaaaaaaaaagattttatataattttaaatgatggttgtttgattattttttttttatattacggattatttttgtcgttatatatttatttgttgattgtttttttttttattagaaaggataaggattttgtgttgtttattgttgtgtttttaatagttagaagagtgtttggtttatatagatatttaataaatacgtattgaatgtatgattttattggtttgtgttttttgtttattgagttattgaaagttagggatttgttggatttattattgcgtttttagggtttagtatagagtttgatgtatatgttgtttaataaatattgaaagaataaatgaatggaaaaacgttttttttaatgtgttatatattttcgtagggtcgggattatttgatttatgtatttagcgtttaatatattgtttggtagaaagtagatttttaataaaggtttgttgagttagataagagttttttttgtatgcgggtttttgttaggtttgttatgggagtttaaataaaggtaattagattttatattattggattaggtagaaagagatattttgttggtaaaggattttaggattttggagttataggttgtgtaggtaggattagtttgtatgtgtagggtggttagagagattaaagagggtttttcgggggttaggaattttgtttttgtttatgttttttagtattgtttttttttggtaattggtaggtagttttattaatgaggtttgggtatagttgggggtggaatgggatgggatagatggtgggagataaggaaatttttatgtttttttttatttgttatatttaattgatttttcgtagaaagaaaaaaaaataaattagttgtaaggatgaaattgttaattaaaaggttttttgattagatagataaatatttattaattatgtttgattttgtttgtttttttttacgtttgcgaatttttttattagtattgtggttatattatatttagttggtggtttttttattaattatttttttggggtttagattggttgcgggtgaaatagggtagaagaaaggtgaatattgtaaatagtcgtttaataaacgcgatgtttgttgtatggttaggtttagtgttgggtttttggaagttatagtagaatttttatggatagttttttaagttgtgtgttgtataaaggtgtatttgtaggagagtgggggttttttttgttaatttgggatttttggtattaggtaagggggatttttattttttttgcgtaacgggttattagtttgttaagttgaatttataggattttgtttgtttagagggggtatttttttttaatttatatagaatgggttagtggtagttttatagagatgaagatagtttagtttttgatttttaagggttttagggatagtgggggagaaaaatatgtttatgatgtataaatatttatgtgtgatttttttttttttttttttttttttttttttgaggatagggttttattgtgttatttaggttgagtgtagtggtacgattacgatttgttgtagttttgagatttttttttttttagtagttttttgaggagttgggattattggtgtgtattattatgtttggttaattttttattttttgtagagataagatttttttatgttatttaggttggtttcgaatttttggatgtaagtaatttttttgttttagttttttaaagttttgggattataagtgtgagttattatgtttggtttaaatatttatttaataaatattttttgtttattggttattaatgtttgttaagtattgtattagattttgggagagagagagatgagtaatatatgttttttgttttttagaagtcgggttatttgggggagatagagatatttatttgggtttgtttttttttttttttttttttttttttaattttaaataatttttatttgggaggtatgaataatcgttttggatttttattatttaaattttggttttatcgtgttttggttgtgtgattttgggtaagttattttatttttttttgttttaggttgtttttttgtaaattggagataatggtaattgtattttagggttattataatgattaaataaattagtatatggaatttatgtttgatacggagtgtttagtaaaggttagttattgtgtgattgttttttttttttttttgagtgtttattgtgtgttaggttttgagttttgg

SEQ ID NO: 2414 - DNA, 2486 bp, Artificial Sequence
  chemically treated genomic DNA (Homo sapiens)
ttaggatttagggtttggtatatagtaggtatttaaaaaaaaaaaagaaatagttatataatagttaatttttattgagtatttcgtgttaggtatgaattttatgtgttaatttatttaattattataataattttgggatgtagttattattatttttagtttatagagaggtaatttgaggtagagagaggtgagataatttgtttaaggttatatagttaagatacggtaaagttaggatttgaatggtgagagtttagagcggttatttatattttttaggtgaagattatttggaattaaaaaagggaaggggaaaaaggaagggtagatttaggtaagtatttttgttttttttaaatagttcggtttttggagggtaggaaatatatattatttattttttttttttttagaatttagtatagtgtttggtaaatattagtggttagtaaataagaaatgtttattgaatgaatgtttaagttaggtatggtagtttatatttgtaattttaggattttgggaggttgaggtaggaggattgtttgtatttaggagttcgagattagtttgggtaatatagagagattttgtttttataaaaaatgaaaaattagttaggtatggtgatgtatattagtaattttagttttttaggaggttgttggggagagaggggttttaaggttgtagtaagtcgtaatcgtgttattgtatttagtttgggtgatatagtgagattttgtttttaaaaaaaaaagaaaagaaaaaagaaaaaaaattatatatgaatgtttatatattataggtatattttttttttttattatttttagagtttttgaggattaggaattgaattatttttatttttgtagagttgttattagtttattttgtgtgaattagaaaaaggtattttttttgggtaggtaaaattttgtggatttagtttggtaagttaatgattcgttgcgtaaagaaaataaaaattttttttgtttggtgttaggggttttaggttgatagggggagtttttatttttttgtaggtgtatttttgtgtagtatataatttgaaaggttgtttatggaaattttgttatggtttttaggggtttagtattaagtttgattatgtaataggtatcgcgtttgttgaacggttgtttgtagtatttattttttttttattttattttattcgtagttagtttgagttttaagagagtgattggtggaagagttattagttgggtatgatgtggttatagtgttgatgggggagttcgtagacgtaaaaggggataggtagggttaggtataattggtaaatatttgtttatttaattagagggttttttaattagtaattttatttttgtaattggtttatttttttttttttttgcgggaagttaattaaatgtaatagatggaggaaaatatgggggtttttttgttttttattatttgttttattttattttatttttagttgtgtttaaattttattggtggggttgtttgttagttgttagagaagggtagtgttaggggatataaataaaggtaggatttttgattttcgggaagttttttttggtttttttggttattttatatatgtaggttgattttgtttgtatagtttatgattttagggttttaagattttttgttaataaggtatttttttttgtttgatttagtagtatagggtttggttgtttttatttgagtttttatgataggtttgataagggttcgtatgtagaagagatttttgtttagtttaataaatttttattgagggtttgttttttgttaggtaatgtgttgggcgttagatatataaattaaatagtttcggttttgcgggagtgtgtaatatattggggaagacgtttttttatttatttatttttttaatatttattaaatagtatgtgtattaagttttgtgttaggttttggggacgtaatgatgaatttaataggtttttgatttttaataatttagtaagtagaggatataggttagtaaagttatgtatttaatacgtatttattgagtgtttgtgtgagttaggtatttttttggttgttggggatatagtagtgaatagtataaagtttttgttttttttagtagggggaaagataattaatagatggatgtataacggtaggggtgattcgtgatgtgaagaaaaaatagttaaatagttattatttggagttgtatggaatttttttttttttttttttttttttttttttgcgatagagttttattttgttgtttaggttggagtgtagtgatgtaatttcggtttattgtaatttttgtttttggagttgaagcgatttttttgttttagttttttgagtagttgggattataggggtgcgttattatatttagttagcgttgtatgtaatttaattgagttttgtaagtatttagattttttggt

SEQ ID NO: 2415 - DNA, 2463 bp, Artificial Sequence
  chemically treated genomic DNA (Homo sapiens)
agttttgttttattttgtagatgttatatttttattttatttttttggggttttatgggtatagtgtattagttttggattggatggtaatgttttttagttttagttttatgatatttttggtattaagtgatagtaattgttgttgtagattttaggttaggagtggttttgtatgtttttgagtttaaggtgtttttgatggtattgttagtgtttttattggggtattttattttgtatatttttttgaaaggtaattttattttgtatattttgtttttggttaatttagtagttttatagttttttttgagattttgagtttgtaatgaggtttttagagattggaattttatagagtttttggttattgttttgaatttgtatttgtggatttaatttttggtgatttaaaggtaattaattttggggtggaattttatgagttggttttttaggagagaattggtagtggtagttagaggaagtgtgtgagaggttttgtttagtagggtgagtatatgttttgtttattcgaggtattgatagtggtagaaattaaaggaaaggagtagaggtagagtggtttggggtattataatgattcgtgtagttagatgtgttcggtgttgatgttagacgtgttttttttattgatgatagtggtaataatagtattgatttttttaatattattgaggtttattatgtgttaggtattgtgttaaaaatatttagtttttatggaagttttgtgatgtaggttttatttttatttttattgtatagatgaagaagatgaggtataataatttgtgtaagtttatatagttaatgtgtcggagttaggttttgaatttcgatagtttgattttagattattttttttttttagtatttatgttttggtgttttttgtggtatatttagaagatggtttgtatgtgtatgtgtttatttttgtgtgtgtgtatgtatgtatgtttatgtaggattgggaatgtaggggagttagagtttagttaggaaggagagaggaaatatgatttttttgttgtatgtgggtatcgtaattttagttaggtaaagtgttggtttgttgtagtttatttttatgtttttatttagaagttttaatattagagttgatggtagaaaatgtgtagtaaaatgcggggaggtcgttgggtaatggtttttgtaaagtgttaattgtttattgagattgtagattttgtttatgttttaggatttgaattattgataggttttaatttatttcgggtttataaagcgggttttttttttaaataggtttttaattagttacgtttttttgggtttgttaagaagttttagtcgataagtatgtttgttgttttaattttttgaagttggtcgtgtggtttgattttggtttgttttaaggaaatttttatgtataatggttttggatgaaaatttatgagaattaagtgttgatttcgtgttgggtttttagttgggtgttttatatgtattgtttttgatttttatcgtttagagaagtaggtagtatttttttaaggatattttaattttagagaagttgaattaattgtttaagtgattattatgattatattttagattgttacgggttaaattgtgtttttttaaatttatgttttgaagttttagtttttagtattttggaatgtgatcgtatttgaatatagggttattaaagaggtgatttagttataacgaggttttagggtgggttttgatttaattttattggtgtttttttaagaagaggaaatttggatatagataaatatagaggggtgatttattggaagatatagggagaaggtagttatttatagattaaggggagaggttttagaagaaattaattttgttgatattttaattttaaattgtaagtttttagaattataaggaaatgaatttttgttgtttaagttatttagtttgaggtattttgttatggtagttcgagtaggtgattatatatatttaggatttggtgtggttttgaatttatgtatatgattattgtaagtatgaaaattttgttttttggtttatggttttagttagaataagaagtagaaagtgggtaatattatttttttgtagtaaatttgtttttaggttgggtttttaaagggtttatgtttatttattagaaagaaaaagaaagttagatttgggattttaagtgtaaaaagaagttattgattgtttttaagtagagttagtaatataattagaatttttttttttttttggaaaaaatagttttttttggttattgtgtatagagaatggatggtagaatataaaagtgaagtaaggagattttagaggaggttgttgtattgtaggtaagagatgaaagtgatttgatggagagtggtggtaatagagaaggaaagaggtgaatagatt

SEQ ID NO: 2416 - DNA, 2463 bp, Artificial Sequence
  chemically treated genomic DNA (Homo sapiens)
aatttatttatttttttttttttttgttgttattattttttattaagttatttttattttttgtttgtagtgtaatagttttttttggggtttttttgttttatttttgtgttttattatttattttttatgtatagtagttagaggagattattttttttaaaaaaagaaagaaattttgattgtgttattgattttgtttagaaatagttaatgatttttttttgtatttagaattttaaatttagttttttttttttttttaatggataggtatgggttttttgaggatttaatttaagaataaatttattgtaaagaggtaatattgtttattttttgttttttattttaattggagttataagttagagaatagagtttttatatttatagtggttatgtgtataaatttaaggttatattaagttttgggtgtgtgtagttatttgttcgggttattataataaaatattttagattgggtggtttaagtaataggaatttatttttttataattttggaggtttgtagtttgagattaaggtgttagtaggattggttttttttgaggtttttttttttagtttgtagatggttgttttttttttgtgttttttagtgggttatttttttgtatttatttgtgtttaaattttttttttttgaaagaatattagtaagattagattagggtttattttaagatttcgttgtagttgaattatttttttaatggttttatatttaaatacggttatattttaaggtattgagagttagagttttaaagtatgaatttgagggaatatagtttagttcgtaatagtttgaagtataattatagtggttatttaaataattaatttaatttttttgaggttaggatgtttttgaagagatattatttgtttttttaagcggtaaggattagagataatgtatgtaaaatatttagttgggagtttagtacggagttagtatttgatttttatggatttttatttaagattattgtgtatggaagtttttttaaggtaagttagaattagattatacgattagttttaaagggttaaggtagtaaatatatttatcgattggagttttttggtaggtttagggaagcgtgattgattggaagtttgtttagaggaggagttcgttttgtgggttcgaaataaattagaatttgttaatagtttagattttggagtatggataaagtttgtagttttaataggtaattaatattttataggggttattatttagcggttttttcgtattttattgtatattttttgttattagttttggtattgaagtttttaaataaaaatataaaaatgagttataatagattagtattttgtttggttggagttacggtgtttatatgtaataaagagattatatttttttttttttttttaattggattttaatttttttgtatttttagttttgtataaatatgtatgtatgtatatatatagaaatgagtatatgtatatgtaggttattttttgagtgtgttataggaggtattagagtatggatattgggaggaagaggtggtttggagttagattgtcggagtttaaagtttgatttcggtatattaattgtgtgggtttgtataaattgttatgttttattttttttatttgtataatgggagtaagaatagagtttatattataagatttttataaagattaggtgtttttagtataatatttggtatataatagattttaataatgttaaagggattagtattgttgttgttattattattaatgggaggagtacgtttagtattaatatcgagtatatttaattgtacggattattgtaatgttttaagttattttgtttttgttttttttttttggtttttgttattgttagtgtttcgaatgagtaaggtatatgtttattttgttgaatagagttttttatatattttttttagttgttattgttaatttttttttaggaagttaatttatgaagttttattttaaagttgattgtttttggattattaggagttaaatttataggtgtaaatttaaagtaataattaggaattttgtgaggttttagtttttgggaattttattgtaaatttaaggttttagagaagattgtggggttattggattggttagaagtaggatatataggataaaattgttttttaggaggatatgtaggataaaatgttttagtgaggatattggtagtattattaggagtattttgggtttaggagtatgtaaggttatttttgatttgaagtttgtagtaataattgttgttatttgatgttaaggatattatggagttagagttagaggatattattatttagtttagagttggtgtattgtgtttatggagttttaagaaggtgggatgggggtgtagtatttgtaaggtagagtaggatt

SEQ ID NO: 2417 - DNA, 2461 bp, Artificial Sequence
  chemically treated genomic DNA (Homo sapiens)
tattatcgaggataattgttttttgagttatatttttattattaggtgttatattatagtaatgttttatattatattattttattttatttttgtgaggtagggtttttgttgtttaggttggagtgtagtagtatgaatatagtttattgtagtttttattttttgggtttaagtagtttttttattttagttttttaagtagttgagattataggtgtgtgttattatttttggttaaattttttaattttttgtatagataaggttttattatgttgttttggttggttttgaatttttgggtttaagggattttttttttttggttttttaaagtgttgggattataggtatgaattattatgtttggttttattgtagtattttaaatttagattggaaaattagtaattaaaagtgttaaatatagaattattaaatagatggattaaagatatattaagtttttggtaagaataatagttttggattgataatttttgagttaaaggatagtcgtgtttttagaatgagagtataattagataattgattggtttatttttttttttttggttggtgttgtattttggttgtaaatatgtacgaagtgtgtgtatgtgaatgtgggattggagggaaattatgagtatttaattaggtatgtttatatgtgatttgtgtgtttatgtgtgtgcgtgtgtgtttgtgtgtgtgtatgtatgtgtttgcgtgtttttgtgtttttatatatgggtttgtgtgtatatgtgtgtgtgtttgtgtatatttgtgtgtatgtgtgttgtgtgtttgaaggtaaattttaagaaggtaggggttatgtatttagtatagttattggtatagaataaatatttattatttgttaaatgaatgaatgaatgtgtatgcgtgtttgtgtgtgtgtgtgtgtatgtatgtttatatgtgagtgcgggtgtttgggtttttgagagtggggttattaatgtttgagtgggtgtgagggttttatatttgattatgtgtttaggtttttgtaagtttagaatttgattatgtagagataatgaatttttttgtatttttttgatttttatttgtgtttttatttattttttttagggttttttttgtttggggagttattttttttattagtttgtagttagtttttatttggatttttatttttgtgtgtttttcggaggatatagatggtaggagtacggaatcggaagtatttggtaatgaagtagtaatttatttcgtaattttttcgtatttatcgtaataatgtttgttttgatgggtttcgcgcgttgaatgtagtttttaatgtgtaatttagcgggaattgtggtgttttgtggtttttattacgtttatttattgttaagtgttgttgagaatttttttattcgggatgagggaattatttgttttagtaattgattttcgaaattttttttgggttggggtatttgcgaagtttttggtgatgtgttattgtttttggtttgtgttttggatatttatgtgttttgttgaagtatgtaaattgttataatgtgaggaaatgtgatataaaaataatttcggggtaataaatattagaggagttttaagattggtatagttttttttggttttgttttggggttagggagtattttttgtcggtagtgttggtagtaaaggtttgagatgttttggaatgattattgtttatttttttgtagttgtttagttggtttgttggagaagggcgggtgagattttttttaggaaggtaggaatagttggatgtggatcgtttttttttttcgtagttggttaatagaattataggttttgttttggttaaagggaatttgttatttttgattatttaggtggttgtatatatttaggggtaaatttatatttattgttggtcgtttatagttcgtttattttgttagtagggggttgttttttaggattttaggttaggtggttttagttgggatttattgggaagtattgatggggagtggaggatagcggaggggaggatggagataggaggagttgggaaagtttttgttttttttttttttttgatttagataatgtttttaggagtagttggttttttttgtggatttagattttaaaggtgattttttgtggttttagtttttggtagaagatttttgtttttggttattttattttttttttgattttttggtttagcggtggtggtgattttttgttgttgtttatttttgggttgatttattggtttttgtttggttttttagtttttttattatttatgtgatagatttttggtatcgaagtttttttgttttaagtgtttagtagttttttttttttgtttagattttgatattttattaaggacgttttggattattagatttttttttatggtttgtcgaggaaa

SEQ ID NO: 2418 - DNA, 2461 bp, Artificial Sequence
  chemically treated genomic DNA (Homo sapiens)
ttttttcgataggttatggaggaagatttggtagtttaagacgtttttgatgaagtattagagtttaaataagaaaaagaaattattgaatatttaaaatagagggatttcgatgttaggaatttgttatatgggtaatggaagagttgagaggttaaataagggttagtgagttaatttagagataaataatagtaggagattattattatcgttaggttagagggttagaggagagatgggatgattaggagtaagggttttttgttagaagttaagattataggaggttatttttagggtttggatttatagaggagattagttgtttttgaagatattatttgagttagagaggagagggaaatagagatttttttagttttttttgtttttattttttttttcgttgttttttattttttattaatgttttttagtggattttagttgaagttatttgatttgggattttgggaaatagttttttgttggtaagatgaacgggttgtgggcggttaataatgaatgtgaatttgtttttgagtgtgtgtagttatttgaatagttaggggtggtagattttttttagttagagtaaagtttgtggttttgttgattagttgcgaaaaaaggagacggtttatatttagttgtttttgtttttttaggaggggttttattcgtttttttttagtaggttagttgggtagttgtaggaggatgggtagtggttattttagggtattttaggtttttgttgttaatattgtcggtaagagatgttttttagttttaaggtaggattaggaaaggttgtgttaattttggagtttttttggtgtttgttgtttcggagttatttttatattatatttttttatattatggtaatttatatattttagtagagtatatgagtgtttaaaatataaattaggaataataatatattattaggagtttcgtagatattttaatttagagaaggtttcggaaattagttgttaaaataagtggtttttttatttcgagtgggagaatttttagtaatatttgataataagtggacgtgatgaggattataaagtattataattttcgttggattgtatattgaaagttgtatttagcgcgcggagtttattagagtaggtattgttgcgatgaatacgaagggattgcggaatgaattgttgttttattgttaagtgttttcgatttcgtgtttttgttatttgtgtttttcggaagatatatagaagtaaaggtttaaatgggggttggttataggttggtgaggagggtagttttttaggtaaggggagttttaaggaagatgagtgggagtataggtaggggttagaggagtgtaagaaaatttattgtttttgtatggttaagttttagatttatagaaatttaaatatataattagatgtaggatttttatatttatttaagtattaataattttatttttagaaatttaaatattcgtatttatatatggatatgtatgtatatatatatatatagatacgtatatatatttatttatttatttaataaatagtgagtgtttattttgtattagtgattatgttaagtatatggtttttgtttttttggagtttatttttagatatataatatatatatatatagatatatataggtatatatatatatatatatagatttatatgtagaaatatagagatacgtagatatatgtatgtatatatatagatatatacgtatatatataagtatataggttatatataaatatgtttaattagatatttatggtttttttttagttttatatttatatgtatatatttcgtgtatatttataattaaaatgtaatattagttagagggaagaggatgaattaattaattatttagttgtgtttttattttgaaaatacggttgttttttaatttagaggttgttagtttaagattgttgtttttattaagagtttgatatgtttttagtttatttatttgatagttttatatttaatatttttaattgttaattttttaatttaggtttaaaatattgtagtaaggttaggtatgatgatttatgtttgtaattttaatattttgggaggttaaggggagaggattttttgagtttaggagtttaagattagttagggtaatatagtgagattttgtttgtataaaaaattaaaaaatttagttaagggtggtggtatatatttgtggttttagttatttgggaggttgaggtgggaggattgtttgggtttagaaagtggaggttatagtgagttgtgtttatattgttgtattttagtttgggtagtagagattttgttttataaaaataaaataaaatgatataatataaaatattgttgtgatatggtatttggtaatggaaatatagtttagagagtaattattttcgatggta

SEQ ID NO: 2419 - DNA, 2495 bp, Artificial Sequence
  chemically treated genomic DNA (Homo sapiens)
attatgttagaagggttagaaaattttgaaagtaattattagtttagtagaagttgtaagaggtttttatattatgaatagtttaattttgataaatagaatttgtttatttagtgattttaaatgtatttaatgatgttatgatagtagtggttataatagtattagtttttgatagtagtgtggatataggttttgagaattttatataatagttgattagataatgtgatattggtgtgaggatgtgtgatttagattattgttttagagtgatttagagttggttgtgaaattgtaaggaggtattaaggggtaggtattttagattttgagttatgtggaaagtgttgagttatatggaaagtgttgatatttaggggtgggtttgggtgtattacgaggttagtatttagttgttttttggatgtaataaagtttggatattaataatttaatgatttttgattttatgggagttagtggatttgttttatattatttttatgttaaattatggtttatataaggacgttatttagttagagatttatattcgaaaaaagattatttcggaaatttttaaaaattaatatgtgatttggaaattgttttaatgttttataaacgttgaatattatgattcgtatgaatgattatgatgtttagttagtagagtattaaaaattttatttatgtttttgttagtgttgtaattttattaatattttttattattatggtaatgttttttaaagttgtttaagatttataataagttgtaaaaatagtgtaaaatttttgtgtattttttatttatttttttttattaataatattatatataattatagtatagtgttaaaatgaggaaattaatatagtattatattgttaatttgattatagaatttgtttagattttattaggatttacgtgtatttttgtgcgtatatgtatgcgtgtgtgtgtggtttatttttatttttaaggattgtttttttttataatttttatgttaaggttatggagttttagttattgttaggtagaggtggagttatatatgattgcgtttttatataattatattttttttatttaagaatatttattttatatggagaaatagattatgtttattaattattttagaaagtatgtaattttattagattaagttttgtttttgggtattgattaatagagggaacggttttttagcgatttagaatttttacgatacggtttgtggagattatattttggggttagttgtttaaatgtattgttggaattttaggtagaaatgtgtaatggtatgttaagggttgttgagttgttatagtttaagtagggttatttgtggtttttaaagagaggttgtaattttttatggtatttataaattttagtttttaagagttagggagaaaatgtaattatgttgtttgatcgagttaattttttttttattttgttttttttttatttttattattattttatttttaattttgagtagtttgtatagttgttttagggtaaagaatatggtatgagatattatttttagtattattttagggttagataaaatggttaggtattttttttgatttaatgagggaaagttttagaaagttgttgataaagtagaaattttttaatttgaggttttgaatatttattgttttttttgagtaagatagaaaagttttatttattggttggggtatttttaatggtagttgtaggttagggatagttatgtttatatatgtatttttttattattgattaggtttattagaatgttagagttaaagaatattttttttttgttttgtaggtatatggagaagggttttttgttgttttttttgatataaatatagtgtttgaagtattttttttggtaatttttttgatttatttgtatgtgtatttatttattttatttattaggagagttaaatgagtgaaatggttataaatggtggttttggaattagatagatttgggttttaatattatttttaatatttattggttgtgtggtttttatattaggatagaaagtttatatgttgaatttttaatttttagtatttagaatgtgattttatttggagatagggtttttatagttgtgttttttatagttgtttttaagaatatttaagattggtgtttttaggaaggggtgatattggagataggtatatataggaagaatattataataacgcgaatttagagattggggtaatgtttttataagttaaggaatgttaaagattgtttaaaaattattggaagttaggaaagaggtttagaatagattttttttttattatttttatatggtgttaagttttttgattttgattttggatttttagtttttaggattgtgagaaaataaatttttgttgtttaagttattatttagtatgtggttttttgttatagtagttttagtaagttaat

SEQ ID NO: 2420 - DNA, 2495 bp, Artificial Sequence
  chemically treated genomic DNA (Homo sapiens)
attggtttgttaggattgttgtaataaagaattatatattaagtggtgatttaaataatagaaatttatttttttatagttttggaggttagaagtttaagattaaggttagagggtttggtattatgtgagggtagtaaggggaagatttgttttgggttttttttttagtttttagtgatttttggataatttttggtattttttggtttgtaaaagtattgttttaatttttgagttcgcgttattatggtgttttttttatatgtatttgtttttaatgttatttttttttaaggatattaattttaggtgtttttaggaataattgtaaagggtataattgtaaagattttatttttaaataaagttatattttaagtattggggattagaagtttaatatgtgaattttttattttaatatgaaggttatatagttaataagtgttagaggtagtattgaaatttaagtttgtttgattttagagttattatttgtaattattttatttatttgatttttttggtgaatgaaataagtgaatatatatataagtggattagagaagttgttagaaaagatattttaagtattgtgtttatgttaaaagggataataggaaatttttttttatgtgtttgtaaagtaaaggagagatattttttagttttggtattttaatgggtttgattaatgataagagagtatatgtgtagatatgattgtttttggtttatagttgttattaaaagtattttagttaataagtaaaatttttttgttttgtttagaaagaataatgaatgtttaggattttaaattagaaagtttttattttgttaataattttttgggatttttttttattgaattagaagggatgtttggttattttatttggttttgaggtaatgttaaaggtaatgttttatgttatgttttttgttttgggatagttatgtagattatttagggttgggggtagagtgatggtgggagtgggagaggggtaaggtggggaaagagttagttcggttaaatagtatggttgtattttttttttgatttttgaaggttgagatttgtggatattataaaaggttatagtttttttttggaagttataaataattttgtttggattatgatagtttagtagtttttggtatgttattatatatttttgtttggaattttagtagtgtatttgagtagttggttttaaagtatggtttttatagatcgtgtcgtaggggttttgggtcgttggggagtcgttttttttattagttaatgtttagagatagagtttgatttaatgaaattatatattttttggagtgattaataaatatggtttatttttttatatgggatgaatatttttaaatgaaaggaatgtgattatgtgggggcgtagttatgtatagttttatttttgtttagtaatggttaaaattttatgattttggtatagagattgtaaggaaagatagtttttaaaaatagaggtaaattatatatatacgtatatatgtacgtataagagtatacgtaagttttggtaaaatttggataaattttgtaattaagttaatagtatgatattatgttaatttttttattttgatattgtattgtggttatgtgtgatattattaatggaggaaggtgagtaaagggtatataggaattttgtattatttttgtaatttattatgagttttaaataattttaaaaagtattgttatagtaataaaaagtattagtgaaattataatattgataaaagtataggtagaatttttagtattttattaattgaatattataattatttatacgagttatgatgtttaacgtttatgaaatattagaataatttttaaattatatgttaatttttaaaaattttcggagtggttttttttcggatatgggtttttaattaaatgacgtttttatgtgagttatggtttgatatagaaatggtgtaaagtaggtttattgatttttatgaagttaagaattattaggttattgatgtttaggttttattgtatttagagggtagttgagtattgatttcgtggtatatttaggtttatttttggatgttagtattttttatatgatttaatattttttatatgatttaggatttggagtgtttgttttttgatgtttttttgtaattttatagttaattttgggttattttaaagtagtggtttgggttatatatttttatattaatgttatattatttagttagttgttgtatggggtttttagaatttgtgtttatattgttgttaggaattgatattgttgtggttattattgttatgatattattagatatatttaggattattaaatagataagttttatttattaaaattaggttatttatggtgtagaagttttttgtagtttttgttgaattaataattatttttaaagttttttaatttttttaatatggt

SEQ ID NO: 2421 - DNA, 2425 bp, Artificial Sequence
  chemically treated genomic DNA (Homo sapiens)
atgtattttgagtgatttaggaaaattgtttttttttttttttttttaatttttaagtatttaaattaagttttttttttttgtaacgttttatttttggtgtttatgggagttgagaatatattattggagaatttttttagtttaaagatattagattaataaaataatttggatgttaattttgaagttagtttataataattagggtttttggtttaggtttataatgagtaggagatttttgttatttttagtgttatttttttgtaaaattttaataagttattttatgtgaaaatattaattattgtttattgtagcgtttaaaattagttaaggaagtttttttgaaggtggtgacgtaggggtttatataagggattagttgatggaaaggagaaagatgcgcgttttagagagaagaaataagttgggtagttttgtaaatggtttatgtttatgtggagatacgttaggttagagtaggtttgtgtgggagagaagttgtggttaggggtatggaattggatagagattaaaaatatgggttttagaaagttaaattggaggatttttattttgtaattttattttttttttttttttttttttcgaaattaatcggatttattttttattttttttatgggagattttatagttattatttttatttttttaatagttttgggaggtataattatttttatttattagttaaggaaattaaggtttaggagggtttattgataggagcgggagtagtttgggtttatgttacgtgtttttatagttagtatatagttttatttgttttattttgtatttgttgtgttttattgtatttagattgtagttagttttttttttgtttttttgaattttagtataggtaggtattgtatttatttatttttatagatggtaaatcgaggtttagagatgttaaattatttttttaatgttatattgttaggaagtcgttaatatattattaaatttggggatatttgttttttagggtagtatttcgttgttttttaatatttagtagttgtgattgttagatgatgatgatgattattaatagagttattgtttttggggtaatattagtagtgtagtagcgagtaggttagtagggtttagggtagtttgttcggttatatttgttttggagttgttgtttgttgtgtattaggaattcgtcgaagtttgagagttgttagtatagattttattagggagttagtaacgttttttatttttttaggtttttttgaaatttagttaaggaataggcgttgagtttatagttagatagttttcggagttttcggttttgggtacggtgttttagttggtggagatggaaatagtaaggtttttttgatttaaagattttttattgtttttgatattttagatttaaaatttattattattgttatttagtatttattttgttaggtatgatgtagggagagaggaggggataaaaaagggaagggtcgtatagagttagggtagagggaggaatcgagttggagaaagtattaaggatttatttgtgaaaattttttggagtgttgaggttaaaagtttatttgggtgggattaaaggggagtttttaatatagtttatgattggaggattagtaatttgtaggtttagttaggttttgattttttttttttttagtttttgaggagaattatagttattgtttgagaaaatgtagttttaggatataggattttaatttagtgtttgtatagttttttaattagaggtttgtaaatggtagagtcgtttatttggattattttgtaaattgtgaggttaaattgtattaataaaaaaaagtattttttttttaatttttttttttttttagttttttattagattgggatgagatgtagaaatgtattagattgggaaatatatttaattttttgttaagtttttttttaaataataagtttaatttttggtaggtaagggtgttttggtaaaatttaaatagaattgtttagtttttattatatttattttgatagtgaattttttagaataggaagtattttttgtttaaagtttttgtttagattttatatatgaagtttttaaaagtaaaaggaaattatagtttagttttttgtagatattttgaatattttgaggagaggtagggataatcggaggtagggaaacggggtttcggatgataagttttagttttgggaaagttttggaggtggtaggatagttaggttagagttgttcggtggagatttggtttttgaagttagcggggtatttttgagtagtaggttttttttagagtaaatattagttttttttttttttgtttttaatgattatagttgggtaggggggagaggttttaatttttaa

SEQ ID NO: 2422 - DNA, 2425 bp, Artificial Sequence
  chemically treated genomic DNA (Homo sapiens)
ttgggagttaaagttttttttttttatttagttgtggttattaaggataaagaggagagagattgatgtttgttttgagaaaggtttgttgtttaggggtgtttcgttggttttaggagttaagtttttatcggataattttggtttggttgttttgttatttttagaatttttttagagttgaggtttgttattcgagatttcgtttttttattttcggttgtttttgtttttttttaagatgtttagagtatttgtaaagggttgagttgtgatttttttttgtttttaaaaattttatgtataggatttaaatagaaattttagataagaaatattttttattttaaaggatttattgttaaaatgagtataatggaaattaggtaattttatttaggttttattaagatatttttgtttattagagattgggtttgttgtttaaaagggagtttagtaaaggattaggtgtgttttttaatttgatgtatttttgtattttattttaatttgatgagaaattgaaagagaaagagaattaaaaggggaatgtttttttttattaatgtaatttgattttataatttgtagaatgatttagatggacgattttattatttgtaggtttttggttggaaggttgtgtaggtattgaattagaattttgtgttttgaggttgtatttttttaggtagtgattgtagttttttttaaaagttgagaaaaagggaaattaaggtttaattaggtttgtaagttgttgattttttagttatgggttgtgttgggggtttttttttgattttatttagatgggtttttagttttagtattttaaaggatttttataagtgggtttttaatgttttttttagttcggtttttttttttgttttggttttgtacggttttttttttttttatttttttttttttttttgtattatgtttggtagggtggatgttgaatgatagtgatggtgggttttaagtttgaggtgttaggggtaatgaggagtttttgagttagaagggttttgttgtttttatttttattagttagggtatcgtgtttagggtcggaggtttcgggagttatttgattgtgagtttagcgtttgttttttggttggattttagagaggtttgaggaagtgaggggcgttgttggttttttggtggaatttgtgttgatagtttttaggtttcggcgggtttttggtgtatagtagatagtagttttagggtagatgtggtcgagtaagttgttttgggttttgttagtttgttcgttgttgtattgttagtgttgttttaaaagtaataattttattaataattattattattatttaataattatagttattgggtattgggaggtaacggagtgttgttttgaagagtagatgtttttaggtttagtaatgtgttggcgattttttagtaatgtgatattggaggagtggtttaatatttttgagtttcggtttgttatttataagaatgggtaagtgtagtatttatttgtgttgaaatttaaagagatagagagaaagttggttgtaatttaaatgtagtaagatatagtaggtgtaggataggatagatgaagttatgtgttgattatgaagatacgtgatatgagtttaagttgttttcgtttttgttagtgaatttttttaagttttagtttttttagttagtaaatggggataattatattttttaaagttattgagaaaatggaaataatagttgtgaaattttttatgaggagaataagaaataagttcggttaatttcgaagaaaaaaagagaggaaagggtggagttgtaggatgaaagttttttaatttgattttttaggatttatgtttttggtttttgtttaattttatgtttttaattataattttttttttatatagatttgttttaatttggcgtgtttttatatgggtataaattatttgtaaaattatttagtttgttttttttttttggaacgcgtattttttttttttttattagttgattttttatataaatttttacgttattatttttaaagaggtttttttgattgattttgaacgttgtaatgagtagtgattaatatttttatataaaatagtttgttgaggttttataaagaggtagtattggaggtggtagaggttttttgtttattgtgaatttgagttagaagttttgattattgtaggttggttttagggttaatatttagattgttttgttgatttggtgtttttgaattgaggaaattttttaatggtgtgtttttaatttttatgaatattagagataaaacgttgtaagaggaggaggtttagtttaggtatttagagattgaggagaagagaaagaaggtaatttttttggattatttaggatgtat

SEQ ID NO: 2423 - DNA, 2488 bp, Artificial Sequence
  chemically treated genomic DNA (Homo sapiens)
tttttttttttttgagacggagtttcgtttttgtcgtttaggttagagtgtaatggcgcgatttcggtttattgtaattttcgtttttcgagtttaagtgatttttttgttttagttttttacgtagttgagattataggtatgaattattattatattcggttaattttgtatttttagtagagattgggtttttttttgttggttaggttggtttggaattttagattttaggtgattttttcgttttttttttttagagtgttgggattataagcgtgagttatcgcgtttggtcgaattattggttttttttaagtagtggaataataatggtttataatatttagaagatggggttatatatttattagatttatttttttagagtttattttagtatttgatatagggtagattttaataattgttgttaattaataaatatatatttttaaatatattgttagtaatgtggaagatatattgaagaaggaaaagattagtggtaagatataagttaggtggtaaaatttaaaagaaaagttagtgatagaaaagaagtttgttgagaatgatggtttttagttttatttatgttttatgtatatatatgtaataaattagtatattgtgtatatgtagtttagaatttaaagtataataaataaatatgtgtgtgtgtgtatatatatatatatatatatatatatataaagaagttgatatgggagagatatttgaggtagaattgataggttttggagatagtatgattgtgtggttttagagagagatattagttgagaataatttttaaaatttttatttgtgtgtgattttttatgggggatatagaagggggagtttagtcggggattttgagttttagttgtttttggaatatgattgtatagatcgcggtttgaaaggaagtggtagagaagaaaaatttaaaatggttgttaatagtttgttttttggaggttttagagtttcgggggttatggatgtatggttacgtagggtgagtaattgtgatgagagaatagaaaggaaatttaaataagagaatttaaagtagagatgagttaaaaattagtaatacgaattattataagtgggtagttacgttcggtaggagatttaggtaaagcgagggtaaattttttagtttttttttgtggaaaatttataaagtttagattggagaaaacgtattgatagttttgaagttggtattttaagttggaatgtttttttaaagtagtatataacggtataatttaataattttgattattgtggaaaaatgttatgtgttaatagcgattttttataattttgtttagaaaatttgaaagaaatgtaaaaaatggatttgtagttttggtagtaggtagagaaatagtagtagagggttgtaggttagtaattgatgttttaaatattattgagtgttttgtttgtaattttaggggagaatgataataattaaaagtataaatttataagttatttttgaggaggaaaatgttgaatgtatttaaagtgaagggggtttgttgaaatgtttaagtttttttagcgagtttttagatatgtaatgattagttttatgtttatagagtgattttttttttaaatgttttaaagtgttataaaatggaatagattattaatttatgagattttttgggagttagtgatgaaattataattatatgatatttttatatgtttagattttatttgattgtatcggtttttgttataaatagtatagtatattgtttaaaaggatgaaatgaaatttttttttttttttttaattgatttggggttttattacgaggtagatttgagtttgagtttgtatttattttttttagtgttgtgattttaggtaggttattttatttttttttatttttatttttttatttgaaaaatagatagaataatagtatttaatattttatagggtgaatattgaggattatttgagagtaaaataattaatataattttttatttataatttacgtttaataaatattagttattattgatattattattattgttaaaatgataaaggtatattatttttataattatttatttttgttgatagaatgtaaatttggttatagattgtttaaatttttttgatattttaaaataaataaataaataaattagttagagatttaattgagtagtataatttttttttgaaaggaattttttatggttaaataaatttagggattgagttttttatattttagattttattatttattgtattataggttttggtatgtagtgagtattttataaatgtggagtatatatattgttgaatgggtaaatagttttattttttttgagaagtaaggatttttggttttttattattttttgatgattaatattatgtttgtgtttatataagttagttgtgatatttggatttttttta

SEQ ID NO: 2424 - DNA, 2488 bp, Artificial Sequence
  chemically treated genomic DNA (Homo sapiens)
tgaaaaaaatttagatgttatagttaatttgtgtgggtataagtataatattagttattagaaagtggtgagggattagaggtttttattttttaggagggataaaattgtttatttatttagtaatatatgtgttttatatttatagagtgtttattgtatgttagggtttgtaatataatgggtaatagggtttgggatatggaaaatttagtttttgaatttgtttaattatgggggattttttttaggaaagggttatgttgtttagttgaatttttggttggtttgtttgtttgtttgttttaaaatattaggaaaatttagataatttgtggttaaatttatattttgttagtaaaaataaataattataaaaatagtgtgtttttgttattttagtagtaataataatattaataatagttaatatttattgagcgtagattataagtgggaaattatattgattgttttatttttaggtaatttttaatatttattttatgagatgttaagtgttattgttttatttattttttagatgaaaaaatggaagtggagaggaatagagtgatttgtttaaggttatagtattaaaaagggtggatgtagatttaagtttaaatttgtttcgtagtaaagttttaagttagttgggagaaggaggaaaggttttattttatttttttaaatagtgtattgtgttgtttgtaataaaggtcggtataattaagtaaggtttgaatatgtgggaatgttatatggttatagttttattattggtttttagggaattttatgggttaataatttattttattttgtggtattttggaatatttgaggagaaagttattttgtgaatataaaattaattattgtatatttgaaagttcgttggaaaaatttaagtattttaataaattttttttattttaagtgtatttagtatttttttttttagaaatgatttgtaagtttgtgtttttaattattattatttttttttgaaattataggtaaagtatttagtgatatttgaaatattaattattggtttgtagttttttgttattgtttttttgtttgttgttagggttgtaaatttattttttgtattttttttagattttttgaataaaattatggaaaatcgttgttggtatatggtatttttttataatggttagagttattgaattgtgtcgttatgtgttattttgagaagatattttaatttaaaatgttagttttaaaattattagtacgttttttttaatttgagttttataaattttttataggaaaaggttaagaagtttgttttcgttttgtttggattttttgtcgagcgtaattatttatttgtgatggttcgtgttgttgatttttagtttatttttgttttgagtttttttatttggattttttttttgtttttttattataattgtttattttgcgtggttatgtatttatggttttcggaattttgaggtttttagagggtaaattattggtagttattttgaattttttttttttgttatttttttttaggtcgcgatttgtgtagttatgttttaaaggtaattggaatttaaaattttcgattagatttttttttttgtattttttatggaggattatatataaataggaattttgggagttgtttttaattagtgtttttttttgagattatatagttatgttgtttttaagatttgttaattttattttaaatgttttttttatattaatttttttgtgtgtgtgtgtgtgtatatatatatatatatatatatatatatttatttattatattttaagttttaggttatatgtgtataatgtattggtttgttatatatgtatatatgggatatggatgaagttggaaattattatttttagtaaattttttttttattattgattttttttttagattttattatttggtttatattttgttattagttttttttttttttagtgtattttttatattgttgataatgtatttaaaaatatatatttattagttgataatagttattaaaatttattttgtattagatattgaaataggttttagggaaatagatttggtgagtgtataattttattttttaaatgttatgaattattgttattttattgtttagaaagagttaatggttcggttaggcgcggtggtttacgtttgtaattttagtattttgggaggaggaggcgggaggattatttgaggtttggagttttagattaatttaattaatagggagaaatttagtttttattaaaaatataaaattagtcgggtgtggtggtggtttatgtttgtaattttagttacgtgggaggttgaggtaggagaattatttgaattcgggaggcggaggttgtagtgagtcgagatcgcgttattgtattttagtttgggcgataagagcgaaatttcgttttaaaaagaaaaaag

SEQ ID NO: 2425 - DNA, 2378 bp, Artificial Sequence
  chemically treated genomic DNA (Homo sapiens)
ttgaagttatagtttaggttttgatttttattggtagtgaaattttattttgatttttgtgttttttattttgtaaaatgaaggtgggaatagttcgttgagtgattgttgtggggattagatgatatttgtggaagaattttgtaaggggtaaagaggtattattttataaggtaatgttattatttttaaggtggggtaagtgatagttagatatttaagttagagtaaagttaggagaaggttgtattggtatggaaaggggtaaatagtttatttttattagtttttttggagggttaattttaaagttattagagttttaagttttgggtaaaaaatgtttgtttttagagtaattttttatttttttagagttattatgtttaaggtgttttgttttgtttgtttgttttggttttggtttttgttttattttgtttttttgagatagagttttgttttgttatttaggttggagtgtagtggtgtaatttcggtttattgtaagttttgtttttcgggtttatattatttttttgttttagttattcgagtagttgggattataggcgtttattattacgttcggttaatttttttgtatttttttagtagagacggagttttattatgttggttaggatggttttaattttttgaattcgtggtgtttttattttgaaaaagggaaaaatacgttttatgttttgaggtttaattataaaatatttttattttttaagtttgattaggagttatttgttttagaatgatttggagtgtcgtttaaatgtagatttttaggttttatttttgattattatttaatttttttgagttttagtttttgagttttgaggcgtgacgtaatttttgttttaaattttagtaagagagttttaatagaaaaaaatgaataaatgaaaagatgaatggtttgtaagggagaggtagaatatgtatttagataagatgatttttattgttttatttaaattagatttttattattttaggtttttaaagatgtttttagttttaaataattaatagagtggttttatttttatttattgtgtattttggttaagtgtatagtaagtggattttttggtcgggtattttgttaatgttggagttgttaggaaataagaatgtgtgtatttattgaagaaaataaaaatgtttatgcgacgttgtatagagacgatttatgagattttatgaatgtgttattaaaagatttatttagttattgttaatgttaggtttgtaaatatttgggggtttaggtaataaagttttttgatggagttagtgggtaggacgtgtttgtggaggggagtatgagttttgtgttgtaggtgtttgtatttgtgagttgtgtggagttaagtatatttaaattataagtgtatatatgggtgtaaataaatgtatatatattagtggtgtgtaagggagtatgtatatatgtggattttatgagatcgtatagtatgggttatttttggtgtgattaggaagagaggttaagttatagtgtagaagtggatttattatttatattatttttaaaggatatagagttttcgttgtttaaaggaaggggttagttattatttattgttaagattaaaagttttggggtattaagaaaagtagattattaagagaaaaatgtttttagtcgagtatgtaagaatggatagagtttgattaataggaggaagagtagggttttattttgtttattttttttgttgggtttgaattttttattgatattatagtttattagttttaggtttttgaagtttttttgagttttgtgaattaggtttatgttttatcgtttttttgggagtattgttttgtgttttttagttgttaggttggtgtaaattatagaatgaataagtttttttattaagttttttggagtttagagtagtttattgttttttgagggttattttttatgggagaaagtttaagaaaatgtatagaaggtatgttattaaaagaaaagggaagaggaagagaaaaggaggaaggagaaggaggagaaggaaaaggaaagtaagaaagaagtgtttttagggtgagtttttgaattatttagagtttatttttataaaaatagttttaagattttttgtgggttatgtaagaaggaggggtgtttatttttttttttttttttatttttttgtaataaggagagaattataggttttgtaagagttttttgtttgtttggggtacgttattattatatgtatttttttaggtacgtgagggaggttatttttttacgagatagggaggaattttgggtaattgtggtttggaaatgaaattagtttttttaa

SEQ ID NO: 2426 - DNA, 2378 bp, Artificial Sequence
  chemically treated genomic DNA (Homo sapiens)
ttgaaagggttggttttatttttaagttatagttgtttagggtttttttttgtttcgtagggaagtgattttttttacgtgtttgagaagatgtatgtgatgatggcgtgttttaggtaaataaagggtttttgtaaaatttatgattttttttttgttgtagaggaatgaaagggagggaggaagtaggtattttttttttttgtatggtttataaggggttttaaggttatttttatgaagatggattttgggtgatttagggatttattttaaaagtattttttttttgtttttttttttttttttttttttttttttttttttttttttttttttttttttttttttttaataatatattttttatgtatttttttgaatttttttttatagaaggtaatttttagaaaatagtgaattattttaggttttaaggggtttagtaggagagtttgtttattttgtggtttgtattagtttggtagttggagagtataagataatgtttttaggagggcggtaaggtataaatttggtttatagaatttagagaggttttagagatttggaattaataggttataatgttaatgagaagtttaggtttagtagaggaggtgagtaagatgggattttgtttttttttttattggttagattttatttatttttgtatgttcggttagagatattttttttttgataatttgttttttttgatgttttaaggtttttggttttagtagtaggtgatgattaatttttttttttgagtagcgagaattttgtgttttttgaaggtagtgtgagtaatgggtttatttttgtattgtggtttagtttttttttttagttatattaggagtggtttatgttatgcgattttatggggtttatatatatgtatatttttttgtatattattagtgtgtgtatatttatttatatttatatatatatttatgatttaagtgtatttggttttatataatttataggtgtaggtatttgtagtatagggtttatatttttttttataagtacgttttgtttattgattttattagggagttttgttgtttgagtttttaggtgtttgtagatttaatattggtagtgattgagtgggttttttggtgatatatttataaaattttataaatcgtttttgtgtaacgtcgtatgaatatttttattttttttaataaatatatatatttttattttttaatagttttagtattggtagaatgttcggttaagaggtttatttattgtgtatttggttaggatgtatagtggataggaatggggttattttgttggttgtttgagattgaagatatttttggggatttgggataatggaggtttgatttggatgggataataggagttattttgtttggatatatattttattttttttttgtaagttatttatttttttatttgtttatttttttttattgaaatttttttattgaggtttaaagtaaaagttacgttacgttttaaaatttaaaaattgaggtttagaaaaattaagtgatagttaaggatggggtttgaggatttgtatttgaacgatattttaggttattttgaggtaagtggtttttggttagatttgaagagtgaaggtattttgtgattagattttagggtataaaacgtattttttttttttttaaaataaaaatattacgagtttaggagattgagattattttggttaatatggtggaatttcgtttttattaaaaaaatataaaaaaattagtcgagcgtggtggtgggcgtttgtagttttagttattcgggtggttgaggtaggagaatggtgtgaattcgggaggtagagtttgtagtgagtcgagattgtattattgtattttagtttgggtgatagagtaagattttgttttagaaaaataaaatgaagtaaaaattaaaattaaaataaataaatagaataaaatattttggatataataattttgaagaagtgaggagttattttaaggataaatattttttatttaaaatttaaaattttaataattttggagttgattttttagagaggttggtggaggtgggttatttatttttttttatgttagtgtaatttttttttggttttgttttaatttgagtgtttgattgttatttgttttattttaaaaatgatgatattattttataaggtgatatttttttattttttataaagtttttttataaatattatttaatttttataatagttatttagcgagttgtttttatttttattttatagagtgggaagtataggggttaaggtgaagttttattattagtaagggttagagtttggattatgattttag

SEQ ID NO: 2427 - DNA, 2432 bp, Artificial Sequence
  chemically treated genomic DNA (Homo sapiens)
gatttttttatttgtgagtttttgaagaattttgtatataatgttaatatggtgttggttatattttattttgatttttattgtgtttatgttttttattagattgtgagttttttgaggataaggatttggttttatttatttttatttttaggtttattttaatttggaatggagtaggtgtttaataaatatttattgaaatggatattaaatttgaataagttttgaggatttttaagttttttagggttggagagaggaattattaaattttttttgatatttgggatatatatatagtttataataattaaaataattaaatttggatgatttaggatatttgagtttttttttttatattttttattattttggtaaattttttaatttttttaagttttaatagttttatttgttattttgaagtaatttatgtgtcggttagggttaggtatgtttagaaacgttatttgttttagtttttataataattaaggtatatgagtatttgatttttattttatagatgagaaaaacggaggtttagagagattgagtaatttttttattttatatagttagtaagtagtagagttgggattagattaggttttttaatttagagatattatttatttatttatcgttttttttagaaaaatttttattgagtatttattgtattgttggtatagttttagatgttaggggtatagtagtgattaaggtaagtgattaaagtgtttttatatttatggtatttatattttttttttgttatgtatttttttaaagttggtgatataatatgagaggggtaataggattgtagtggttttaataaggtttagtatatatagtagttttagaatgagagtagtaagattaattagttaacgttaatttttattataggtggagatggagtttgatgtgaagttacgttttgtttgtttaggatagggtaggttgaagttttttagtatttgtggttgggttgggttaggatagagaggggagaggtaatttggaagttgtaggttataagtttttttttttgttattttgtgttttttttttagttttgtttttagttaagtataggagtagtcgtttaagtttacgatgtgttgcgtgtaggttgtagatttattattatttataataggttgttgtttttattttttatttatagaggtggttgagttattatttatggttatcgtagtcgttaaattgtttcgggggttgagatttatatagtagttatgtgagttgttataaatttggggttgggaggaggatgtttttaatcgaattagagttgatgattgatagatagggatagtagagattagttttattaattttaaaaagtttaggaagtttttatttagaatgtattttttggagataatagtggtggagtttaggttatgtatgagataaagaaaaaggtttagaataagtgggtgtatattcgtattttggaatagttaggaagatttgggagtgggaattagaggatggatttttattttttttttttatgatattaaattcgcgtagtaattatgttttttatttgaatagtggtttttaataattagttaataacgggatataatttttatagtttttaattttaagattttaaaatatattatgaataattaaatgttattatttagtgatttgggtaattaaagatttttttaattgttatttttttttttttgttgtgtttagaatatagtttagtattatgtttttaaatgaggaaattgaggtatagagaggttaggtgaattggtatagattatttgatattttatcgtggtttttagtttttattttatattttttttttagggtttttagtattgtgtttttgtatgattgattgtttttttttttttagttttaaattttatttttatttttatttattttagatattattatttaaatgttttttgttgaaattatttttatttttattggggtaggtgtagggatttagtaggataaattggttatttttttttttggttttattttggttttttttttattatttaaattttttattttgaataaagtagtaaaatgtatttttttttttatgcggtttagtataaggataggtttggatttttataatgaaagtttatgtttttaataagtgtttatagttagtgttttttgtatttatttaattgttgttttttgaaagttattattttttattttttgtgattaatgtgtattgggagttaaatttatacgtgtgtgtaggattttatttttaaagatatgttttattatcgtttattgatagggtttttaattttaagttaggatttacgtatgttagaggttgtggcgagttacgagtattgcgtttatttatgtatgggtataaa

SEQ ID NO: 2428 - DNA, 2432 bp, Artificial Sequence
  chemically treated genomic DNA (Homo sapiens)
tttatgtttatgtatgagtaaacgtaatgttcgtggttcgttatagtttttggtatgcgtgggttttggtttggggttgagagttttgttaatggacgatgatgaaatatgtttttggaagtagggttttgtatatacgtgtgaatttagtttttagtgtatattagttataggaaatagaaaatgatagtttttaggaggtaatagttaaatggatgtagagggtattggttgtggatatttgttagaaatatgaatttttattgtagggatttaaatttgtttttatattaaatcgtatgagaaggggggtatattttgttattttgtttagggtggaggatttaaatggtaagagaggggttaaggtgaggttaggaagggaggtggttaatttgttttgttggatttttgtatttgttttagtgggaatgagggtgattttaataggaaatatttaaataatggtgtttaggatgggtaaaggtgggggtgggatttggggttggggagaagggggtagttagttatgtagaggtatagtgttgaaggttttggagaaagagtgtggagtggggattaagagttacgatgaggtattagatgatttgtgttagtttatttggtttttttgtgttttagtttttttatttgagaatatggtgttgagttgtgttttgggtatagtaaaagaaaaaaaatgatagttaaaaaggtttttgattatttaaattattaaataatggtatttaattatttataatatgttttgagattttgggattgaaagttatggagattatatttcgttattagttggttgttaggaattattgtttaggtaaaagatataattattacgcgaatttgatattatgggggaaaggagtagaggtttattttttaatttttatttttaggtttttttagttattttagggtgcgaatgtgtatttatttgttttgagtttttttttttattttatgtatggtttgggttttattattgttatttttagggagtgtattttgggtgagggttttttgggttttttggagttgatgaggttggtttttgttgtttttgtttattaattattagttttaattcgattgaaaatattttttttttaattttaagtttgtggtagtttatatggttgttatgtaaattttagttttcggagtagtttaacggttgcggtgattataggtggtaatttagttatttttataaatggaaagtaaaaataataatttattatggatgatggtaggtttgtaatttgtacgtagtatatcgtaaatttgagcgattgtttttgtgtttggttgaggataggattggggagggggtataaagtggtaggagaggagatttgtgatttgtagtttttaggttgttttttttttttttgttttggtttagtttaattataggtgttaaagaattttaatttgttttgttttgagtaagtaggacgtggttttatattaggttttatttttatttgtggtgggggttagcgttggttggttagttttgttgtttttattttaaagttgttgtgtatgttggattttattggggttattgtagttttgttgttttttttatgttgtgttattagttttgggggggtgtatgatagaaggaaagtgtaaatgttataaatatggggatattttaattatttgttttagttattgttgtatttttagtatttagagttgtgttaataatatagtgggtgtttaataaagatttttttgagaggagcggtaaatgaataagtaatgtttttgggttgaggggtttggtttgattttagttttgttgtttattagttgtgtaaagtgggaaagttatttaatttttttgaattttcgttttttttatttataaagtggaaattaagtgtttatgtattttgattgttgtgagggttaaaatagatggcgtttttaaatatatttagttttggtcggtatatgagttattttagagtgataaatgaggttattgaggtttagagaggttaaggggtttgttaaagtggtggaaaatgtaggagggaaagtttaggtgttttgagttatttagatttagttattttaattgttgtgaattatgtgtatgttttagatattagagggaatttggtggtttttttttttagttttgagggatttgggagtttttagaatttatttaggtttgatgtttattttagtaagtgtttattaagtatttattttattttaaattggggtgaatttaggagtaagggtggataaaattaagtttttgtttttaaagagtttatagtttggtggagaatataggtatagtggaaattagaatagaatatgattagtattatattggtattatatatagagttttttagaaatttataggtgggagagtt

SEQ ID NO: 2429 - DNA, 2475 bp, Artificial Sequence
  chemically treated genomic DNA (Homo sapiens)
cggagagtatagtggttttttttaggaagttattttgatttttatttagatttttttttttgtgttaggtattgtgttttttttatagttttttttatagggttttttttcgatataattggtatttgacgtttttgtttttttgaaaataaggaaatagagggttagggaagtaattggtatttagtgttgttagggtttcgttttttgtagatgaggagataaagggttagggaggtagtgggatggatatgttgaggtcgttaggaaaagatagtttgatgtgtatttggagttgtttttgaaggttttatagaatttggtatagcgttaggtaattcggttgttttttttgttatatttattaattttagagtttatattttggtatagaaggaagagatttaggttggtgttgggtcgtaatattttagggaaaggggtaaggagttttgatttgtttttatatttgtttgtttttaaattgggttggattttggttgggtggtcgttgggtggtagttttgttttaggatattcggtagtaggataaggtgggggagttagttgttttgtgagttttttttaggattatttttttttgtttcgttgagtagagatatagtttttcgaggtttgagtttttattttttattatttttattttcgtttttggtatagaaaagttttagtattattttgtcgaatgtggtattgagtgtatgggtgaggtatttttttaagtaatttattatagtaattttttaaatgtttatatagttttttgagaaggggattattattattgttcgtttatagatgaggaaatggaggtttagagaggttaagtgatttattggaagttatatagttggagttaggatttgaatttaggttttttagttttagcgtgtatatttttgtttatatgtttttgtttttagggtagtagtgagtttgaaatacgtgtagtgtttggtaggtagtaggtgtttttttaagttttttttttgttttatttagttttgaggttagcggttcgttttgttttgtgtttgggaggaatgttcgtggtggttttagtttggattcgagaagaaaggtagttttgtgggcgaaaggtgagcggttgggtgggcgcgggcgtgtttatttagggtcggcgtgtggttcggggtggcgtcgttgttagtcgcgtcggttgttttaggtttgtgttggtttttagatgtgagttggttttagtcggtcgggtttttttattttacgtatagaggggttttattaaaagcggttgtgaggaggtttaggaggtcgtttggttttagtttgttggttttgagtttcgggtttgtagaagttaggttagtcgtatttgtgtttttgtgttttggttttcgtgtgttttacggtttagtttttttgtttttttcgagttttttgggggtttaggcgagggatagtttttttgttaggaaattgaagttgtaggagtagttcgggaggggtaataatgttagaatttttttgtagcgtttatttttttgtattttaggggggtagaggtaatttatacggaataaaagtgtaaaatttattaaaatttagagagtgtttagtgagatattaaagtgtagatattcgtgggaaggagaaattgtagatttagagagttagtttttagcggggaggagagtaattggggttggggggtttgtaggggttatgttttttttgcggtatttttttttttaggtgggggtgggggtgttatttttttttttttttttttttggagataggatttcgttttgttatttaggttggagtgtagtggcgttatcgttggtttattgtagtttttgatttattgggttttagtagtttttttattttagtttcgcgagtggttgggatttcgggtacgtattattacgtttagataattttttaaaaatagagatagggttttgttatgttgtttaggttggttttgaatttttgagtttaagtaatttttttgttttggttttttaaagtgttaggattataggcgggagttattacgtttggtttttagggatgttattttgtatattttatttagtggtttgaattattttgtaataataaattataataattgggaaaaaaaatagagaaaaaatttgagatatttatttgttttcgatttttagttttatttttgttaaaaatggtttttaatgttttttagagattgtttgaatatttataagaaaatttatatatattttttgtttttttttgtttttggttttataaatagtattaaaatatagtttgagtatagtggtttacgtttataaatttagtattttgggaggttaaggtggacggattttttgaggttaggagtttgagattagtttggttaatatggtgaaaatttatttttattaaaaatgtaaaaattagtcgggtatggtggtgagt

SEQ ID NO: 2430 - DNA, 2475 bp, Artificial Sequence
  chemically treated genomic DNA (Homo sapiens)
gtttattattatgttcgattaatttttgtatttttagtagagatgggtttttattatgttggttaggttggttttaaatttttgattttaggggattcgtttattttggttttttaaagtgttgggtttataggcgtgagttattgtgtttagattatattttgatattatttataaaattaaaaataaaagaggatagagaatgtatgtggatttttttgtgggtgtttagataatttttagaaagtattagaagttatttttaataggagtagggttgagggtcgggagtaggtggatgttttaggttttttttttgtttttttttttagttattatgatttattattataaaatagtttaggttattgaataaaatatatagaatagtatttttggaggttaggcgtggtggttttcgtttgtaattttagtattttgggaggttaaggtaggaggattgtttgaatttaggagtttaagattagtttgggtaatatggtaaaattttgtttttatttttaaaaaattatttgggcgtggtggtgcgtgttcggagttttagttattcgcgaggttgaggtgggaggattgttggagtttagtaggttaagggttgtagtgagttagcgatggcgttattgtattttagtttggatgataaagcgagattttgtttttaaagaagaaaaagaaaaagaataatatttttatttttatttaaaaaagaaaatatcgtagagaaaatatagtttttgtaaattttttaattttagttattttttttttcgttaagaattggttttttgaatttgtaattttttttttttacgagtgtttatattttgatgttttattgagtattttttgaattttgatgaattttgtatttttgtttcgtgtgggttatttttatttttttggaatgtagaaaaataaacgttgtaggagggttttggtattgttatttttttcggattgtttttgtagttttagttttttggtaaaggggttgtttttcgtttgggtttttaggggattcgaggagaatagaggagttgggtcgtggagtatacgaagattagggtataagagtataagtgcgattggtttggtttttgtaggttcggggtttagagttagtaggttggagttaggcggttttttgggtttttttatagtcgtttttgataaagtttttttgtgcgtggggtgggggggttcggtcggttggagttagtttatatttggaggttagtataggtttggggtagtcggcgcggttgatagcggcgttatttcgagttatacgtcggttttggataaatacgttcgcgtttatttagtcgtttatttttcgtttataaggttgttttttttttcggatttaggttggggttattacgaatattttttttaggtatagggtagaacgggtcgttgattttaaggttgagtgaagtaaaagaagggtttggaaaagtatttattatttgttaggtattgtacgtattttaggtttattgttattttgggagtagagatatgtgggtaagaatgtgtacgttggagttaggagatttgagtttaaattttagttttagttgtgtgatttttagtaagttatttaatttttttgagtttttatttttttatttgtgaacgggtaataataatagttttttttttagagggttatgtaaatatttaaaaagttattgtagtaagttgtttggaggagtgttttatttatgtatttaatattatattcgataaagtgatattgaggtttttttgtgttaggaacgaggataaagatggtgaaaaatggggatttaggtttcggggagttgtgtttttgtttagcggagtaggaagggatggttttgaggggaatttatagagtaattggtttttttattttgttttgttgtcgggtgttttgggataaggttattatttagcggttatttagttaggatttagtttagtttggagataggtaggtatgggagtaggttaaggttttttatttttttttttgggatattacgatttagtattagtttggattttttttttttgtgttaaggtgtgggttttggggttggtgggtgtggtaggagaggtagtcgggttatttgacgttgtgttaggttttgtgagatttttagagatagttttaggtgtatattaggttgtttttttttggcgattttaatatatttattttattgtttttttggttttttgtttttttatttgtaaggggcggggttttaatagtattaggtattagttatttttttgattttttgtttttttgtttttaaaaggataagagcgttaggtgttagttgtgtcgaggagagattttgtgagagaggttgtgggaaaagtatagtgtttggtataaagggagaggtttgagtaaaagttaaggtggttttttggaggaggttattgtgtttttcg

SEQ ID NO: 2431 - DNA, 2456 bp, Artificial Sequence
  chemically treated genomic DNA (Homo sapiens)
tatttgtatataatgtaagatatggatataatatgtagtgttagtttgtatttttttatttgaatattttatataaattattatagataggataaaaaagatatatatttatttaaatgattttttagtttttattttaaaagtagaagatatgtatttaagtagtatatgttatagtgtttttttttttaaattatttgtttttagtttttagggattttgttttgttatgttttattttattgtttaagaaattaagattttgttagtaagagggttaatatgataaattatcgatgatttttagtatggagttaagaagtttgtttttttgattagatttttagttggaaagatatttatattttgtttagtttaatatttgttaagtgagaatataaaatttaaagatgttttgttatattttagatttgtattaatgtttataaatattaaagatttatatgatatatatttaggaaatatatgttattttgttattgtttgaatttttaggaaataatgtttttattggtgtttcgaattgttattattttttgttattttgaagataattaatacgtatttatttgtgtttaattttagttttagattatggtattggtgtgtgagaaataattggtttaattaattataagtaatatattaattttgtttttttttttttttttttgagacggagttttattttgttgtttaggttggagtgtagtggtatagttttagtttatcgcgatttttattttcggggtttaatttttttagatatttttgttttagttttttgagtagttgggattataggcgtttattattttatttagttaatttttgtatttttagtagagatagggttttattatgttggttaggttggtttttaatttttgatttcgtgatttgttcgttttagttttttaaagttttgggattataggcgtgagttatcgcgtttagtttaattttgtttttataggtattggtttttattttttagttattggtttttttttttttgtaatttaggtttgtaatataattttttagttttttaaggaaaatagaattaaagatttttaatagaagattttagtttattaatatagttaatagttattaaagttatttaggtatcggtttaataaaaaattaaagggttgtagtaagtgattagatttttattatttatttttgtgagatgggttttagagggtttcgtttttgttgatattaattatttttatcggtagtttgttaatatataagtagtttatagtagaatattgtagattgtagggtatttttaggttatatagttttaagtttttagaataggaattgaggtttggaagaaggttagtgtagcgtatttagcgaatggataaattgaattattattttataaggttgtaagtttatgtattaatggaattaatatggaattagagttaaattattgttttaaatatttaatgtatgttaagaaatttatttaattattaagtatcgaaattataatatttttaaatgaatttataaagtaaaatagttgaattaatgatttgtaaggattttttggtagataaattttattgggaattaatatattattgttattaagaaagtaggtttaataaatgaataaaagaaatttagttaggtagagaggtttttgtttgtaattttagtattttgggaggttgaggtaggaggatcgttcgcggttaggagtttgagataagtttgggtaatatagtaaagttttaaaaaaaattatttaggttcggtggtttatgtttttatttttaatattttgggaggttgaggtgggaagattatttgagtttaggattttgagtttgtagtgaattacgattagattattgaattcgagtttgggagtaggtcgagattttgagattttgttttaaaaagtaaaaaatagaaatgttagttttttttatttagagttaaaagtttttatttattatttaattttattatggtttttttttaaaagtttattggtatattatattaagttagtaagtttttttttttgtagtagggttttattttgttgttaaggttggaataagttttttttaataaagttaagatggtttatattatttatgtggatgagggtgttgaaggatatttattgtttttttttatggttttattttatgattaaattaagatgtataggaaataggtttgataatttatttttattaagaaagacgatttagtaatagtggtagagttgtttgtttgaatttaattttggttattttagtttgaaatataaatggtagtatggagagtaggttgttcgttttttggttggatattttttttatttttgagtttgaggtatagtaaattttttaaattatttagatgtaaatattttaatatttagattaggg

SEQ ID NO: 2432 - DNA, 2456 bp, Artificial Sequence
  chemically treated genomic DNA (Homo sapiens)
ttttggtttgagtattggaatatttatatttgaatgatttgggaaatttgttgtattttaaatttaagagtgaaagaaatgtttaattaaaaagcgggtagtttgttttttatgttgttatttgtattttaaattgagatgattaaggttaagtttaaataggtagttttattattgttgttgaatcgttttttttggtaaaggtaaattgttaaatttattttttgtgtattttggtttgattatgaagtgagattatgaaggaaggtagtaaatgttttttaatatttttatttatatgagtaatatggattattttagttttgttgaagagggtttgttttagttttggtaatagagtgagattttgttataaaaaagggggtttgttgatttgatatggtatgttagtgaatttttgggagggagttatgatgggattgggtagtaggtgaaggtttttagttttgagtaaaggaaattggtatttttgttttttattttttgagatagggttttagggtttcggtttgtttttaggttcgagtttagtggtttgatcgtagtttattgtagatttaaaattttgagtttaagtgatttttttattttagttttttagagtgttaggagtaaaggtataggttatcgagtttaggtgattttttttaaggttttgttgtgttgtttaggtttgttttaaatttttggtcgcgggcgatttttttgttttagttttttaaagtgttgggattatagataagaatttttttgtttggttgggttttttttatttatttgttggatttgtttttttggtagtagtggtgtattgatttttagtaggatttatttgttaggagatttttatagattattagtttagttgttttgttttgtgaatttatttgaaagtattataatttcggtatttagtaattagatggattttttgatatgtattagatatttaaggtagtaatttaattttggttttatgttgattttattagtatatgggtttgtagttttgtgaaatgatgatttagtttatttattcgttgagtgcgttgtattgatttttttttaagttttagtttttgttttaggaatttgaggttatgtagtttgaaaatgttttgtagtttgtagtgttttattgtgaattgtttgtgtgttggtaggttatcggtaagaatggttggtgttagtagggacggggttttttgagatttattttataaagatgagtggtgaaaatttgattatttgttgtagttttttagttttttattaagtcgatgtttgagtagttttaatagttattagttatgttagtagattgagattttttgttagaagtttttagttttgttttttttgggggattaagaaattatattgtaggtttgaattataggaaggggagaattaatggttagggaatgagagttaatatttgtaaaagtagagttgggttgggcgcggtggtttacgtttataattttaggattttgggaggttgaggcgggtagattacgaggttaggagttagagattagtttgattaatatggtgaaattttgtttttattaaaaatataaaaattagttgggtggggtggtgggcgtttgtaattttagttatttaggaggttgaggtaggagtatttgggagaattgaatttcgggggtggaggtcgcggtgagttgagattgtgttattgtattttagtttgggtaatagagtgagatttcgttttaaaaaaaaaaaaaaaaaagtagagttaatatattgtttatagttagttgaattagttgttttttatatattagtgttataatttaaagttgagattgaatatagataggtacgtattagttatttttaggatggtagagaatagtaataattcggagtattaatgggaatattgttttttgagagtttaaatagtaataaagtagtatgtgttttttaaatatgtattatgtgaatttttaatatttgtggatattaatataaatttagagtgtgatagaatatttttgaattttatatttttatttaataaatattggattaggtaaggtgtggatatttttttagttgaaaatttgattaaggaggtaggttttttggttttatgttaagaattatcgatgatttgttatattggtttttttgttggtaaaattttagttttttaggtagtggaatgaaatataataaaataaaatttttagaggttaggaatagatagtttgaaagagaagatattgtagtatgtgttgtttaagtatatattttttgtttttggaatggaaattaggaagttatttaaatagatatgtgttttttttattttatttgtagtaatttatgtgggatatttaaataggaaaatataggttagtattgtatattgtatttatgttttatattgtatataaatg

SEQ ID NO: 2433 - DNA, 2488 bp, Artificial Sequence
  chemically treated genomic DNA (Homo sapiens)
tagaagtttttttaggtgtaagcgttagggaaggatgttgagataagagggagttagtgaagattgaaggaagagtgttagatagaggggttagtagatgtagagttttagggtgattggtggaagaaaggttagtgtggttggagtttggagggtgatagggagaggggtagaatttgaggttagagttgtgatttggggttgatggaataaggttttatgggttaaggtaaggaatttggtttttattgttagtaagttaaagatttgttagaatgttgagagttttgatttgtgtttgtagagatggatgagattgggtttagtgtaggtttaggatcgggggatgtgtggtttgtgatagggtggtagagagggtatttaggagttgtggaaagattttggatatattttggaggtttttaattatttttatattttgttttttatagtagagtttttttgttagtgatttatgtttggtttttttatattgtggtttgagtattagagagtaatattgtaaagtttaattttttatagtttattgtaggaatgattttatttttgtttttaaggttagtatggtggagggattttatggtatgagtttttatgatgatattagatattggatattaaggagtgcgatgtttatttttggtttttagtgatttttgggtatagtttggatataaaagttagaatttgtttgatggttttttttttaagaaaaaaaaaaaaaaaagtaagtaagtttagggaagtagtttttttttttttggttaatatgaagttaagtgttttattattgtttagtttttttttaaatataaaaatattaattttaaaaagatattgtaaaaagtttaagaaatatgtatattgaatttgatttatgtatattattgtagttaatatttttagggaaatttttaaatgtttgttataggagtttgttagaaaaagaaagatttatttttggaaaagtatgttttttggtgtttattgagtttggaaattatggaaagttattgttagaagggaggtagttgttttagaggcggagtggaagttaggattggagaaggttgttttattgtgggttttagcgtgttttttgttgttagttggttaagagtttcgtagtagttattttatattttattagttttattatcgtaattatttttgttaaaacgaaatataaaagaatggtatgtttatgaatattttttatagaaaatatattcgtttgattattttttataaaatgtgaagttaatttttttttttatttttaattatgaaagtgaagttcggaagttttaatttttttgtaatggaaagatttgagtttgtggttttgtttttattttttattttttttttgttaagttaggaatatgatatttatataatatttttcgggtagtggttttgtttaggaattgtatggttgtttgattgtagagggagggtaaaggttattattaattattcgtgttattgttgggttatgaaatttttaggggataagtataagttttataaaattttattttgaaatttagattagatttggttttatgttttgaggatttttttttttttttaagttttatgttgtttttttgtttttttttatttttttttgggaagagttttttattattataattattatttgaaaaaaaattttaagtaagaaagtagtgtattaattggaaagtaataatttagaaatgttattttttaatagtaagtttttatagtatttttgggtagaaaggtatttttatagaaatagttatttttttatttttttttttatgagtttataaaatagtatttttatattaatttttgttatatttaatatataaaattagtatttttttaagaatttagaagtttaagatatattaaaaatatttttgataataatttttatttttagaggtagcgtcgttaataagttttatgtatttatttttagatttaataaaaatatgtttatttatatttatatatggtatttttgggtgggtatatgttagaagatttttttaaattgtgtttaattatatataatttaaaatttttaggtatatagtttcgtggtattagtatatttatattgttatgtaatttttattattattatttatttgtagaatttttttttttttttttttaagacggagtttcgttttgttatttaggttggagtatagtggagtgattttagtttattgtaatttttattttttagatttaagtaatttttttgttttagtttttcgagtagttgggattataggtatgcgttatcgtgtttgattaatttttgtatttttagtagagatgaggttttattatgttggttaggttgattttaaatttttgattttaagtgatttattcgtttcggttttttaaagtgttgggattataggtgtgagttattgtttttagtttatttata

SEQ ID NO: 2434 - DNA, 2488 bp, Artificial Sequence
  chemically treated genomic DNA (Homo sapiens)
tgtagataggttgggagtagtggtttatatttgtaattttagtattttgggaggtcgaagcgggtagattatttgaggttaggagtttgagattagtttggttaatatggtgaaattttatttttattaaaaatataaaaattagttaggtacggtgacgtatgtttgtaattttagttattcgggaggttgaggtaggagaattgtttgaatttgggagatggaggttgtagtgagttgagattattttattgtattttagtttgggtgatagagcgagatttcgttttaaaaaaaaaaaaaaaaaaattttgtagatagatggtgataataaaagttgtataataatgtgaatatattaatgttacgaaattgtatatttaaaaattttaggttatgtataattaaatataatttaaaaaaattttttgatatatatttatttagagatattatgtgtaaatgtgggtaaatatatttttgttaagtttggaagtaaatatatagaatttattaacggcgttatttttgagaatgagagttattgttaaaaatatttttagtgtattttaaatttttaaatttttaaaagaatattgattttatgtattagatataataaaaattgatataaaaatgttattttatggatttatgagaaaaaagataggaaaataattgtttttataaaaatatttttttatttaggaatattataaaagtttattattaaaaaataatatttttaaattgttattttttagttaatatattgtttttttgtttggaatttttttttaagtagtaattatgataataagagattttttttaagagaaaatgaaggggggtaaagggataatatgaaatttaaaaaaaaaaaaaaatttttagagtataaggttagatttggtttggattttaaaatgaaattttatagaatttatatttattttttgaaggttttatgatttaataatgatacgaatggttaataatagtttttgttttttttttgtagttaaatagttatgtaatttttgaatagagttattgttcgggggatattatgtgagtattatgtttttgatttagtaaaggagaagtggaaaatggaaataaggttataaatttagatttttttattataaagaaattgaggttttcgggttttatttttatgattaaaaatagaaaaagaaattgattttatattttatggaaaatagttaaacgaatatattttttgtgaagaatatttatagatatgttatttttttgtgtttcgttttgatagaaataattgcgatggtggagttagtgaggtataaagtggttgttgcgagatttttgattagttagtagtaagaggtacgttggagtttatagtaggataattttttttagttttgatttttatttcgtttttggagtagttgttttttttttgataatgattttttataatttttaagtttaatgaatattaggaaatatatttttttaaaaataaatttttttttttttgataagtttttatgatagatatttagaaatttttttgaaaatattagttataatagtatatataaattaaatttaatatatatgttttttgggttttttatagtatttttttaaaattaatgtttttgtatttgggggaaaattgggtaatagtgaaatatttggttttatgttgattaggaaaaaggagattgtttttttgaatttgtttgttttttttttttttttttttaaaaaaaaaattattaaataagttttggtttttgtgtttagattgtgtttaaggattattaaaaattaggggtgagtatcgtattttttgatgtttaatgtttgatgttattatagaaatttatgttatggaatttttttattatgttggttttggaggtaagaatggggttatttttgtagtgaattgtgggaggttgaattttataatattattttttaatgtttaagttatagtatgaaagaattaaatatgagttattgatagaaaagttttattgtggaaggtagaatatgagagtggttgagggtttttaaagtgtatttagaatttttttatagtttttaaatgttttttttgttattttgttataagttatatatttttcgattttgagtttatattaaatttagttttatttatttttgtaaatataaattagagtttttaatattttaataggtttttggtttattaataataaaagttaaattttttattttggtttatgaggttttgttttattaattttaggttatagttttggttttaggttttgtttttttttttgttattttttaagttttagttatattggttttttttttattagttattttagagttttgtatttgttgatttttttgtttggtattttttttttagtttttattggtttttttttattttagtatttttttttagcgtttgtatttaaggggattttta

SEQ ID NO: 2435 - DNA, 2471 bp, Artificial Sequence
  chemically treated genomic DNA (Homo sapiens)
tgtaaatgaagttatttgttaaattaggggttaggcgtttagtttttatttatttgggttgtgtttttggttaatggttgaggtgattttttaggtatttatagtggagtatgtttttattttattgaatagttttgaaaattagagaagttgaggaaattatgttaaaattttttgagaaattttttttttgtatttggtaaaggtgaattagaatttgttatgtgagtgaggaggatattttttaatgaggtaagagttttataatttttatagttgtttagaaagtttttttgcgtgttttgagagagattgaaataaagggaagtcgaggatagtttggttttgttttttgaaattatttattaaagtaagattattttaatttaatatgagaagtatatgtgtaattgtgtgagtgtgtgtttgtgtgtgggggtatatattgaaagaaaataaataaggatgaaggaaagaggaaaatagaattgttttatggaatatattgtgtattttaattaatgttttttatatttttattattttgtttgtaattttatttattattaatgaaattgttaatttgggaataacgttttaggtgttaggcgttatatttaataagaatttaaagagtgaaaggataaatggagggttattagtgtttaagatggttttttgttggttgttttggtgaagaatagtaatataaagggtaagagaaggattaatggaaattattgaataaagtgaggttttcgagttatttttagattgttttgtgcgttgttgtatttgtatcgtagcgtggataatcgtggtaggttatcgttttagttttgttgcgagatagattttaatttattattttattttttagtatgagttagttaagggaaaaggatatttttagaattagagtgttttaagttttttgaaaggttattgttatttttttttttttttggtagtttttagtaaagtagaaatatttggaagttaattttgtttttttaatattgttgtgagttgattttatttgtttgagataaaattttttttttgatttagtagcgtttacggttgagttggttacgagatagaggattttgtgtttttaattatttttggatgaaaagttttgtaggcgagtggagattcggggtaaagacggttaggtggagtcgttattagcgagtagtggattgtagaaatggagagataattaaattaaaagtgttaggtgtaggtattgaaaaataattttgggtgttaattatgtagtttagtgttagtagaggaaatgttatcggtttgtttattacgtggtagttgaaaagtttgggaaagatatatttatggtttttagagaatttgttagggttgtttatttgggattttggtgaagtagagattatttattagttggagtgtgtatattttttttattttttatttagttaagttgggtatttggtgggtatttggtgtgtgggggattaattttgatttatatgaaaatttgaacgttggagtgtgttatttttaatttaggtatttaggagtattttttttttttttgatttgaaatgaatttgattttaggggttagaggtagtgtgtttttgttatgaagatggaaggataaatggtggcgtgtttagataatggaatagagtatagtaattaaaaggaggggattttagtagtataatagtagtatgattgtgttataagtatagttgaatgaatgaaagaagttagattttaagatttattttgtatgaatttattttggtgacgttttagaataggttaaattaagttatggaggtggatgttaggtttgtggttgtattagggaatttttggggtaatggggtaatttttttgggttgaagggtatatgaatgtaaatattttttaaaatttgttgaatgtacgtttaaaatttgtgtatatttttgtatggaaattattttttaatgaaaggaatgtgaaaagatttttttatgttttgtttttttatggattttgaattttggttagttagtttattttaaaaggtgataaggattaatttgtttgtggttttttttgattatttagtttttttttgtttatagatttgtttagaaaaggtttttattttaaggaagtagaatggaaaatagggtggtttattatagtttttgggttaaatttgtttaattatatttttgtaagtaaagttgtattgggatatagttatatggttagttatttatgtgttttttgtggttgtttttatgttatagtgatagtcgaggagtttttatagagattgatttattatttaaagtgtttattttttatttttttatagaaaaggttttttggtttttggtttaaatatttatttttttttggaatttttttttttagatttgtgtgggtggaggttttggatggagagtgttttttaggaacga

SEQ ID NO: 2436 - DNA, 2471 bp, Artificial Sequence
  chemically treated genomic DNA (Homo sapiens)
tcgtttttggagagtattttttatttaaaatttttatttatatagatttgaagggagaagttttaaaaagaaatgaatgtttagattaagggttaggaaattttttttgtaaagggatagagagtaaatattttaggtggtggattagtttttgtaaaagtttttcggttgttattgtggtatgaaagtagttatagaagatatataaatgattggttatgtggttgtgttttaatataattttatttataaaaatgtgattgagtagatttggtttaaaggttgtagtgggttattttgttttttattttgtttttttggaatgaaagttttttttgaataggtttgtgaataggaaaaggttgggtggttaggaaggattataaatagattaatttttattattttttgaaatgaattgattgattagggtttaaaatttatggaaggataaaatatgggaagatttttttatattttttttattgagggataatttttatgtaagaatatgtatagattttaagcgtgtatttaatagattttgaaaaatgtttatatttatgtgttttttagtttaagaaagttattttattattttaaaagttttttgatgtagttatagatttgatatttatttttatagtttagtttaatttgttttagaacgttattaaaataaatttatgtagaatgggttttgaggtttggttttttttatttatttaattgtgtttgtaatatagttatgttgttattatgttattggggttttttttttttgattattgtgttttattttattgtttgaatacgttattatttatttttttatttttatgatagggatatattatttttgatttttaaaattaaatttattttaaattagaaagagaagaaatatttttaagtgtttaaattggaagtgatatattttaacgtttaaatttttatgtggattaaagttaattttttatatattaagtatttattaaatgtttaatttggttgagtggaaaatgggggaaatgtatatattttaattaataaataatttttgttttattagaattttaagtaggtagttttggtaaattttttagaaattatgaatgtgttttttttaagttttttaattgttacgtgatggataggtcggtggtattttttttgttaatattgaattgtataattaatatttagggttattttttaatgtttgtatttggtatttttaatttaattatttttttatttttataatttattgttcgttggtgacggttttatttggtcgtttttgtttcgaatttttattcgtttgtaggattttttatttagaaataattaggaatatagggttttttgtttcgtggttaatttagtcgtgaacgttattggattaagagggaagttttattttagataaatggagttagtttatagtagtgttaaagggatagggttgatttttaagtgtttttgttttgttgggagttattaaaaaaaaaaaaaagtggtaatgattttttagaaaatttggaatattttggttttgggaatattttttttttttggttggtttatgttggggaatgaaataatgaattggaatttgtttcgtagtagggttagaacgatagtttgttacgattatttacgttacggtatagatatagtagcgtataaggtaatttggagatgattcggaagttttattttgtttaatagtttttattaattttttttttattttttatgttattgttttttattaggataattagtaggaagttattttgaatattgatagttttttatttgtttttttattttttgggtttttattgaatgtggcgtttagtatttaaaacgttatttttaagttggtagttttattaataataaataaaattataaataaaataataaaagtataggaagtattaattggggtatataatgtattttatgaaatagttttgttttttttttttttttatttttatttatttttttttagtgtgtatttttatatataaatatatatttatatagttgtatatatattttttatattgggttaggatgattttattttgataagtagttttaaagaataaagttaggttgttttcgatttttttttattttagttttttttaagatacgtaagagaattttttgagtagttgtgggaattgtggagtttttgttttattaaaaaatgttttttttatttatatggtaaattttagtttatttttattaagtgtaggagagaaattttttaggaaattttgatatggtttttttagtttttttgatttttaaggttgtttaataaagtagaaatatattttattatggatgtttgggaggttattttagttattggttagaggtatagtttaggtgagtgagggttgggcgtttggtttttggtttgatagatggttttatttgta

SEQ ID NO: 2437 - DNA, 2495 bp, Artificial Sequence
  chemically treated genomic DNA (Homo sapiens)
tttttttacgtttttttttttttttgtcgtatgttttatatttttagtgtgtgtaaatattagagtaaagttgtaggttgaaaattgtagttttaattttgtaagaattttttggtgtttcgaaagaggtagagggtatttagttttatttttttttagaggtcgtgttgttttaagtattagaggttttgtgttttgtggaggggagattatagatttcgattttaaaatggaagggtagaaataagattgtgagtcgggatttgggaggggacgtttaatttgaagtgagttatgtttgatgtttgaagttttttggggtttaagattaatgttgttgttatttttttttttgtttttttagggggtttttaggtaatggtgtgttggagttagtttgttttggtttttaagggttgattgttaaatttttaggaattttgtaaattgtttgttaaatatagttattattaaaaattaaattatagaaatttatagtgtaataaattatattaaaataaagttaataaatatttgaaatttattattttttatttttttttattattttttatgtttttgagggtttttttttaaatgtttgggtttttatatagtagatataagaaataatggttagttattgcgtatttttttttaattatatgtttagtgagattatattgtttatttgatattgattatgatgatagcgtttatattttagaaatcggtaaatgttatagatttgggtttttttttcgtaaatgttgattaggtatttataggtatacgttattttaaggtaattattgttaattagaggaaatagaaagaagtttattaagtttgtttttttgaatagttatggtagttttaggttaggtatgtagtatgtttgagggtaaggttgtgttttgtgggaaatttttattattgaaagggtttttagttataaggattttttttggtttgatagttagtttggaggagtttggggttattattttatataagttttttgttataattgtattttggtttattttgatatttggtgtttattttaagttgaggttttagggaagggtagttggaggttagcggcggtttttagtgatagatgggtagagcgtttgttttggtattatttagggtgtgggtagtagtggttcgagtaggtattattgatttgtaggtagggaaagtttgttaggttagttatgcgtttggtattaggaggagaggattagagttagtagtggttataatgagggtaaaatttttatagtggaatattgttatttaaaagggatgggtggttgtagggttttttggatggaagtataaatgagaaaatatatacgtttttgtaaatggatttgtttgggaagataaggttatagtatatatagttttttagtaatttaaattttatgtgttatgatgtagatatttataggataagtaagaataataaaatttttagttttgttttttagtataagataattgaagatatttgtggtgaaaagtatttttgttattaggaagatagataatagttagtaattaatgtttttttgttgtataagttaaaaagtttattaaatttattttttttttagtgtatatataagaatatatttggatatttttgtaaatttatatttaagaatagtgttttttaaatcggttatttgaaagaaatttaaaggaaaaagtagatatttttataatatgtttttgttttgttgtagtttgtaattgtgaatttttgtaaattgttataattttggatgaatgatgggaatataataggttgtagaattggagaacgttaaatttttgtttttaatggtaaaatatgttttttttatttttattagaatgtgtgatttatgttatttgaaattaaattttaaatataatgagttattagtgtaatagtttattattaatagcggttttataaataatatatttttattatatatatgtagttcgttgtgaagttagtaaaaggtattttaggttatcgaagttttgttgcgttagcgcggttgtagattagaaggatatttttatgtgaattaagatggatgttaattttttttgtcgagagttaggttggtcgtttttttttgtatatatggtagatggattggttaattagcgtttgttgagttttgggtttgaaattatagagaagttagataattgcggttatgtagtttttgtttacgagtgtaaataagataaataattatttgttatttgggaaaaaaattaaaatgtttattttggatttttattaaagtgttaatggttttataaaatagttgtgtaaatttaggtttttttagtaagtattattttagggggtttgtaaagaaaggaatatatatgaaaaaattaatttttaaaaattttttttatattttagtattgagaagaaaatagaggaggttttatttttattttgtaaatacgtt

SEQ ID NO: 2438 - DNA, 2495 bp, Artificial Sequence
  chemically treated genomic DNA (Homo sapiens)
aacgtgtttgtaaaataaaagtgagattttttttattttttttttaatattgaaatatgaggggaatttttaaaaattaatttttttatgtatatttttttttttataggttttttaaaatgatatttgttgaaaaagtttggatttatatagttgttttataaagttattgatattttaataaaagtttaaaataaatattttaattttttttttaaataataagtgattgtttgttttgtttgtattcgtgaataaaggttgtatagtcgtagttgtttagtttttttgtaattttaggtttaagatttagtagacgttgattaattaatttatttattatatgtgtagaaagagacggttagtttgattttcggtagggaaaattggtatttattttggtttatatggagatgtttttttaatttatagtcgcgttggcgtaataaaatttcgatggtttgaaatattttttgttggttttatagcgagttgtatgtgtatgataagaatgtattatttataagatcgttgttagtaatgagttattatattaatggtttattgtgtttggaatttgattttaaatggtatggattatatattttgatgaaaatgagaaaaatatgttttgttattaggaataaagatttaacgttttttaattttataatttgttatatttttattatttatttagggttgtaataatttataaaagtttataattatagattataatagagtaaggatatattgtggaagtgtttgtttttttttttgagttttttttaaataatcgatttgagaaatattatttttaaatatgaatttgtaggagtatttaaatgtatttttgtgtatgtattgaaaaaaaaatggatttaatggattttttaatttgtataatagaaaggtattgattgttggttgttatttatttttttggtgatagaagtattttttattataagtgtttttaattattttatattggagaataaaattgaaggttttgttgtttttgtttgttttgtaaatatttatattatgatatataaggtttagattgttagaaaattatgtgtattgtggttttgtttttttaaataggtttatttatagaaacgtgtgtatttttttatttatgtttttatttaaaaagttttatagttatttattttttttgggtgataatattttattgtgagggttttgtttttattgtgattattgttggttttgattttttttttttgatgttaagcgtatggttgatttggtaggttttttttgtttgtaggttagtggtgtttattcggattattgttgtttatattttggatgatgttaaagtagacgttttgtttatttgttattaggagtcgtcgttggtttttaattatttttttttaaaattttagtttggagtaaatattagatgttaaggtaagttagggtatagttatgataaggaatttgtatgaagtgatggttttaaatttttttaaattagttattaagttaaagaaagtttttgtaattaaaaatttttttagtagtaagggttttttatagggtatagttttgtttttaggtatgttgtatgtttggtttggaattgttatggttgtttagaaagataaatttgatggatttttttttgttttttttggttgatagtggttgttttaaagtaacgtgtgtttgtaaatgtttaattagtatttgcgggggaaaagtttagatttgtagtatttgtcgatttttgaggtgtaagcgttgttattatggttaatgttaagtgaatagtgtgattttattaaatatgtagttgggagggaatgcgtagtagttagttattattttttatatttattgtatagagatttagatatttaaaaaaaaatttttaagaatatggagaatagtaaaaaaaaatggaaggtgatgaattttaagtatttattaattttgttttaatataatttattatattgtaggtttttataatttaatttttaataatagttgtgtttaataagtagtttgtagagtttttgaggatttaataattagtttttgagagttagagtaagttggttttagtatattattgtttaaaagttttttagggaggtaggaaaaagggtagtaatagtattgattttgaattttaaaaggttttagatattagatatggtttattttagattagacgtttttttttagatttcggtttatagttttgtttttgtttttttattttaagatcgaggtttgtggttttttttttatagaatataaagtttttgatgtttgaggtagtacggtttttggaaggagatggggttggatgttttttgtttttttcgagatattaaaggatttttgtagggttggaattgtagtttttagtttatagttttgttttgatgtttatatatattgaaagtgtgaaatatacggtaagagagagaaagaacgtgggggaa

SEQ ID NO: 2439 - DNA, 2364 bp, Artificial Sequence
  chemically treated genomic DNA (Homo sapiens)
tatttggaaaataaatgttaaagagaagattataatggtttagaaggttggaaattgagtagttagtaagtgtgagagagggattatgagatataggatttagattgtgttttattatttatttattgggtgtttttagttaagttatttttttttgtattttttatatttttatttgtaaaaatgagttaggtattgtattttttaagtgtttttttagggttttttgaaattttattggttttttttttttggtttttgtgtttgtattttagtttttgtttttggtattgaggattttatttatgagaaggttttttaattagttaggttttgtttagttttagagtatttagaatgtttttgaaattatgattttaggttatttaatttgtatttagaaatgttttggtttatttgattttatttttttatttaatattgagagataatgtaatagagaagaaagattataggtttgataaatgatttttaatttagatttttgttagtattagtttaatttttttgaattatattattattatttaaaagtgtaataatgggttgggcgcggtggtttatgtttgtaattttagtattttgggaggttaaggaggaaggattacgaggttaagagattgagatcgttttggttaacgtggtgaaatttcgtttttattaaaaatataaaaattagttgggtatggtggcgtgtgttagtaattttagttatttgggaggttgaggtaggagaatcgtttgaatttaggaggcggaggttgtagtgagtagagattttattattgtattttagtttgggcgatagagtgagattttattttaaaaaaaaaaaagtgtaataatgataatagatttagtatatagagaattatttagaagaggaaagaaaaaattgaggtttaagaggtgaagttatttgtttaggtttaggtttatattcgaatttagattttttgtgttttattttagagttttttttttttttagagttaaggttagttgtgtttatatggatatggtagtaaagattggaattgaaagtatgttagtttttttaatattttcgttaatagtttttttaatttttttgtggtacgtgttaataatatagttcgtatttgttttagaaataagcgttttataagtatttttgtttgatttgttttggttggtataggatttagatgtttttagaatagtataatagattttttaaattagtttatttttatttcgagttatttatagttttgatttgttgttggttggggtttattttcgagttttttttatttattatgtgaattacgtttagatttttgttagtttgtttttttttttttgagtagaagtaatatttattgtgtgtatattgtgtgttaggtattgtgataggtattttaaatagattattttttttaatttttataatttattaagttattaatagttttaaaggggaaagttgaggtttagtgaagtgaatgaatttattgaagttatatatttagtttttgaaagagttagagtttgaattgagttttgattttattgattaagttgtaaggtaagttgttttttgagtattatattgtttttttgttttttggttacggtttttttaggagggtagagtgtttgggagtatttaagaataggcgtttggtgttttgagtgtaataggaatgttttttatgtttttagtgtatttttttgagagtttttgtattttgtgttttaaattaatttttttagaatttagatatagagtttagagatttaagtattgagttagaagttatgtttttatcgtgattatggaatagagtttttagtgaaaagtatatttgttttttttaaagttgaatagagagagtattttaagtaataatttttatttgtatgattaattttaaagtatagggaaggaaagggaaagggtttgtattttttaatcgtgataagttttttttagggatttggtaggagtggagatatgtatatataaaagattttaggattaagattgttttgataggtttttaaatttgtatttaatagtttgtaaagtagtttatttttaagaaatcgtattgtgaagaaattgaaggaatttgtttttatgtgatagagttaggggttagagtttaaatttttagttttgataatgttagtgaggttaagttttttttgagagggttttttttttggcgttgggcgtatttagtttttatttgtaaaaggagtaggtttttagtttttgttttttttttagtttttttttgtttttttgtttttttttttatttatttatatttaattgttagggatttattttaa

SEQ ID NO: 2440 - DNA, 2364 bp, Artificial Sequence
  chemically treated genomic DNA (Homo sapiens)
ttgaaataagtttttagtaattgagtatgaatgagtgaggagggggataagagggtagaggaaggttgagaaaaagatagagattaagggtttgttttttttgtaagtggagattgggtacgtttaacgttagagagaaaatttttttagggaagatttagttttattggtattattaagattaaagatttggattttagtttttggttttgttatataaaggtagatttttttagtttttttatagtacggttttttgaaggtaaattgttttgtaaattgttgagtatagatttgagaatttattagaataattttagttttaaaattttttgtgtgtgtatgtttttatttttgttaggtttttggaggagatttattacggttgaggagtatagattttttttttttttttttttgtattttggagttggttatataagtaggggttattgtttgaaatattttttttatttaattttgaaaaggataaatatattttttattagggattttgttttatgattacgatggaaatatagtttttaatttagtgtttggatttttgggttttatatttgagttttagagaagttggtttgaggtatagagtgtagaaatttttaggaaaatatattgaaggtatggaagatatttttattatatttagggtattaaacgtttatttttgggtatttttaaatattttatttttttggaagggtcgtggttagaggatagggaggtagtatgatatttaggaaatagtttattttatagtttagttaatggggttaggatttagtttaaattttagtttttttagagattagatatgtggttttagtaaatttatttattttattgagttttagtttttttttttggagttattaatagtttaatgagttataaagattaagggagataatttatttaaagtatttgttataatatttggtatatagtatgtatataataaatgttatttttatttaagagggaaaggataaattagtaaaagtttgaacgtgatttatatgataggtagggaagattcggggatgaattttagttagtagtagattagagttgtgagtggttcggaatgggaataggttgatttggagagtttgttgtgttattttaagagtatttggattttgtattagttaaagtaaattaaataggagtgtttatggagcgtttgtttttaaaataagtacgggttgtgttattgatacgtgttataggggaattgagagggttgttggcggagatgttaaaaaagttgatatgtttttagttttaatttttgttattatatttatatgggtataattgattttggttttagaggggaaaaaaattttggaatgagatataagagatttggattcgggtgtgaatttgaatttgaataggtgattttattttttgggttttagttttttttttttttttttaaataattttttgtgtgttgaatttattattattattgtatttttttttttttgagatggggttttattttgtcgtttaggttggagtgtagtggtgggatttttgtttattgtaattttcgttttttgggtttaagcgatttttttgttttagttttttaagtagttaggattattggtatacgttattatgtttaattaatttttgtatttttagtagagacggggttttattacgttggttaggacggttttaattttttgatttcgtgattttttttttttggttttttaaagtgttgggattataggtatgagttatcgcgtttagtttattattgtatttttaaatgatggtgatatggtttagaaagattaagttagtattggtaggaatttgaattgggggttatttgttaagtttgtagttttttttttttgttgtattattttttaatgttaaatgagggagtaggattaggtgaattaaggtatttttagatgtaaattgaatggtttgaaattatagttttaggagtattttaaatattttagggttagataaagtttggttggttaaaaagtttttttataaatgaaatttttagtattaaaggtaaaagttagagtataaatataagagttagaaaaaaggggttaatgaaattttagaaagttttgaagaggtatttggagaatataatgtttaatttatttttatagatggggatatggaggatgtaaagagaaatagtttgattgggaatatttaatgagtgggtgatagagtataatttgggttttatgttttatggttttttttttatatttgttagttatttagtttttaattttttaggttattatgattttttttttgatatttattttttaaatg

SEQ ID NO: 2441 - DNA, 2472 bp, Artificial Sequence
  chemically treated genomic DNA (Homo sapiens)
aggagtagaaaaataattattagttagatggaagaaattattagtttataaatgtagtgtgtttagtaataaaattttttaaaatgtggatgatataggtgtaatagaatataaagaggtttttagtggaaagtttgggaagttttgtagagatgtagtggattttgaaggttaagaatatggagttagataaaattaaattttaatttttattttgtgattttgggtaagtaatttaattttttttggatttagattttttatttgtaaagtggagagaatgatgtagggaagggaggggagtgggttatcgtgtagatttatggaaataaaggatagatagtggatacggttagtttggttgttattattatttgttagtagttttagttataataagttagaggtaagattaatatttttttttttttttttttaatttttttgttttttatattgttataattatttttattttttttatttttgtttatttaatggcggttttttattagttagttatataaaagtatttttattgtagttatttatattttagtatgaatgagttagtatttttttgtagtaatttttattggaagttagtgggaagtgaaaggttttggttattttttataatatatgatttaaagtttgtttgtaatagagagtttttgtagagtttttaaaagaaaaggatttgttttttgaagaatttttgagattatagattttatggtgtttagttttttttggttgttatgtgttatttttaaagatagttatgaatatttgttttggttgatttgagttatttgaatgtttaaaatttattttaataataaaagttttttggagggattttaattaatttttttaaattgttttttttaaatttttggaattaatataatttgtttttttgttattaaaaaaaaaaaataaaattttaggatatttcgtaaaattttttttaagttatttggtagttaatattttgttaaggaggtatggtggttaatttttttttgaatgggattggtttttatatagttatttttttcggtttatgatttttttttttatttgttgtttacggacgtcgaaaataatttgttttttggtaagtttgggatgagattttttatgatttaattagatttataatgaagtttttttagtttttaggagaaaatattttgaattgtagggttggttaagggtagggttttggtgaagaggaggagttttttgtttgagtagtatatttggagttaggagagttgtaatagggttatgttatttatttagtggggtgtttttattgtggttgagatttttggtagtgttttaaggtgtgtattatgtaagttgtgtttttttattttttgtagtttagattaaaggttttaaagataataggtaggatatcgtatttgtaaatattagttgtttggtttaggaagagatagttttttatatatatatatatatatatatatatatatatatatatagagagagagagagagagagagagagagagagagagagaaggaggaggagagagattaggatagatttgttttggttgaaattaggatttttttgatggttttaaattgatgttaaattagaggataattttagatatgataataagttgggggtggtaaagtaggtgggtaattagggagtatttgagtaggtgatagagaattggataatgaagaagtaggtaaggtgatgggaagtagttggggtaagagggagtagttaggtaataaggtaaagtagttggagaatgggagagtaatttgatgatgaaggttaggtataaagtgggagttattgtagtggggtaatagaagatagttttagatttggggtagaggttattttgatttgttttagttgtttttattttgttatttttttaggttttgttgttgagaagtaaatttagtttaagtttgtattagttagttggaatttgggttgttgtaaattgttgtggtgaagttttttgggagtgaggttgaggttgtagtagtagtaggtaggtgtggtgagtttatttttttgagggaggggttttttttttttttagttttttaaaggatgggtgaggttgtttgttagaggttttggtataatttatatttgagtttttaatttttttattattatttttattttttttttaattagatttttattggataatttaagtattaggtattgtgttaaaaatttttttatgtattaatttattgtatttttttaataattttataaaataggaatcgttagtaattttattttataggtggataaattgaggtttaaaaagtttaataatttgtttatataagaggcgtagttaggattgtttgattttagaatttgttttttaagttttatgttatagttatggttatttttatatggagtattttttttttaaaagtt

SEQ ID NO: 2442 - DNA, 2472 bp, Artificial Sequence
  chemically treated genomic DNA (Homo sapiens)
agtttttgaaggagaaatgttttatgtagaagtaattatgattgtggtataaggtttagaggatagattttgaagttagatagttttggttacgttttttatgtgggtaagttgttagattttttaagttttagtttatttatttgtaagatggggttattaacggtttttattttatagagttgttgagaggatgtaatgagttgatgtatagaaagatttttagtataatgtttggtgtttaagttatttaataaaaatttggttgagagaaggatgaaggtgatgatggggaaattgggggtttagatgtgagttgtgttaggatttttggtaggtaattttatttattttttgaggggttgagagaagagagagttttttttttaaggaaataaatttattatatttatttgttattgttataattttagttttatttttagggagttttattataatagtttataatagtttagattttagttaattggtatagatttaggttgagtttattttttagtagtaagatttaaggaagtggtaaaatgaaggtaattggaataggttagggtagtttttattttaggtttggggttgttttttgttgttttattgtagtaatttttattttgtgtttggtttttattattaagttatttttttattttttagttattttgttttattgtttggttatttttttttgttttagttattttttattattttatttgtttttttattatttaattttttgttatttatttagatgttttttgattatttatttattttgttatttttagtttgttattatatttggagttattttttaatttaatattagtttggaattattaagggaattttggttttagttagggtaagtttgttttggtttttttttttttttttttttttttttttttttttttttttttttttttttttttatatatatatatatatatatatatatatatatatatgtaggaaattgtttttttttggattaagtagttggtatttatagatgcgatgttttgtttattatttttgaggtttttagtttgggttgtagggagtgggaaggtatagtttatatggtatatattttggagtattgttaggagttttagttataatgggggtattttattgggtgggtggtatggttttgttgtagtttttttggttttaaatgtgttgtttaggtagggggttttttttttttattagggttttgtttttaattagttttgtagtttaggatgtttttttttgaaagttgggagagttttattatggatttgattaaattataaggaattttattttaagtttgttagaaaataagttattttcggcgttcgtgggtagtaaatggagaagaaagttatgagtcggaaggaatgattatatagaaattaattttatttaggggaaggttggttattatgtttttttgataaaatgttagttgttaagtaatttgggggaagttttgcgaagtattttagggttttgttttttttttttaataataagggaatagattgtattaattttaaaagtttagagaaagtaatttaaagaagttaattagggtttttttaaagagtttttgttattaagatgggttttagatatttaaatggtttaagttaattaaaatagatatttatggttgtttttagagatgatatatggtaattaggaaaagttgggtattatgaggtttatggttttagaagttttttagggggtaggttttttttttttagagattttgtaagggttttttattgtaagtaggttttaagttatatattatgaggggtggttaaagttttttattttttattggtttttaatgaaaattgttgtaaaaaagtgttgatttatttatattaaagtgtaaatgattgtaataagaatatttttatgtgattgattgatagaaggtcgttattgagtaaatagagatagagaaaatgggagtagttatggtaatgtggggagtagaagaattagaaagaaaaaggaagagatgttaattttgtttttggtttattgtaattgaggttattggtagatgatagtaatagttaaattgatcgtgtttattgtttattttttatttttatgaatttgtacggtgatttattttttttttttttttgtattattttttttattttatagatgaggaatttgagtttaaaagaggttaagttatttgtttaaggttataaaatagagattaaaatttagttttgtttgattttatatttttaatttttaaggtttattgtatttttgtagagttttttaagttttttattgaaggtttttttatattttattgtatttatgttatttatattttgaaagattttattattgagtatattgtatttgtgaattaataattttttttatttggttgatgattatttttttattttt

SEQ ID NO: 2443 - DNA, 2397 bp, Artificial Sequence
  chemically treated genomic DNA (Homo sapiens)
tatttatttatttatttatttatttatttaaattttgtagagtgttttttttttggcggggtgggtgttaaatattggtaagttattagatgattttaaagtttatgttttttatttggaaaacggaaattataaatttaaaggaatgatgttatatagattgaatgagatttacgtgtgaaaaggttagtaaataagagtcggaacgtaagtttattggtagggtagaaatatttttgattttgttttacgtttttggtattggtattgtcgttggtatatgttagatagtgttattttagtgaataaaataataaatttagtttcgtgttgtagatagggaaatagaggtttagagaaaatggtttgggcggggggggggggggtggggtggtttggtagttttatttagggttttatttattttttttttattttgaagttatgtatttgaaaagattgggaagattttttattttattagtggtttatgtgtttgatatgtttttttaagagatgatgatggtttttgtgggagttatagttgtttttagtgtagttataagtaagagggaagagggtaaagattttggaaaaagtaggataaagttttgtaaatatggatattatgcgtgtattggttgggggggtttttttttcgagggtttttttttggttagtagaatgtttagaagaggggtttgggtgggtataggtaaataatttattttttaaaagttaaattttttagttgtagatagtattaattttgagttatttttagatatggaaaaatattgaggttttgagagttaatagatttggggttttaatttttggtttttatttttgagttatttgattttgagtaagtgatgaatgaaaatattttgatttcgaggattttattagaaaatggggatgagaatatttatatgtaaaatgggatagtgtaagtttagggttcgatatggtgtttaatatttagtgaatgttagtttttttttttttttttttgtttttgtgataaacgttttattaggttagtacgtttgataaagttttatttgaaaatatgttcgagattcgtgtttttgtcgggttttagggattagtcggtaatttattttatggataatattattttttattaggggaaatattaaaaattaatttagaggattttatatttttttgttaggagtaaagttgttatggttattagataatgtattgattgggttggaatatagataaggacgatttttttttgtttttaatattagaaaggtaaaggttttagtgatggtttataggagaaatgttttgtggataaagagaatataattagtattagagtttggtagaaggtatttgattttaggtagtatttaatttattaagtagaggttaggagtttatttgatttttgtttggatgaggaaggtagggagggggtgttgggagaagtgggagataaagttaggaggaaattggaagtatgggcgtatttttaggttttattttttattatatttatatatataatgtatatttatatgtatatatatatatatatgcgtttattgattttagaaggttttaagttataagttaatgttaaaggttttttttttatttttagttatttgttatgattaagttaagattttttgattttgaatttagagttagggtttttatagaggatatgggtattttgtggatagaggttagggtaggtttttagagagttgggataggtattgattttttattattatttttttgtttttaatatttagatttttgggagaaattttaagaggattagaggttagagaagttgttggttttgattttaggagaaagtattttatgtttttgtttattttgagtgagataggagggttatatgggttagatggatgtgaatttagatgggttggggaggggaagttggaagggtttattatattaggtaatggtgtttttggttttgagttttaggaggtgagatgtttgttttttattggatttattaaattgtagggaggtttaagaaatgaattttagagtgtgatttaggagttttgtgtgtgggttgtgttattagttttttgggtgattttgagtaagtttttttttttgtttggtttttgttttttttgttgaaaagtgtatggttggtagtagatggtttatagtttttttttattgtaaatatttgtatattttggaggggaagtgatgataattagaagtattcgaaaaacgtaggggagaagtttaggttcgttggattaggaatatgattttaattttaaattagggtagggtgaagtttttttttggatttgatgataagaaagtggggggtagtggtttttataggat

SEQ ID NO: 2444 - DNA, 2397 bp, Artificial Sequence
  chemically treated genomic DNA (Homo sapiens)
gttttgtgagggttattgttttttatttttttgttattaggtttaggaaggggttttattttattttggtttgggattagggttatgtttttggtttagcgagtttaagttttttttttgcgtttttcggatatttttgattattattattttttttttaaggtgtataggtgtttgtagtaggaaggaattatggattatttattattagttatgtattttttagtagagaaaatagaggttagatagagaaagagatttgtttaaggttatttagggagttagtggtatagtttatatatagagtttttgggttatattttggaatttattttttgagtttttttgtaatttggtggatttaataagaggtaaatattttattttttgaggtttaaaattaagaatattattgtttgatataatgagtttttttagttttttttttttagtttatttgagtttatatttatttagtttatgtggtttttttattttatttagaatagatagaaatatgggatgtttttttttggggttaaggttaataatttttttgatttttaatttttttgaagttttttttaagggtttgggtgttagaggtaggagggtgatgatggaaggttaatgtttattttagttttttaggggtttgttttggtttttgtttatagagtgtttatattttttgtaaaaattttagttttgggtttagaattagggagttttggtttggttatagtaagtagttagaggtggagagaagatttttggtattagtttatagtttagagttttttaaagttaatgagcgtatgtatgtgtatgtgtgtatgtaggtgtgtattatgtgtgtgagtgtgatgagaaatggagtttaggggtgcgtttatatttttaatttttttttagttttgttttttattttttttaatattttttttttgttttttttatttaggtaaagattaaataagtttttggtttttatttaataggttagatattgtttggagttaaatgttttttgttaagttttgatgttgattgtattttttttgtttatagggtattttttttgtgagttattattggggtttttgtttttttgatattaaaaataaaaaaaagtcgtttttatttgtattttagtttagttagtgtattatttggtaattatagtagttttgtttttagtagaaaaatatgaagttttttgggttaatttttaatgttttttttggtaaaggatgatgttatttatgaaatggattgtcggttgatttttgaaattcggtaggagtacggatttcgaatatatttttagataaggttttgttaggcgtgttggtttaatagagcgtttattatagagatagggaaaaagaaaagaaaattaatatttattgagtgttgggtattatgtcgggttttggatttgtattgttttattttgtatgtgggtatttttatttttattttttgatgaggttttcggggttagagtatttttatttattatttgtttaaggttaagtagtttagaaatgggagttaaggattggagttttaagtttgttaatttttaaagttttaatgtttttttatgtttggaaatggtttaaagttgatgttgtttatagttagagagtttggtttttggaaaataaattatttgtttatgtttatttagattttttttttgaatattttattggttaggaaaaggttttcggaagaagggtttttttagttaatgtacgtatgatatttatgtttgtaaggttttgttttgttttttttagggtttttgttttttttttttttgtttgtaattgtattgaaaatagttgtaatttttatagaaattattattattttttgagaaaatatattaagtatatgagttattgatgaagtggagaatttttttaatttttttaaatatatgattttagggtggggagaaaataaatagggttttggatgaagttgttagattattttatttttttttttttcgtttaggttattttttttgggtttttgtttttttatttgtaatacgggattgaatttattgttttatttattggagtggtattgtttagtatgtgttagcgataatattagtgttaaggacgtaaaataaagttaggggtgtttttgttttgttagtaggtttacgtttcggtttttgtttgttggtttttttatacgtaaattttatttaatttgtgtgatattatttttttggatttatgattttcgttttttaggtgaagaatatgagttttggaattatttaataatttgttagtatttagtatttatttcgttaaaaaaaaagtattttataaagtttgaatgaatggatgaatggatgaatgaata

SEQ ID NO: 2445 - DNA, 2466 bp, Artificial Sequence
  chemically treated genomic DNA (Homo sapiens)
tttagatgttagtagttttttttatttttaggtatgttaataaaaatgtttttagatattgtaaaatggttttttttttgggtaggtagaattgtttttattattggtatagttaggtaaatgtaatagtttaatatttagtagatattattatgtgtttagtattttaaatatagtttcgatttttataatattaataaggtagtgattattttttttgttttataggtgaggaatttagggtttagaaaggttaattttaaattcgtaaaataggtaaagggaataggtgggatttgagtttagttttttagtttgttgagagtatgtttttttttttatttaatttggttgtttttttttaatagtaaatgatcggttaaagtttcgtaaatgtttaataatagggaattggtttagtaaattatagtgtattttttggatggaatattatgtagttattaaaatgatggagggttattaaaaatgaaaattatgtaacgatatggaaaaatgttaattggattatattaagttaaaaaaattagaaaataaaaatgtgtttatattgtgattataacgatgaagaagtatatttatgtgcggatggtttatgtgttggattgaggatattaaggataattttttttttttttttgatatttattattgttattagagtgtttttatgattttaatttttaagtagtagtagagtaatgataagatttaagatgttaggtttgttttaggttttttttttatttgaattagaatgaagatttttttaaattttgattatagtaaggggttgatttatttttatttttttttttattagtattgttgtatgtatgtttgtgattttaggtttttttttttgtattgattagttttttttaagtatagaaagttggaagtatagaagaaaataattttgaaggtattggtgtgaattattttgggagttagggttattaggaatatatagttttagagtagtagatggtatttgtttgttatagggtattgagcggtgtattgttttatgtattatgtattaagagtggtttagtattttggttcggttgtgtgggataagttttgtaaaagaaatatttgatgaattgatcgggatgttaaaatgttattaaggataaattaatggatgtgttattttggttgtaagaggtagtgttagtaagataatagatagtcggtgggttgttttttagtttaagatagacggcgtttgtaatggagatttatggtttttatgtaacgtgaggtgttttgtagggagaagaataaatagaaatgttttagtatttaagcgttataaaattataagtatgagattaattaattagtgtatattaggaaggcggttggtttgtttgcgtttttggggaaagttagaatggatggtattgggttagagatgacgggtttttgtattagttttttaaagaaaagtaattgaatttaatgtgtaattataaattgtcgttgatggaaagataagtttggtcggtgtttgtttttttagggatattatttttgtttattgttttaaatattttgtgtttgtgggttaagtatttgagaggattggggagatttggaaattagttttgtttataacgttatgtgggttatgaagggtgttataattttaatatatagagtaatttttagggaagtttgattttttttgcgtttttttagatagggggttgtttatttttttgtgataggaggtttattattttttttttaatttgatttagtgttagataagtattgttagagagtttttttttagatttttttagtttttttttttttataatttaataataataaagataagaaggagaatagttaatgtttattgagtgtttgttgggtgttaggtattgggttttggttaagttataatgttattatgtattatttttattttgtagtgtaggaaaaagaagattagagggtgtgaaagatatgttgaagatcgtatagttagtatatggtagggttaagatttaaattcggggttgtttgaggttagggtttgatagtttaattattatatggttttaagttttgtaattattattaattggatggagtttggtttttagagtaatatagaatatgataaggtaagatagatgagaatttatatgtagtatatattgggtattgttaagtatttggtttgggttagtttaatatatcgtttatgtagtagttttttttgagtaacgaaattatttttttatttgagatatttatttttttatttttttaaaaaagttatatatatatatattttttaatatataaaaatcggttttatttttgtgtatttataatgaataattagaatttgaatttttataaatagtataatttatagtagtatttaaaaaagaaatatttagatataaatttattaaaata

SEQ ID NO: 2446 - DNA, 2466 bp, Artificial Sequence
  chemically treated genomic DNA (Homo sapiens)
tattttggtggatttatatttgaatgttttttttttgggtgttattgtaaattgtattatttatgaaaatttagattttaattgtttattataaatatatagaagtgaaatcgatttttatatgttgaaaaatatatatatatataatttttttaaaaagataagaaaatagatattttagatggggaaataatttcgttatttaaaaaaggttattgtatgaacgatgtgttaggttgatttaggttaggtgtttagtagtgtttaatatgtgttatatgtgagtttttatttgttttgttttgttatattttgtattgttttaaaagttaggttttatttaattaatggtagttataggatttagaattatgtgatagttaagttgttaagttttggttttaggtagtttcgggtttggattttggttttattatatattagttgtgcgatttttagtatgttttttatattttttggtttttttttttttatattgtaaaatggagataatatatgataatattgtaatttgattagagtttagtgtttggtatttagtaagtatttagtaagtattagttatttttttttttgtttttgttgttgttaagttataaggaggaagaggttagggaagtttaaggaagaattttttaataatgtttatttaatattgggttaggttgaaagggaagtggtgagttttttattatagaagaatggataattttttatttagaaaggcgtagggggagttaggtttttttgagagttgttttatgtgttgagattataatattttttatagtttatatggcgttataagtagaattagtttttaggtttttttagtttttttagatatttgatttatagatataaagtgtttgaagtagtaggtagaaatagtatttttgaaaaaataaatatcgattagatttatttttttattagcggtagtttatgattgtatattaaatttaattgtttttttttaggaggttggtgtagggattcgttatttttaatttagtgttatttattttagttttttttaggagcgtagatagattagtcgtttttttagtgtatattaattaattaattttatgtttgtgattttatggcgtttaagtgttggagtatttttgtttatttttttttttgtaaagtattttacgttgtataaagattatgaatttttattgtaaacgtcgtttgttttgggttggagaatagtttatcggttgtttgttgttttgttggtattgttttttatagttaaagtaatatatttattaatttatttttaatgatattttgatatttcgattagtttattagatgttttttttgtaagatttgttttatatagtcgggttagggtgttaggttatttttgatgtataatgtatgagatagtgtatcgtttagtattttgtgatagatagatgttatttgttattttaagattgtatgtttttaatagttttggtttttagagtgatttatattaatgtttttagagttgtttttttttatgtttttagttttttgtgtttgggagaagttggttagtgtaaggagaggggtttggggttataaatatatatgtaatagtgttaataggagggaaagtaagggtaaattaattttttgttatagttagagtttagagaagtttttattttaatttaggtggaagaagggtttagggtaaatttaatattttgaattttattattattttgttattatttagaaattaggattatgaagatattttgataataataatggatattaaagaagaaaggaaaattatttttaatatttttaatttaatatatgagttattcgtatatagatatatttttttatcgttgtaattataatgtagatatatttttattttttagtttttttaatttaatgtaatttagttagtatttttttatgtcgttatatggtttttatttttaatggttttttattattttaatggttgtataatattttatttaggggatgtattataatttattgaattagttttttattgttagatatttacgaggttttaatcgattatttgttattaaagaaaggtagttaagttgggtgaggaggagagtatgtttttagtaggttgaagagttaggtttaaattttatttgttttttttatttgttttacgagtttaggattaatttttttgggttttgaattttttatttataaaataaaagaaataattattattttgttagtgttgtgaaaatcggagttatgtttaaaatattaagtatatggtagtatttgttaaatgttaaattgttatatttatttaattatgttagtagtaggggtaattttgtttatttaaaaagaaaattattttgtaatgtttagagatatttttattgatatgtttgggagtagggggaattattggtatttaga

SEQ ID NO: 2447 - DNA, 2496 bp, Artificial Sequence
  chemically treated genomic DNA (Homo sapiens)
taattattatggaattttagaattattggaggagtaggattttttaaaatttatttttgtgatcgttattggatgttaaaatttttcgtatatttttatttagtggttatttagtttttgatagtttttaggtttgaaattttattttgaaatattaagaagggaagttgtgtttattatttagatatttatttttattttatttttttgaagaaattttttttgtttgtttttttagttattttttaatattttgtttgattttgtttttttaatagatgtgttaggtgttgatttaggtatggaggttttgattgtgatgttatgtagtttatttattgttatttagattgagttggcgagtttatttatttaatttgttaaaattagatttggtggaaagtgaggattttaatatttttatatttgttgataattttaaatttttatcgaagagtgggaagttgttgtttggaattatattaagattaataatgataatagagataatgataattgtaaatatagtaatttttttatttataatggtagtttcgattgtataaagaatttagtattaggaagggatatattttaagttattttggaattgttttttaatttgtgggataaagatagattaaatattattttgtattttttaaattttgaataaataggtaaatagtttttttgttaagtaggagaaaatattgggaggagacgagtttaggttttttaatatgtttttattttattggttagtaggtttatggtttagagagaggttgaagttggagatagggattttagaattatttgtagagttttttggttgaggttttgggaattaatgaaattgtagtattagagagtatcggaggagaagggaagtggggagttgttttagagaataagttagaatagaaatagttaagatagttaaagtaggagtattcggagattaacgtgaagggaaagaagtgagagatatgtggaagaggtggtaatttttgttaaaggggattaagaataaggagttttaagaattttttgtagggttgttggttggagacgttgtttttatgtaaattttatttgtcgttgttaatttagattttgttttattacgattatttttgagaaatagatttaagatatgaaaaaaaattttttttttgtaaaattggttcgtgaaatagattataggtattaatattttttatgagtgataatttagggttaatatttatattttgtaatgttcgttttttttttttcgggatagaaaagaatgttgttaatattaatgaataaatattaataaaattaaatataattttgttttatttggaattaatttttaaaaaaatttttaatatttgtatataatatatatatatttttatgtataatagggaaattagattttgtttgagagatgtgtatagtatttaatgttaatttatttggttttattttttttttagattgttttagaagggtagcgtttttagaattgagattttgaattagttttttttgatttttaggtatagaatgtttagtttaagttaagatatattaaatatttatttatttttagatttttaaaaatttagttttttgtttttttttgtagttgattttttttggtagaaatttagttttaaattgggagaaatgagtggattattagaattaaagttgacgttagtggtattgtgggttggtgtatgacgtgggaattttgataaatagaaatgaatgtttataaatgttagattttaggtttgtaaggaaagattttgttgtattttataaatggatttgttttttaatatgttttttgttttaggataagtaatgttggttagaattttgggggtgaatttaggggttcgtattatttggggttgcgttgttatttttgtttttagtatcgtagaggttaaattgtatttagatgagattttagggaaagagaaaagaattttgggtacgggggttattatttaaagaatttggtgtagtgcgtgggagatattgtatgtatttttaatttagatatattattaatttatattattttttttgtgtttattaaattaggattttttagttttattattattgatattttgggttagaaaattttttttttgtggaattgtttagtgtattgtaggatgtttagaagtatttttggtttttatttagaagatgttagtagtattgtttcggttgtgataagtagaaatgggtttagatacggttaaatgttttttggtgagagggtagtaaaatggtttttggttaagaattattgtagtgaattatttaagggattatgagtgaagttttgaataatttatatttgagttaagtggtgttagagagatatttgtaggattttagttttgttagtttgatattttttttataagtttatcgattggagattttaagtatgttgtagtttttatttaatagatt

SEQ ID NO: 2448 - DNA, 2496 bp, Artificial Sequence
  chemically treated genomic DNA (Homo sapiens)
gatttgttaggtaggggttgtagtatgtttggggtttttagtcggtgggtttataggagagatgttagattaataaagttgaggttttgtaagtatttttttggtattatttagtttaggtgtggattatttaaaattttatttatggttttttgaataatttattgtagtagtttttaattaggggttattttgttatttttttattagaggatatttgatcgtatttggatttatttttgtttgttataatcgggatagtattattggtattttttgggtagaggttagggatgtttttaaatattttatagtgtattgagtagttttataagaaaagaattttttggtttaaaatgttaatggtggtgaggttgagaaattttggtttagtaggtataagagggatggtgtgaattaatgatatgtttgagttagaggtgtatgtagtattttttacgtattatattaggttttttgaataatgattttcgtgtttaagatttttttttttttttttggggttttatttgggtatagtttggtttttgcgatgttgaggataggagtgataacgtagttttaagtggtacgagtttttaggtttatttttagagttttgattaatattatttgttttgaaataggagatatattaaaaagtaagtttatttgtgaagtatagtaagatttttttttgtagatttgagatttaatatttataaatatttatttttgtttgttagggtttttacgttatatattaatttatagtattattgacgttagttttgattttggtgatttatttattttttttagtttgaggttgaatttttgttagaggaggttagttgtaggaggagatagaaagttggatttttgaaaatttgggagtggataaatatttgatatgttttggtttgagttggatattttgtatttgagagttagaggaaattaatttagaattttaattttagggacgttatttttttaaagtagtttggagaaaaggtggaattaaataaattggtattaaatattgtgtatattttttaggtaaaatttgatttttttattgtatatagaggtgtatgtatattatatatagatgttaagaatttttttaaaggttgattttagatggaataagattatatttgattttattaatgtttatttattgatattggtaatatttttttttgtttcgagagaaagagaacgaatattataaagtgtaaatattggttttaaattgttatttataaaggatattaatgtttgtagtttgttttacgaattaattttatagaaagagggtttttttttatgttttgagtttgttttttagaaatggtcgtggtgggataggatttggattgatagcggtaaatgagatttgtatggaggtagcgtttttaattaatagttttgtagaaagtttttagaattttttgtttttaattttttttggtaggagttgttattttttttatatgttttttatttttttttttttacgttggttttcggatatttttgttttggttgttttgattgtttttattttagtttgttttttaggatagttttttattttttttttttttcggtattttttggtattgtaattttattaatttttaaggttttaattaagagattttatagataattttgaaatttttgtttttagttttaatttttttttgaattatagatttgttggttaatgagatggaaatatattgagaagtttaaattcgtttttttttaatatttttttttatttaataaaggggttatttatttatttatttaaggtttaaaaaatgtaaagtggtgtttgatttatttttattttatagattaggaaatagttttaagatagtttaaaatgtgtttttttttggtattggattttttgtgtaatcgggattgttattgtgagtgggagagttgttatatttgtagttgttattatttttattgttattattaattttaatgtgattttaagtaataattttttatttttcgatgagagtttaaggttgttagtaaatgtggaaatattgaggtttttattttttattaaatttggttttaatagattagataaatgagttcgttagtttagtttaaatggtaataagtaagttatatgatattatagttagaatttttatgtttgggttagtatttaatatatttattaagaaggtaaagttagataaggtattagagagtgattgagagggtagatagggaaggtttttttagggaggtgaaataggagtgggtgtttgagtggtgaatatagtttttttttttaatattttagagtagagttttaagtttggaggttattagaggttgggtgattattagatgaagatgtgcggaggattttggtatttaatagcgattatagagatgggttttgggggattttgtttttttagtgattttgagattttatgatgatta

SEQ ID NO: 2449 - DNA, 2474 bp, Artificial Sequence
  chemically treated genomic DNA (Homo sapiens)
tttggaattggatgttattaatataaagagaaaaatgtaaaatggtaagtagtaagtatattttagagtgataatgaaataagggtttttatttttgtagtattggttagtttgtttttatttttattttttttaattttttttttatagggatttttttaaattttaaatttgattaagtttgttttatttggatttattttaggttttttgttgttttgagaatagaatttaatttttaatttggtttttaggttttttttggattagatttttttatttgtttggttttttttttgttttgtatttaatagttttgtataattttttaatttttttagtttggttaagttaatttatattttagggtttttgtataggttaaatttttagttaagaatgttttttgtttttttagatttttattttgttatttattaatttaatttatttgtttgtttagaaaggtttttatttattttttttagttttttgtaaataggattaatttggttttttatagagtataagtttttattttattgtattgtaatttttaaatatatttatatgtttgtgggttattttatttttttttgaattttttgataataaggattggaatttaattatgtttttttagtttcgagtatggtgtcgggtataaagtaggtatatagtgagtgttttttggtttattgattgattgattgattaaatttattttttttaaattttttaatgtgagaatatattttttttaaagtttttagttattataaatgatagataagatgtttttttgaatttttaaacgtttattttaaagtttttagttttgtttattagtttatgttattaatcggatgagttttagtaaggtttttgttaaagtatttttttttttgttgatttattttaaaatgtaatttagtggttttaagttagaagaagaagaggttacgtttttagtttttttttaagtatttattattagttagttgagaagatgtgattgttatttttttaattcgataagatgattttttttaattataatataagtttagtgagttatataattatggtgaattttttattagtttaatattttatgtaattttttagagaatatgattttatttgaaaatatatgtaatagtttggaatttatttttttttagtgtttaatttttagatttttataaatattagatggttttttaggtagtgatatacgttggaattatcgaataagtatcgtttatgattttgttttgggtagtgttaaaaggtattgagaatttatttattttattacggcgttgttaatagggttttaggtagtttgttgggtttggaggtgtgttaaattgtagtgttatgaatgttttaaacgagagatagagaaagagaaagagaaggaatatgtgaatgtgtgtttgtagttgagggaaataataagagtaaagggaattaaatttttttaataaaggaaaatagtttttaaataaagaaaaagaagtttaatggttagttattgttgtataataaaatttttttaaaattgagtagtttaaaatagtatatatttattattttatattttttgtgggttaggaatttaggtagagtttagttgggttttttttgttagtattttataaggttgtaattaagatgtaggttagggtgtggttttatttgaaggtattattggggaataatatgtttttaagtttatttttagggttgttggtaggatttagttttttaggggttgttggatagagatattagttttgaattattgattagaggtattttttagttttttgttttgtgagtgtcgttatagagtgttttataatatattagtttgttttattagtaagtaaatgagagggtaagagaaagtattagtaaagagagaatgttagtaagatgaaagttatagttaagtatggtggtttatatttgtaattttagtattttgggagattaaggtaagtggattatttgaggttaggagtttaagattagtttggttaatatggtggaattacgtttttattaaaaatataaaaaaagaaaaaaaaatttgggtatagtggcggtgtttgtaattttagttatttaggaggttgaggtaagagaattatttgaatttaggaggtggaggttgtagtgagttaagattgtattattgtattttagtttgggtaatagagtaagattttattttaaaaaaaaaaaaaaaagttataattttttgtaatttaattttggaagggcgttttattgtttttgttataatttttttttttttttttttttttttttttttgtttaagttggagtgtagtggtatgattatagtttattgtaattttatatttttgggtataagtaatttttttattttagttttttgagaagttgggattataggtacgtattagtatattcggtta

SEQ ID NO: 2450 - DNA, 2474 bp, Artificial Sequence
  chemically treated genomic DNA (Homo sapiens)
tagtcgggtgtgttggtgcgtgtttgtagttttagttttttaggaggttaaggtaggaggattgtttgtgtttaggaatatgaggttatagtgagttatgattatgttattgtattttagtttgggtaaaaaaaaaaaaaaaaaaaaaaaaaaaaaaattatggtaaaagtaatgagacgtttttttaagattaggttgtaaaaggttgtggtttttttttttttttttgagatgaagttttgttttgttgtttaggttggagtgtagtggtgtaattttggtttattgtaatttttattttttgggtttaagtgatttttttgttttagttttttgaatagttgggattataggtatcgttattatgtttagatttttttttttttttttatatttttaatagagacgtggttttattatgttggttaggttggttttaaatttttaattttaggtgatttatttgttttggttttttaaagtgttgggattatagatgtgagttattatgtttggttatggtttttattttgttagtattttttttttgttggtgtttttttttatttttttatttatttgttgatgaagtaagttggtgtgttgtgagatattttatagcgatatttataaggtaagggattgaaggatgtttttggttaatagtttagagttaatatttttgtttaataatttttgagaaattgagttttgttaataattttgagagtgagtttagaagtatattattttttagtgatgtttttagatgggattatattttggtttatattttgattatagttttgtgagatgttgatagagaggatttagttgagttttgtttggatttttgatttatagaaaatgtgagataataaatgtatattgttttaaattgtttagttttagggaaattttgttatgtagtagtagttaattattagatttttttttttttgtttgaaaattatttttttttattaaaagagtttaattttttttatttttgttgttttttttagttatagatatatatttatatattttttttttttttttttttttgtttttcgtttgaggtatttatggtattgtaatttgatatatttttaggtttagtaaattgtttgagattttgttagtaacgtcgtaatgagatgggtaaatttttagtattttttgatattgtttaaggtaaagttataagcgatgtttgttcgataattttaacgtgtgttattgtttggaaggttatttggtatttataggaatttgaaagttaggtattggggaaaaatgagttttagattgttgtatgtatttttagatagaattatattttttgaaaaattgtataggatgttgagttgataggggatttattatgattgtatggtttattgggtttgtattatggttgagaaaaattattttgtcgggttgggaggatgatagttatatttttttagttggttggtgatagatgtttaaggagaggttgaagacgtggttttttttttttttgatttgaagttattgagttgtattttaaagtaaattaataaaaagagggatgttttgataggaattttgttgaggtttattcggttggtggtatgagttggtagataaaattaaaagttttgagataagcgtttggaaatttaaagagatattttgtttgttatttataatggttaaaaattttgaagaaaatgtatttttatattgaagggtttgggggaggtgagtttagttaattaattaattaatagattaggaaatatttattgtatgtttattttgtgttcggtattatgttcgggattggaaaaatatagttagattttagtttttgttattaaagggtttagggaagagtgaggtggtttataaatatgtaaatatatttaaaaattgtaatatagtgaagtgaaggtttgtgttttgtgggagattaaattgattttatttgtagggaattagggaggataaataaaggtttttttgagtaggtaaataaattgggttggtaggtggtaggataaagatttaggggagtagaagatatttttggttgaaggtttggtttgtgtaaaggttttgaggtatgaattagtttggttaggttggaggaattgaaaagttgtgtaaggttgttgggtgtaaggtaggaaagaggttagatagatgggggagtttggtttagaaagagtttgagggttagattaaagattagattttgtttttagagtaatagggagtttgggatgggtttaaatagggtaagtttggttagatttggggtttggaaggatttttatagaggagaggttggaagaggtgagaatgagggtaggttgattaatgttgtaaagatgaggatttttgttttattattattttgaagtatatttattgtttgttattttgtatttttttttttgtattaatagtatttaattttaaa

SEQ ID NO: 2451 - DNA, 2460 bp, Artificial Sequence
  chemically treated genomic DNA (Homo sapiens)
ttttgggggatttatgttttatagaaagtatttagtataatgtttggtatattgtaagttttaagtaaatagaagttgttattattattaattattttttgagatggagtttcggtttgttttttaggttggagtgtagtggtgtaatttcggtttattgtaatttttattttttgggtttaagtaatttttttgttttagttttttaagtagttggaattataggtgtttattattatattcggttaattttcgtatttttagtagagatggggttttattatgttggttaggttgtttttgaatttttgattttaggtgattcgtttgtttcggttttttaaagtgttaggattataggcgtgaattatcgtgtttagttaggagttgttattattaatagttattattgttatagttatttggtaaattaagtatgattgttattattttgtagatgataaaattaaggtaataagatgggagtgatttgtttaggtttatttaattgggaattatgcgattagaagtattttttttttattatgtatttttgtttttttaattgggtatgtaagtttatttatttatttattcggtaaatatatatgtttattgtgtgtttggtttgtgtgtgttgtaggtatagattgggttttgtttttatggaaggtatagttttttagggaagagcgatttttattgaatatttatatagatttatttaaaaattataatacgtgttttgtggtatgaagggaaaagtagggtgttgtgagacgtgatttggtttggggtgatttagatggggaagtttttggcgagtttggttaattttttgttgttttggatatttagttattatttttttagattagtttagggttggatgatttttgagagtgtggttgggtgttttttttggtattttcgttttttagtgttggttttttaagttttttttagattttttttttatttagtttttttgaagattgtttttttataattgttttttttatcgaaggatttagatataaattgtattttaaatttaatattagttattaatattttatgattataaaacgttaaagataatgttagtggaaggagcgtttgtatgggtagaatggatgatttagaagttcggggagaggggagtcggtatattaagtggttcgggagtttttgaggtaatttagtatgataggcggtggtttttggttgagtgtaatatttttcgaggtgtttattaagcgtcgtcgttgtgtataaatattttttttttgatttttgttattttatgtttattatgattaggagtaggtggggttattatgattttttgagttttttttttgtttttgaggaagttaaatggacgttttggtaggagggtatggggttgggtgggtagattcgatggttatgtatttggggttttggttggtttttgggaagtcggaggttttgggttaagtttgtttttgttaggatttgttttgtgattttggggttatttttgtttttttttgagtttttgtttttttatttgtaaaatggggataataagtttgtttttattttatggagatggtgaaaaggaagagtgggttagttatttgtggtagttttttttttttgagatagagttttgtttgttgtttaggttggagcgtaggggtatgattttggtttattgtaatttttgtttttgggtttaagcgattttcgtgttttagtttttttagtagttgggagtatatgtatacgttattatgtttagttaatttttgtatttttagtagatatggggtttcgttatgttggttaggttggtttcgaatttttgaatttaagtgatttgatttttttggttttttaaagtattgggattataggcgtgagttattgtgtttggtttgtgagagtttttgattttgtgttagtattagggaaataggattggaggggtagttgaggagagtcgggttttggagttaggtaggttggggttgggaatttggataaatgatttcgttttgttgagttaggttttttatttttatagtgaagatggtagtagaatggatattttttaggggtgaagattttatgagtttattataagaaagggttcggaatagagttaagatttatagatattattaattgagtatttattaagtattaattattaggttaagttttttttatgagttatgttgtttgatttttttattagttttttgaagtaaaattatttttttttttattaattaatattttgggtgaggagtgggtaggggttggggattatagtttagagaaggggggtttcgagtttagtggttagttttttttttttagagatatatttttttttttatagttagttattggggttgatggatgggatgggggtggggtttagatagtagagagtgtttagaaaag

SEQ ID NO: 2452 - DNA, 2460 bp, Artificial Sequence
  chemically treated genomic DNA (Homo sapiens)
tttttttgggtattttttgttgtttgagttttatttttattttatttattaattttagtaattgattgtggggaaggagatgtatttttgaaaggagaagattagttattgggttcgagattttttttttttgagttgtgatttttagtttttgtttattttttatttaggatattaattaatgggaaaaggaatggttttgttttagagagttggtgggaggattaaatagtatagtttatgggaagaatttagtttagtggttggtgtttagtaagtgtttagttgatggtatttgtaggttttgattttgtttcgggtttttttttgtgatgagtttatgaaatttttatttttaaggggtgtttattttattgttatttttattgtggggatgaggaatttgatttagtaaggcgaagttatttgtttaggtttttaattttagtttgtttgattttagagttcggttttttttagttgtttttttagttttgtttttttggtgttggtataaaattaagagtttttataggttaggtatagtggtttacgtttgtaattttagtattttgggaggttaaaggggttagattatttgagtttaagagttcgagattagtttggttaatatggcgaaattttatgtttattaaaaatataaaaattaattgggtatggtggcgtgtgtatatatttttagttgttggggaggttaaggtacgagaatcgtttgaatttaaaggtagaggttgtaatgagttaagattatgtttttgcgttttagtttgggtaataggtaagattttgttttaaaaaaaaaaagttgttataaataattgatttattttttttttttattatttttatgagatgggaataaatttattatttttattttatagatgaggaaatagaggtttagggaagaatagggatggttttaagattatagagtaagttttggtaggggtaggtttgatttaagattttcggttttttaggagttagttagagttttaggtgtatggttatcgggtttgtttatttagttttatgtttttttgttaaagcgtttatttggtttttttaaaaatagaagggaaatttagagggttatggtggttttatttgtttttggttataataaatatgaggtgataagaattagaggggaaatatttatatatagcggcggcgtttggtgagtatttcggagaatgttgtatttagttaggagttatcgtttgttatattggattattttaaagattttcgagttatttagtatgtcggttttttttttttcgaatttttgagttatttattttgtttatgtagacgttttttttattgatattatttttaacgttttgtaattatgaaatattaatgattgatattgaatttaaagtataatttgtgtttgaatttttcggtggaaagggtagttgtaaagggatagtttttaaagagattgggtggggggggggtttaggggagatttggaaaattaatattgggaggcgggagtgttaaggggggtatttagttatatttttaagagttatttagttttaagttgatttggaggggtaatagttagatgtttaggatagtaaagggttaattagattcgttagaagtttttttatttgggttattttaggttaagttacgttttatagtattttgtttttttttttatgttatagagtacgtgttatgatttttagatgggtttgtgtgagtatttagtgaagatcgtttttttttgggaaattgtattttttatgagggtagggtttagtttatatttgtagtatatataggttaggtatatagtaggtatgtgtgtttatcgaatggatgaatgaatgggtttgtatgtttagttggaaaaataggaatgtatgatggagaagaaatgtttttagtcgtatggtttttagttgggtgggtttggataggttatttttattttgttattttggttttgttatttataaaatggtgataattatatttagtttattagatagttgtgataatggtaattattaataatagtagtttttggttgggtacggtggtttacgtttgtaattttagtattttgggaggtcgaggtaggcggattatttgaggttaggagtttaagagtagtttggttaatatggtgaaattttatttttattaaaagtacgaaaattagtcgggtgtggtggtgggtatttgtaattttaattatttgggaggttgaggtaggagaattgtttgaatttaggaggtggaggttgtagtgggtcgagattgtattattgtattttagtttgggagatagatcgagattttattttaaaaaataattaataataatagtagtttttatttatttaaagtttataatatgttaggtattgtgttgagtgttttttataaaatataaattttttaagg

SEQ ID NO: 2453 - DNA, 2410 bp, Artificial Sequence
  chemically treated genomic DNA (Homo sapiens)
tttttatggtataaagttatttaaaaaaaaaaaaagaatagaggggagttagagggaggggataaggggtggagggtggagttgttagagttttatggggtataggagataaatggatatgtattggttggaaaggatagaagttgtgatttttttagttatttaattggggaaattttagaataggaggtttttgagtttttattagttgataagtgataaaagttgagagtaataatgataagtgttaatattgattaagtgttaggtatatgttaggtaattatatagagtatgttataggtatgaatttatttgtttttttaagaagttttttgaagtggtattgggagataattttttatgggtttttttaaggtttgtatgtttttagtttaaaagatattgagatttttgttttagattattattttaaggatatttgtgtagtaaatatatttggaggatagagataatatttttttttggagtagaaagaagaggatagagttgttttttaattagtataataatgtttttatttgaggtaaaggttagataggtttggtaatagtttttttataagattgtaggttttttaagttttgggattttttattgagatatagatttgttgttgtgtgtgtagaatttatttgggttgtttttattgtttttatggaatttgggagataattagaattgacgtaaatatgaagtttgtgttgtttgttatattgtgattaataaagttttttgtttttgatttgggatttcgtgttttttgtcgttatgtatggtattgtggtaggttaatttattagtttgtgagtagtgtaaaatttcggatttttcgtagttttttcgttatatttatattatttttgttttatagatgaggattttgaggtttagagaattgaagttttttgtttaagattatatagttaataagtaataaagttaggattgttatttagatcgattgggaaaggaaggagagatgagtaggggattggagaagagaatcgttggaaatgataggagttgaaggttttaaaggtatatagaaggttatgttttttagttttttaaatttatatatttttagatgttgtttgtttttatattcggttgttggggttgagtagttaatttgggacgatcgtgatatatttaacggtgagttatgtttttttttagtaattagtagtggtaggttcgggaggatgtagggagtatttttggaaattcgtgtttgagggtcgttatgataacgttatttgagtcgtttgttagtagttgggatgttagtgtttgaattaaggtataaaatagttttataggttgagtgcggtcgaggataggagtaggttttttgtacggtatttttaatgggtttgttagggattgatgggagggatgtgaggatttggtgataagggagatttatgggtttattgtttaggttatagtattttatggaagtttggggtttttggttggtgggaatgagtatatttggcgtgatgggtattttggtgagtattatttttttttgttttggttttttttggtttgtttgttttatagttgtttttttagaggttttgtttaatttgaggtttttatttaagtgttataatttttgaagattgatagtaatttgggaaggtaattaagattattttttaggataattttgaagattttagaatttagggcgaattagttatatttatatattaatattaaatacgaatattttatgaaagtagtttggaatttatttatttatttataaatttatttattattttgtttttttagttgtttattttaattagaatttgggttttataggttttatgtagaagtggatttggttatttcgtttttatttttttttatttttttttttttattttattttagtttattagttttattgttgttttttaaatatatagttgtttttttgttttagagtttttgtatttgtttttttatttgtttggaaagttttttttttagaagggaagttttttttttaggtttttgtttatatgttatttttttagagatatattattaagattattttaggagaaagtatttaatttagttttagtgataaggttaaatatatatatatatatatattatgtataatatgatatatatttgtgatttagttttttttattcgtacgaagtaaagagagataagttgaaaattggtggtttgtaagttgaatttaatttatagatttgttttgtttggtttatatagtgttttaagaattgagtaagttgttaatagttataaagttgagagattttgttttagaatgtaaatttttaatttatttcgaaaaattaaggttgggtgtggtggtttatgtttgtaa

SEQ ID NO: 2454 - DNA, 2410 bp, Artificial Sequence
  chemically treated genomic DNA (Homo sapiens)
ttataggtatgagttattatatttaattttagtttttcgagataaattgaaaatttgtattttaaaataaaattttttaattttataattgttagtaatttgtttagtttttgaaatattatgtaaattaaataaaataggtttgtgagttagatttaatttataggttattaatttttagtttgtttttttttgtttcgtacggatgggggaaattaagttatagatatatgttatattatatataatatatatatatatatatatttggttttattattgaggttgaattaggtgtttttttttagggtggttttggtagtgtgtttttgagaaggtgatatatgagtagaaatttaaagggagagttttttttttgggggaagagttttttaggtagatggaggagtaagtgtaaaggttttgaggtagaaaagtaattgtatgtttgaggaatagtagtaagattagtgagttagagtagaataagagagggggagtgaaaggggatgaggacgggataattaaatttatttttatatagggtttgtaggatttaggttttaattaaaatgaataattgagaggataaggtgatgaatggatttatgaatgaatgaatggattttaagttgtttttatgggatattcgtatttggtgttagtgtgtgggtgtggttgattcgttttaggttttgaagtttttagaattattttggaagatgattttggttatttttttaagttgttgttagtttttagaggttgtgatatttggatagaagttttaaattgggtagggtttttgggagagtaattatgagatagataaattaagaagaattaaggtaggaagagatggtgtttattaaaatatttattacgttaagtgtgtttatttttattagttagggattttaggtttttatagagtattgtgatttggatagtgagtttatgaattttttttgttattaagtttttatattttttttattaatttttggtaaatttattggggatgtcgtgtagggggtttgtttttgttttcggtcgtatttagtttgtgagattattttgtgttttggtttaggtattggtattttagttgttggtaagcgatttagatggcgttgttatggcgatttttaggtacggatttttagagatgttttttgtattttttcgagtttgttattgttgattgttgggggagagtatgatttatcgttaaatatattacggtcgttttaaattggttgtttagttttagtagtcggatgtagggataggtagtatttgggggtgtgtgggtttgggaagttgagaggtatgattttttgtgtatttttggggtttttagtttttgttatttttagcggtttttttttttaattttttatttatttttttttttttttttaatcggtttgggtaatagttttagttttgttatttgttagttgtgtgattttgaataagaagttttaattttttgggttttaaagtttttatttgtaaaataggggtgatgtgagtatgacggaagaattacgaagggttcgagattttgtattgtttataagttaatgagttagtttgttataatgttatatatgacggtagaagatacgagattttaggttagagataaaggattttattagttatagtatagtaagtagtataagttttatatttgcgttagttttaattgttttttaagttttatgagagtaatgaaaataatttaaatggattttgtatatatagtagtagatttgtgttttaatggaggattttagagtttaggaaatttgtaattttataaaggggttattgttaaatttgtttagtttttgttttagatagagatattattgtattggttgggaaataattttatttttttttttttgttttagagagagatattgtttttgttttttaagtgtgtttgttatatagatgtttttgagatgatagtttagaataaaggttttagtgttttttgagttgaagatatgtagattttggagagatttatggagaattattttttaatattattttaaagggttttttggaggagtagatgggtttatatttgtaatatgttttgtatagttgtttggtatgtgtttggtatttaattagtgttagtatttgttattattatttttagtttttattatttgttagttagtaggaatttagaggttttttgttttgggatttttttagttaggtgattaagaaaattatagtttttattttttttagttagtatatatttatttattttttatgttttatgaagttttaataattttattttttattttttgttttttttttttgatttttttttgttttttttttttttttaaatagttttatattataaaaa

SEQ ID NO: 2455 - DNA, 2489 bp, Artificial Sequence
  chemically treated genomic DNA (Homo sapiens)
aaatggttattaaattgtttaatttaaatggtcggtttatggatacgttttgtttggtttatgtttgtttaatttttaaaaaaaaattattatttgtattttttgttaataataaaaataattgggatagtgtgttttaatttaaattttttattttttttcggtaattagaaggtttgatagtattgtgtttatttttttgtatggtagttatttataggagttgggtagtggttgttttttttgttaggatataagtgttttattttattttagtgtttttttggttatattatttttgtatagggttgtttggttttagtttagttgatgggatataggcgtgagtagtgaggttatgtagggattataagtaggatatttttttttttttttggaaggaagtattttggttattatagtaatatgttgttgtttgtaatatattttttatttgaaaaggagaggagatgataagtatatttttttttttagtttaggtaatattagtttttggtattttttaaaatttaagagcgagaagggggagtgtgatttgttttttttaatttgggttttaaatgtagatgttttaaatatttttatttgtttaattaatttagagatgaggcgttgggaggggttgatttagattttattttatataaaaagattagaatatttttgattagtgatggaggaaggtgtgggagtttgagatagtgttttgtttttgggtaaatgtatatattttttgatgttttttttttttttacgttttttaaagtagaagtatagattttttttttttattattttttatagttaaattttttttagttaggattttagattttttttaatatttaggagtttttagggtagtaggtttgtttttaggttatttatagaatttgaaggaaataagggaatgaaataagagaattagttagaaataaggtagggtatcgtgcggtatttttttttgaaattaagaggttgagagttggaatagtagtagaaattagaagaaattttattgagaaaagaggtatagagaggagtgttaattagtatttaggtttttttttgggagtgttaatttataaatattaataatcgtaattatttagtattagttataatgttttgtaaattaaggttatttttcgtggagtaaatagttgcgttaatggtagtaaaaggtaacggcgttgttggttgtatgttagttgatgtttgttaggatgatagtataaattaggaaggatacgtttaatttgtgaagataggtagtggtatgggggtaggtggagtgacggggtagagtgtggtcgtagatatatattttacgtaaggtttttgggtcgatttgatttaatagggatttgttttagataggtgatgtttggggtagatgaagtttttagggttattaggtgtaggtaggaggggagagaaggggtcgggtgggtagggagagggtgttttagagggaggtggtattaagattttagatatttgggttaagagtagagggttacgttttgagttgttgtttgtggtattttattgtagattttggcgtttttgttaagcgatatagatatttttttttttttttatttttttttttttttttttatttttttttttttttttttttttttttttgttagggttgatttttttattaggtttaatagatatagtttggggtttatattatttttagggttttttttttaatgttttaattttttttataattagaagaaaaaaagaatttttagtaggaagaaaatgttgtaatattgtatgtgatattaatatatttatttttatattaatgtagttataatatagtatgtttgttttttttttatggagagaggtttaagtgttcgggggttataaaatttattatatggttttattttttgttttttatttttttttttattaattacggggttttaagtaattagtattgttttatggagtttcggttttattttttgtaaatgggttaataatggtgatgtttttttaagtaggatgaagtaaaataatattagaaaaagttttggttataaagtggtgtttgttttttttttaggaggttttgggattttgggagttaggcgggtgatgtatttgaaaattttagtggatggagtttttggtaatgttttttatgggttttttaagttaaatgtatcgttagatttttttttcgggtttgatttattatttttttgggttttttggtttttttaaagagtaaatgttttttttgattttttgagaaaatttataaggtatttgagtatattagatggattaaataatgtttttaaattttaacggaaagaaagtagttattatgacgggttttagtaaggggagggagttgggggtttttttgtttttttattgttgggattggatatattggggtttgtaatatttagtgtagatgaaaatgt

SEQ ID NO: 2456 - DNA, 2489 bp, Artificial Sequence
  chemically treated genomic DNA (Homo sapiens)
atatttttatttgtattgggtattgtaaattttagtgtgtttagttttagtagtaaaggaataaggaggtttttaattttttttttttgttggagttcgttataatggttgtttttttttcgttggaatttaaaggtattatttgatttatttagtatatttaagtgttttgtgagtttttttagagggttaagaaaagtatttgttttttagagaaattagggagtttaggaagatgatgggttagattcgagagaagggtttgacggtgtatttagtttggggagtttatagggagtattattagggattttatttattgagatttttaaatatattattcgtttaatttttaggattttagagttttttgaaaaggaggtaaatattattttgtggttaaagttttttttaatattattttattttattttgtttgggaaggtattattattattagtttatttgtaaaggatgaaatcgagattttataaggtaatgttaattgtttagggtttcgtggttagtgggaggaggggtggggagtagaaagtagggttatgtgatgaattttgtggttttcgggtatttaggtttttttttatgaaaaaaaaataaatatgttatattatggttatattggtataaagatgaatatattaatattatatatagtattataatattttttttttgttgaaagtttttttttttttttaattataaaagaaattaaaatattggagaaggggttttagaggtagtgtgaattttaggttgtgtttattgggtttaatggagaagttagttttggtaggaggagaggagaggaagagaaggaagatggagaggagggaaaggaggtagaggaagaagagaatgtttgtgtcgtttagtaaaggcgttaaggtttgtagtgaaatgttataggtagtagtttaaagcgtggttttttgtttttaatttaagtgtttgaagttttggtgttatttttttttgagatattttttttttatttattcggttttttttttttttttttatttatatttagtgattttgggagttttatttgttttagatattatttgtttaaagtaggtttttgttagattagatcggtttaagggttttgcgtgggatgtgtgtttgcggttatattttgtttcgttattttatttgtttttatgttattgtttgtttttatagattggacgtgttttttttgatttatattgttattttggtaggtattaattggtatgtagttagtaacgtcgttattttttgttgttattaacgtagttatttattttacggaaaatgattttaatttataaggtattataattaatattggatgattacggttattaatatttatggattgatatttttaggaggggatttgggtgttaattggtatttttttttgtgtttttttttttaatgagattttttttgatttttgttgttgttttagtttttagttttttagttttaaaggaaaatatcgtacggtgttttgttttatttttggttgatttttttattttatttttttattttttttaggttttgtaggtagtttagaaataggtttgttgttttaggggtttttgggtattgggaaaggtttggggttttggttgaggggaatttggttgtgaggagtagtaaggagagggagtttatgtttttattttagaggacgtggagagaagagaggtattagggaatgtgtatatttgtttagaaataaagtattgttttagatttttatatttttttttattattaattaaaaatgttttggtttttttatataagatggaatttaaattaattttttttaacgttttatttttgggttggttgaataaatgggggtgtttggggtatttgtatttggggtttagattggagaagatagattatatttttttttttcgtttttaggttttggggggtgttaggagttgatgttgtttgggttgagaagagagatgtatttgttatttttttttttttttaggtggaagatgtgttataaatagtagtatgttgttatggtaattaaggtgtttttttttaagagagagggagagtgttttgtttgtggtttttgtatggttttattatttacgtttgtgttttattagttgggttggggttaggtagttttgtataagagtgatatagttaggagggtattgggatgaaatggggtatttgtattttgataaaaggagtagttattgtttaatttttgtaaatagttgttatgtagaaaaatgggtataatgttgttaaattttttgattatcgaagagaagtgggaaatttggattaaggtatattgttttaattatttttattgttggtaaagaatgtaaataataatttttttttaagaattaaataaatatggattaaataaaacgtgtttatgaatcggttatttgggttgggtagtttggtagttattt

SEQ ID NO: 2457 - DNA, 2494 bp, Artificial Sequence
  chemically treated genomic DNA (Homo sapiens)
gtagtttgttttttagttaaatgggtcggagttggatatgggaaaggtgtaattaatattttgttgtgggggttaggtgtgaaggggtttattcggttatattttttttcgggttcgttttttttttagttagataggatgttgttagatttttcgtttggttttgaatttttttttgagaatttttttaaaatttaggttgatgttttttttttgtgagttttattttttttattttttagatgggtatgagaatagtttttggggtttttatataggttaaatgtaggaatgtatatgggaagtatttggtaaagtgtcggtatttgttaaatttttataaaaatggttttttggtatttgttttgtttttttgttgtgtgattttgggtaagtaatttaatttttttgagttttaggggaaaattatgatagtatatgttttagagagtggttgtaaaggtggttaattattttatagtaatttattatattcgaacggtttttaggtcggtttttttatttttattgaattttagtatatagattaggaaacggtatttttggggtagaaaatataattacgttttttgaaaatttattaaatgtgtaaaaaattttttggatatggagaaaaggtagaattttttagaatttgaatggtggtagttattgtgtttggagttgttttttggagagtgatagttgagggagaagattttatagggtttaagttggttaggttttgttattttttggtttggcgtttgatttttgagcggtgagggttagtgaggtgtttgggaggattggtaattcgcgggttttattggtattttattcgattaaggttatttattttttttttttcgtgtattaattgttttgattttaatatgtaaaggtttaattgtttggttttttgggtgtttgtttagtttatagggttttattttgggatagttgaattttttagggtgttgtagttttgtttgttttttttattttttatttggatattattttaatgtaaaggtatggttgagatatagaaatttttttgaaatgtattattgcggtttttattgatttttattgtgtgttttaatggtgggtttagtgggtgggggttgggaggggtggagtaggtgtatggggtagcggtgtttagtatttgttttagttatagttgttggtttattgtatggtaggtttttttaattcggggatatcgtatgtatagtgtttttttcggcgttttttgttttcgtcggtttggtgtcgattttatatttgttaggagtattatgaaggcgtttggggggcgagggatttaaggagtgggggtttgtgttttttgcgtgtgtatatagttttcgtttttagtttattatgttttagaatgtttttttttttttttgtttgggtttaggttttattatattttgggtatttattgtataggagggtagtgtttaggattttattaatagttttgggaagggaagggaggtgttgttttaattttggttttataaatggattttagttttttttttagatttttagagttagtttttagtttataagggtgaatttattttttttatttatatgaagatttagaatgtaattaataaattttttaggcgtggcgtgtggaggttgttgagtaatggtagagtggagtagtgtttaggtattttttttttaattttttatgttttttattttttggagtggcgagtttttatttttgttttatgagattgagtttagtttttaggcgttttataagtttttattgaatgtatgggttttattggagttattttttggatttttttttattttggtagtttagtgtggtattttaggtatttaggaggtgatggaatgaatttatttttagtttttaaattttatttagcgttgggattttataggcgggttttgattttgcgggtatattagattgggcgtgaggggattggagaattgtatgttttttaaaaagattatttagtattatggaatagtgtttagtatttagtaggagtttagtagattaaaaaaaaaattatagatagggttttgttttatcgtttaggtttgttttaaatttttggttttaagtaattttgttttattcggttttttagagtgatgggattataagcgtgagttattatatttagttttaatagatttttgtttaatgggttattgttatgattttttatttggaaaatgttgtattttttagaaaaaaataaattaatattattggtgtttttggaattatatagttttttggttggagtagggattgttatgaggtatgagtgagggggtagatttttttgaggtttttttaatttttaaaatagatttatttattttttaagggtttgttgaggatttattgggtatttagttttatgtgtaagattttttttaatatagttttggttaggtagatggtgtgttaggg

SEQ ID NO: 2458 - DNA, 2494 bp, Artificial Sequence
  chemically treated genomic DNA (Homo sapiens)
ttttgatatattatttgtttggttaaggttgtgttgggaaaagttttgtatatggagttgggtgtttagtaaatttttaataagtttttagagaataaataagtttgttttaaaaattaaagaggttttagaggagtttgtttttttatttatgttttataataatttttgttttaattaaaaagttatatagttttaaaaatattaataatgttgatttgtttttttttgggggatgtagtattttttaaataaaaggttataatagtaatttattaaataaaaatttattgaggttgggtgtggtggtttacgtttgtaattttattattttgggaggtcgagtgaggtaggattgtttgaagttaggagtttgagataagtttaggcgataaagtaagattttgtttataattttttttttaatttattgagtttttattaagtgttagatattattttataatattgaatagtttttttaaaaaatatgtaattttttaatttttttacgtttagtttgatatgttcgtaaggttagggttcgtttgtgaaattttagcgttggatggaatttaagagttgagagtgaatttattttattattttttgggtgtttagggtgttatattgagttattagggtaggagagagtttagaggatggttttaatgggatttatgtatttaatagggatttatggagcgtttgagagttggatttagttttatggggtagaaatggaaattcgttattttaaagggtgggggatatagaggattgggggaggggtgtttgagtattattttattttgttattatttagtagtttttatacgttacgtttgaagggtttgttgattgtattttaagtttttatgtgaatgagaagggtaagtttatttttgtgaattaagggttgattttggagatttggaaaaggggttggagtttatttgtaagattagagttaggatagtattttttttttttttttagggttgttggtgaagttttgagtattatttttttgtatagtaagtgtttaaagtgtgatgagatttgaatttaaataaaaggggaaggagatattttaggatatgatgggttgggggcgggggttgtgtgtatacgtaggaggtatagatttttattttttggatttttcgttttttagacgtttttatggtatttttggtaagtgtgaaatcggtattaggtcggcggggataaagggcgtcgaggggggtattgtatatgcgatattttcggattaaaggggtttgttatgtagtgggttagtagttgtgattggaataggtgttgggtatcgttgttttatgtatttgttttattttttttagtttttatttattgggtttattattaaggtatataatgggagttaatgaggatcgtaatgatatattttaaggggatttttgtgttttagttatgtttttatattaaaataatgtttagatgggaggtgagagaggtaggtaggattgtagtattttgaggggtttaattgttttaaaatagagttttgtgagttgggtaggtatttaggaggttaggtagttggatttttatatgttaaaattagagtaattggtgtacgaaggaagagaaatgggtagttttagtcgaataagatgttaataaagttcgcgaattgttagtttttttagatattttattaatttttatcgtttagaggttaggcgttaggttaggaaatggtagaatttggttagtttgaattttgtggaatttttttttttaattgttattttttaaagagtagttttaggtatagtggttgttattatttaagttttaaaaagttttattttttttttatgtttagaaagttttttatatatttagtaaatttttaaaagacgtgattgtgttttttgttttaaagatgtcgttttttggtttgtgtgttaggatttagtgggggtggggaagtcgatttgagaatcgttcgggtataataaattattataaagtgattagttatttttatagttattttttaaaatatatgttattatagtttttttttaaggtttagagaggttaagttgtttgtttaaagttatatagtaaggaagtagagtaaatgttaaggaattatttttgtgagagtttagtaggtatcggtattttgttaggtgttttttatatgtatttttgtatttagtttgtatagaaattttaaaagttgtttttatgtttatttgaaagatagagaaaatgaggtttatagaagagaaatattagtttaagttttgagaaagtttttaaagaaggatttagagttaggcggggggtttgataatattttgtttggttagggagggggcggattcgggagagggtgtggtcgggtgggtttttttatatttggtttttatagtaaggtgttggttgtattttttttatatttagtttcgatttatttggttgagaaataggttgt

SEQ ID NO: 2459 - DNA, 2472 bp, Artificial Sequence
  chemically treated genomic DNA (Homo sapiens)
attaaaggtatgagttataatatttagtttatgatggattttgagttaatttatgtttgatgtgcgtgaagggttaatgtttttttgttttttaaatttttttcgtatggttatttaattgttggtgtattatttgtttaaaagagtttttttttttgtgaaattatttcggcggttttgtcgggtattaattagtcgtttgtgtgtggttttgttttttgttattttgttttgacgttttttttttgtcgatattattttgttttgatttttgtgcgttttaagtgaattttgaaatttggtagcgttagttattcgattttattttttttaaaattgttttggtttttttaggttatttgtatttttttatgaattttagaatttatttgttatgtaaaaaaaaaaaatttgttagaattttgattgggattgttaaaattatttttaaaaattattgaagttgattttgaaatgtagtatgtaagggtttgggtgtgtaatttgtacgtgagttttagtgtataaaagaaagtgagagttagtaagtcgggttagaggggataaaggagagagtggtggcgtatgtgtttaggttttcgtcggtttttgagagtttttttttttttagagtgattatagggtgggtaggaggttttttaggatttttggagggtgtgtttttttattaataatgataaagggtgtgatgtagattttttaattttattatatgtgaaaagagtgtttattgttgaaaggattaaataagataagacgttgagtagttgagttgtaaatgtttgtggattgaagtttaaagttagtttatatagatttatttatttgtttattttttgtcgtggttttttgtgttttagttattattatcgttttatggcgtatggttgacgtgttgttttgtaaagggttaggcgttattttttagtatgtattattttttattggtttcgtttttggggtttatgatatatattatttggttatttttattttggagtattataggttaaattagttagtaattcgtggaattaatttacgagtggtgtttatttttggataatggtttagtggaggggttggtttgtagtttatatttattatggttttgttgaatggtgttcgttagattttgtataatcgaatttagtttagttttatgaaggttttgtataagttagtttttttttttcgttatttgatggaataatagatttataggagaatttatttgtaattttaagtttcgagttaaagacgttttaagggatgaacgtgggtgatttgtggaatattgcgatgtatttatgagatagattgtacgtttatcgcggcgtttaaagaaattagatcgggttgtattagaggcggtgttgtaattcggttgttttttgggaaagaatgtaagtttttagtgtgcgaagtatgaggggttgtagaggaaattgttttggtggttttggttttgggagtaagtatttgtttttcgtttatttaagtatattagcgagttttataaatatttaagtggtttacgagatgttttatttttaggtttcgttttatttttttcgttgttatatagaggttattagaaattacggttttttgggtttgatagttaggtagataggattaggttaggttgtagttgttaatttttgcgttggtaatttttagattttttgtataatgttatcgtttagttatttttttttgggttgtttgtttttatggggtttttgtaattaaaaaaaataataatttatttttattttttttttttaatatgttttattaataattgtgtaaatttgtttattttttaggattttattatgatgtaaagtagataaaataattaatttgttttttttttttttggtatatgggtgttttgtagtttttattttttttaattttcgttttacgtttacgagtatgaagttgaattaatttatgttttgttgaagtcggattgtgagattgtgtaggtagacgtggttttttttttgagtttgtaaagtagtagaatttatgataatgggtttcgtagtaatagggattgattgcgttatgttgtttttgtttatttttatagcgtttaggagtttgtatgttattattgggattattttatagaaaatagaggtttttaggggtaacgtaatttgttttaggataggtagttataaggtagagaaaggagggttggatttgtatttgtgaaattatagttttggggtatggtttttgagatttatagttggggttgaagatttttaggggggttttgttgggtttattgttttttagagtggtttagttcggttgtagggtgttgtttttagtttggtgtattgcggtcggaggaggtggaggatggaaagtaagatttaaagatagggagtgtaaggggatagtgatatttgaggatttcgaggagga

SEQ ID NO: 2460 - DNA, 2472 bp, Artificial Sequence
  chemically treated genomic DNA (Homo sapiens)
tttttttcggagtttttaagtattattgtttttttgtattttttgtttttgaattttattttttattttttatttttttcggtcgtagtgtattaagttggaagtagtattttgtagtcgggttggattattttggagagtagtgagtttagtagagtttttttagggatttttagttttagttatgagttttagaagttatgttttagggttgtggttttataggtgtaggtttaatttttttttttttgttttgtggttgtttgttttggggtaggttacgttgtttttgggagtttttgttttttgtaaaatggttttagtaatggtatgtaaatttttgagcgttgtaaggatggatagagatagtatggcgtagttagtttttgttattacggaatttattgttatgaattttgttgttttgtaggtttagaagaaaagttacgtttgtttatataattttataattcggttttagtaaagtatgagttaatttaattttatattcgtgaacgtgaagcgggggttggaaggaatgaaggttgtaggatatttatgtattaagaaaaagaaagataaattggttgttttatttattttatattatgatggagttttaaaaagtaaataaatttatatagttattaataagatatattaaaagaaaggagtgagaataagttgttgttttttttaattgtaggggttttatgaaggtaggtagtttagggaggaatgattggacggtgatattgtgtagggggtttggaagttgttagcgtaggggttagtagttgtagtttggtttggttttgtttgtttggttgttaaatttagaagatcgtggtttttggtggtttttgtgtgatagcggaggaggtggggcgaggtttggaagtgaagtatttcgtgagttatttaagtgtttatgaagttcgttaatgtgtttaaatgaacgagaagtaggtatttgtttttaggattagagttattaaagtaattttttttgtagttttttatatttcgtatattggaagtttgtatttttttttagaggatagtcggattatagtatcgtttttaatgtaattcgatttggtttttttgagcgtcgcggtgaacgtgtaatttattttataaatgtatcgtagtgttttataaattatttacgtttattttttgagacgtttttaattcggggtttagagttgtaaatgaatttttttatggatttattattttattaaatagcggagagaggggattagtttgtgtagagtttttatagagttgggttaaattcgattatgtaaagtttaacgagtattatttagtaaaattatggtgggtgtgagttgtaggttagtttttttattgggttattatttaggggtaaatattattcgtgggttagttttacgagttattggttgatttgatttgtgatattttaaggtggaagtaattaaataatatgtattatgagttttaagaacgaagttagtggagagtggtatatgttagagggtaacgtttggttttttgtaggatagtacgttagttatgcgttatgggacgatggtggtggttgggatataggaggttacggtaggaaatgggtaggtgggtgggtttatgtaagttggttttagattttaatttataagtatttgtagtttaattatttagcgttttattttatttaatttttttagtaataaatattttttttatatgtagtaaggttaaggagtttatattatattttttattattattaataaagggatatattttttagggattttagggaattttttatttattttgtggttattttagggaaaggaaagtttttagggatcgacgggagtttgggtatatgcgttattatttttttttttattttttttagttcggtttgttggtttttatttttttttgtgtattagaatttacgtataagttgtatatttaaatttttgtatgttgtattttagagttaattttagtgatttttgagagtgattttgataattttagttaaaattttagtaggttttttttttttatatgataagtggattttaaaatttataggaaaatgtaaatgatttagaagagttaaagtaattttggaaggagtaaagtcgaatggttgacgttattagattttaagatttatttgaaacgtataggaattaagatagggtggtgtcgatagaaggaaggcgttagagtagggtgataggaggtagggttatatatagacggttgattgatattcgataaaatcgtcgaggtaattttatagggaaaggaatttttttgaataaatggtgtattaataattggataattatacggaaaaaatttaaaaaatagaagaatattgattttttacgtatattaaatataaattaatttagaatttattataggttgggtgttgtggtttatgtttttaat

SEQ ID NO: 2461 - DNA, 2474 bp, Artificial Sequence
  chemically treated genomic DNA (Homo sapiens)
ggatttgattagtttttgttaaattgagtatataagcgaggatgtatttaaaggagtgttagtgtattttttataaattttaaacgtagggtaagttggtttatgttattgttgaaaagtagtgtgtgttcgaggaagggtcgtattatatcgggtgtggatggaattatgtttttttgacgtgtagatttttcgaatattttatttgtagaatttgtttttaaataaatattattattattaggttagtgaaatatttttatatcgtttatgtttattatttgttgtgtaaatatttgtggttttaaaagaataatagatcgtgagaattttagtaaaatgattgtagaattaattatttttttaagtagaagtgatatttttaataggtttatttagacggttttagttttcgttttggggttttatattaaattttatttaggttgtttgtagtgaggggtagaaggttgcgttatagagatttaaaggtaaaacgtggggtgtttgtttgtatttagtggagttttatttacgattagtgatttttagagataggtaagggtgttaggaggttttcgggatgtattgaagtagttttttttaggaaataagcggtaaagaagaattttaattttttttatgttgataaaaaaatatatacgtgtgggaatgtatgttttgggtttgagtattgattttttttttgtagtttttcggttttggtattgttggttttaggggttgaattattttatggtgggggttgttttgtgtattgaaggttgtttaatagtgtttttggtcgttattttttagatgatttttaggtgtattttttttttttttttttatttttaggtatgtgaattataatgtttttagacgttgttagtgtgttttggagattaaagtaatttttgattgagaatcgttgtttaggaagatatattttttatttgtttgttgttttttaatgtaatttatagttgagagatattttgttttatttaggtgtgaagtatttcgttttatttggaaggttgggtatatttaaatattatttttttgtacgtttatttgtcgtagagtggttaatgttttttaattggtgtagtaaatattttagagttttttttgttatgtcggagttatttagaaattagttttgaaatgtggttgttattttagggattattatatattatttgttgtttggtgttaaattttgagtcgttgttatttaatattgattaataaatggtaggttgttagtatcggtagtgaagatattttaaggagttattgtttttttaaattaaaatatttaaatatttaaatttagggttggtttttatggttcgttttaattattttttttgttttggtatatttttttttttttgattatatagttgttacgttagtagtatttggagtcggaatacgatagttttttttttattagttgttattattttcgtaaggaaagttggaagttgttggagtagatgttaattttgagagaagattgttggttaagttattaaaatgagcgtattcgaaggttgcgatttatatgatttatacgcgggtagggtttgtaggatcgggttttgtttggttttgtatgtgtgtgtgtgtgtggatttgtgtatgtgtgtttttttgtgtggtgtgtttgtgtatttgtttgtttttgtgtgtgtgattgtgtgtatttttttatgtgtttatatttttgtgtgtttgtgtatgtgtttgtgtgtgtgtatgtttgtatttttgtgtgtgtgtttttgtggatatttgtgtgtgtgtttgtgtgtgtatttgtgtgtgtgattgtgcgtatttgtatatgtgtttatatttgtgtgtgtttgtatttatgtgtgtgtatttttgtggatatttttggttgtttgtgtgtgtgtttgtgtgtgtatttgtttgtgtgattttgtgtgtgattgtgtgtatttttatatgtgtttttgtatgtttgtgtgtgtatgtttgtatttatgtgtgtgtgtttttgtggatttttttatgtgggtgtttgtgtatttgtatatggttgtgtttttttttgtgtattttgtgtgtgtttatgtgtatttatgtgtgtgtgtgtatgtgtatgtatgtgtgggtttttttgtgtatgtatttttgtgtatttgtacgtgtgtttttttgtgtgtgtttgtgtatatttttgtgtttttgtatgtgtgtgtttatgtgtgtttgtgtgtgtatttgtgtgtatttgtatatatgtgtatgtgtgtgtgggtttttttgtgtgtgtatttgtgtgtatttgtatgagtgtttttttgtgtgtgtttgtgtatatttgtgtgtttttgcgtgtgtttttgtgtattcgtatgtatgtgtatttttgtgtgtttttgtgtatatttgtgtttgtgtgtatatttgtgtgtatatgtatgtgt

SEQ ID NO: 2462 - DNA, 2474 bp, Artificial Sequence
  chemically treated genomic DNA (Homo sapiens)
atatatatatatatatatagatatatatatagatatagatgtatataaagatatataaagatatatatatatacggatatataaaaatatacgtagaaatatataaatatatatagatatatatagagaaatatttatgtagatatatataaatatatatataaagaaatttatatatatatatatatatatatagatatatataaatatatatatagatatatatagatatatatatgtagaaatataaaaatatatatagatatatatagagaaatatacgtgtagatatataaaaatatatatataaagaaatttatatatatatatatatatatatatatatatagatatatatgaatatatataaaatatataaagagagatatagttatatatagatatatagatatttatatagagagatttataaagatatatatatatagatatagatatatatatatagatatatagagatatatatagagatatatataattatatatagaattatatagatagatatatatatagatatatatatagataattagagatatttataaagatatatatatatagatatagatatatatagatatagatatatatatagatacgtataattatatatatagatatatatatagatatatatatagatatttataaagatatatatatagagatatagatatatatatatatagatatatatatagatatatagagatatagatatatagagagatatatataattatatatatagagatagatagatatatagatatattatatagagagatatatatatatagatttatatatatatatatatatagagttaagtaagattcggttttgtaggttttgttcgcgtataaattatatgagtcgtagttttcggatgcgtttattttaataatttagttagtagtttttttttaaaattaatatttgttttagtagtttttagttttttttgcgaaaataatggtagttaatagggaaagggttgtcgtgtttcgattttaggtattgttggcgtgatagttgtgtgattaggagaagaaaggtatgttaagataaaaggaataattaaaacgagttatgagaattagttttggatttaaatgtttaaatgttttaatttaaaagaataatggttttttgaagtgtttttattgtcggtattgataatttgttatttattaattagtgttaaataatagcggtttagggtttaatattaaatagtagatgatgtgtgatgatttttaaaatagtagttatattttagggttgatttttaaatgatttcggtataataaggaagattttggaatatttattgtattaattaaagagtattaattattttgcgataaataagcgtgtaggggagtggtatttaaatatgtttagttttttaggtaaagcgaggtgttttatatttaggtggggtagggtgttttttaattatagattatattaaaaaataataaataaatgaaaagtgtgtttttttaggtagcggtttttaattaggggttgttttggtttttaagatatattggtaacgtttaaagatattgtgatttatatatttgggggtggaggaaggaagaaggggtgtatttaggggttatttaaagggtggcggttagggatattgttaaataatttttaatgtataaggtagtttttattatggggtgatttagtttttgaggttaatagtgttaaggtcgggggattgtagaaaaaggattagtgtttaaatttaagatatgtatttttatacgtgtgtatttttttattagtataaagagggttaaaatttttttttgtcgtttgttttttaaaaggagttgttttagtgtatttcgggagttttttgatatttttgtttgtttttggaagttattgatcgtggatgaggttttattgggtgtaggtaagtattttacgttttgtttttgagtttttgtaacgtagttttttgttttttattgtaggtagtttaagtggagtttaatgtagaattttaaagcgaaggttggaatcgtttgagtgggtttgttagaaatgttatttttatttaaaagggtggttagttttgtaattattttattggagtttttacgatttgttatttttttaaagttataaatatttgtatagtagatgatgagtataagcgatatggggatgttttattgatttgataataatgatgtttgtttaaaaataggttttgtaagtggagtattcggagggtttgtacgttagggaggtatggttttatttatattcggtgtgatgcggttttttttcggatatatattgttttttaatagtggtatgagttagtttgttttgcgtttgggatttataaaaagtgtattaatatttttttaaatatattttcgtttatgtgtttaatttagtaaagattgattaaattt

SEQ ID NO: 2463 - DNA, 2481 bp, Artificial Sequence
  chemically treated genomic DNA (Homo sapiens)
tattttgattatgttttgtttttagtagagataatagttttagagaggttaggatttttatttaaggttatatagtttaaagtatagaattgggttttgaattttaaaagttagattaaagagtttattttgtagttattttgttgtgtgtagtcgagaatttcgtgggggttagttgtgtttgagaaagtatgtgaggaaattgaagtttttttaaaatcgtgggggtggttttatcgtttttgtttttattgtttttgagttagttgtaaagaaaggaatttttttgtagagtatcgttttgaaggaaaatttatttggggaaaaaaaaaataattgttttcgttgggagtaatttttaaacgggagtttacgcgtgggtttttcgtttgttgttttaagtaaattagttatttttattgtagaatggttgtaaaggaaatggagaaaaggtagagcgtagttttgggagttgttttttagtttgggggtcgggtagggggaaataggtgttatttgggtttagacggggcgatgtttgggaggagaggttggaggaatcgggtttttttattacggggttttgtttgtggttatcgtcgtttatagaggttttataggtgtatgtagcgttttttttcgtttttttggttgttgttttttgcgggatagtcgtaggttggttttcgttggaggggttttttcgaattttgtttattttgggtttggttttttttaatatggtagttggggaggtagaggaggcggcgtgtttattttgttattgtcggggtttgatttattaataggtttggatagcgttttttttttttttacgtttttattgttaattgtttgtttgtagagcggttagttttgttttagtagcgcggcgagtcgtagtttcgtcgttgacggtgtgttcgcgatgtgttgtggggtttcgtcgtggcggttgtggacgggttgaggtttttttttggatgtttttagagtggtagggagtagtttgggtattttttacgttcggtataattcgttcgggttggtagttagagaagttaggtagagaagtgcggttagagaggttgtttaatttaattttttcgggttgggttatttgaaagtttaaaattttttaatattaagagacgggcggtatttaaatttaagtttggtttttaaatgaaattttttcgtttaattgtttaattttatttggaaatatgaaatggtaatttgattatatgttaaggtagttttggtcgggggattagagtcgaaatttttgtttttttgagtttattttttagcgaatggaatttatttaaattaggaattagttttgttatcgcgggcgagtcgtaggtttggtggtttggagggtggggtattttgaggttgcgggattttagttattttgtatggttaggataagggggcgtttagagttttgcgttttttaagggaggttggaaggaaacgtttaattgtgtgttttttagagttttagtaaattattcgatgtttataaattgttagtgaaagttatttgtaagaaaagttttatttttagtggttttgtagtttagaaaatttaaaattgaaaaatatacgttatttaggaaggataggagaaacgagaataggttttatcgttgtagagcgtgaggtcggttttcgttgcgtttgtttttaggaggcggtgtcgagacggcggaggtaatggaagtagaaacgagtgaaatttttttgttgtgtttagtaagtattttttgttaaggaagttgttaaatttataaatgtttttgttaagagagaggcgtttgttttttatacgagtttgttgttggtaaggaggtacgatagaaaacgtgttaagttgggattcggagtaggtggtggaaatagtagtttgtaggatgtcggttttgtttgtatggcggtttgagagtcgttcgaattgttgtgttgaggacggggttggagattcgtttttaggtgaggggttggtttttgtaggttttgttttgtttttgaggtattattagacgggtgttattagttatatggtgtaggtgaggagatagaggatcgaggcgggtagaagtgataggagaggtaaagagttgttttttgtatagttattgtttatgttgtttgattattttttttcgtcgtttagtttttgtatttggtttcggttttatttattgttggttattagttatttggaggttagttatattcggggggtagttttgttgtttggatttttgagttatatcgaaagtatttagttttttttttttttgaagtttttaggttttgttttttttttattatatgggtttttttttgagtattttttttgttttttttgtggatttgtttagttttcgtttggtgggtgtgttaggtttttgttgttttagtgtggggattttttaggggagggagtggtcgtagttttagaagtgt

SEQ ID NO: 2464 - DNA, 2481 bp, Artificial Sequence
  chemically treated genomic DNA (Homo sapiens)
gtatttttgaggttacggttatttttttttttggaggatttttatattgaggtagtagaaatttgatatatttattaggcgagagttgggtaggtttatagaggagataggagggatgtttagaggggaatttatatggtaaggagagggtaggatttggaggttttaggaggaagggggattgagtgttttcggtgtggtttagaggtttagatagtagagttgtttttcgggtgtggttgatttttaggtgattggtggttagtagtgggtgaggtcgaggttagatgtagaggttggacggcggagaggggtggttagatagtatggatagtggttgtgtaggggatagttttttgttttttttgttatttttattcgtttcggttttttgtttttttatttgtattatgtggttggtgatattcgtttggtgatgttttagagataaaatagaatttgtagaggttagttttttatttgagggcgaatttttagtttcgtttttagtatagtagttcgggcggtttttaggtcgttatgtaggtaggatcgatattttgtaaattgttgtttttattatttgtttcgggttttagtttgatacgttttttgtcgtgtttttttattaataataagttcgtgtggagagtaggcgttttttttttggtaagaatatttgtgagtttggtaatttttttgataagagatatttgttaaatataataaaaaagttttattcgtttttgtttttattattttcgtcgtttcggtatcgttttttggaagtagacgtagcgggggtcggttttacgttttgtagcgatggagtttgttttcgttttttttgttttttttgggtggcgtgtgttttttagttttgagttttttaagttgtagagttattggaaatggagttttttttataaatgatttttattgatagtttataaatatcgagtgatttgttagggttttgggaagtatatagttgaacgtttttttttaattttttttggggaacgtagagttttgggcgtttttttattttggttatgtagagtaattggaatttcgtagttttaagatgttttattttttaggttattaggtttgcggttcgttcgcggtagtagaattgatttttaatttggatggattttattcgttggaggatgaatttagaggggtagagatttcggttttaatttttcgattaaagttattttaatatgtaattaagttattattttatatttttaaataaagttgaatagttgaacgaaaagattttatttgggagttagatttaaatttaaatatcgttcgttttttggtattagggagttttagatttttaaataatttagttcggggaaattgggttggatagtttttttggtcgtatttttttgtttggtttttttaattgttagttcgggcggattgtgtcgagcgtggagagtatttaggttgttttttgttattttgagagtatttagaggaagattttagttcgtttatagtcgttacgacgggattttatagtatatcgcggatatatcgttaacgacggagttgcgattcgtcgcgttgttgagatagggttggtcgttttataggtaggtaattagtagtgggggcgtgggaaggaggggagcgttgtttagatttgttggtaaattaggtttcggtagtgataaggtagatacgtcgttttttttgtttttttagttgttatgttggagagagttagatttaggataaatagaattcggagaagtttttttagcgagagttagtttgcgattatttcgtaaaaggtagtagttaggaggacggggaggaacgttgtatgtatttgtgaagtttttgtggacggcggtggttatagatagggtttcgtggtgggaaggttcggtttttttagtttttttttttaggtatcgtttcgtttaggtttaggtggtatttgtttttttttgttcggtttttaggttgggaggtagtttttagggttgcgttttgttttttttttattttttttgtagttattttgtagtgaaaatggttgatttgtttgaagtagtaagcgaaaaatttacgcgtggattttcgtttggaaattgtttttaacggagatagttgttttttttttttttaagtaagtttttttttaaagcgatgttttgtagagaaatttttttttttataattaatttagagatagtgaaaatagggacgatggggttatttttacgattttgggggagttttagtttttttatatatttttttaggtataattgatttttacgaggttttcggttatatatagtagggtggttgtagggtgggttttttagtttgatttttggggtttaaagtttagttttgtattttgagttgtgtgattttgagtgagaattttgatttttttgagattgttgtttttgttgggaatagagtatgattagggtg

SEQ ID NO: 2465 - DNA, 2425 bp, Artificial Sequence
  chemically treated genomic DNA (Homo sapiens)
gttattaagaagaagaagaggggtttagaggtatgtagaatttagttgaaaaagaataatttatttatgtttgaagttttaaattagttttaattatttttgttaagagttgaggaagggatttaggagaaaggggattaaatttattttttttttttttacgaattttagtataatttgttttaagttaatttttattgaatgttgtgggttgattgttattttaagttatttgttttttttaaatattttaagaagtgttttgatttattttatagatgaagaaattgagatttaaagaggttaagtaattttttaagtggcgaatataggtggtagagaagattgaagatttaaattttggttgttagtttttaaaatttgaatttattattgatttttatggtattggtttggattagattatttttaatattttttttaattttgagattttaggattttttgatgttaggatattataaatttattataatttttttaaatttgttaaattaattttagatttttatgattatagatatgatatttttagaattaatatttaaattaaggtaggattattatatagaaaatataattgagtagaatttatttttgttatgttgttttttttagaattgattttaaaatatagcgttatgtttgttagagttagttatttgtaatgtgttagaatttcgattttaggtaagtgttaggagttaaaatgtaggtttttttaaatttttaagtagttgcggtgttaagttgatttcgatgagttgagtttttattgagtagtttaaatgattagattgtaattaggggttttatttttttatttacgaagtattagggtagttaaggggaaagattgacgtagaaggaatgaggtttttatgggttgggtttaaaagatttagagcgagtgtttagttgaaatatttgttaaaattttaaggaatatttatataaaaataagaagttgttcggtatagaagttagggtaggggatgtttttcgaaggttatattttatggtaggtatatagtagtacgtttaaatatggtttttgttaaggttagagaggtattatttatatagaagaagttattatcgtgattttatttatttcgcgtttttatcgcgtaattgaatgttgagtgtggacggtattttttttagtatttggttgcgttatcgtgtttagttggtaagttttgggggagaagagaggtttagaaggaagattatttgagtttattagaataatgtgtgtttttaataaggtaggggcgtttaaatttagtaggtttaatagattaagttatgttatgaaggttttgtggattatttattttcgttaattagttattatttaaaagatgagaaaacgttagtttataggttaaatgggaggtatttagaagagatattaatgaagagatgtttggttttgtattaattattgtaggtaaattaatattaaatgttaggaagtaaagtagaggtatttttttattataaatttttgggataagtttagagattattagtagtttagggtttgtgtacgttgagaattgaggggataatagaattgtgtaatattttggtgttttatcgttttcgttattaaattttatagtttatagtatcgttttggtatattgggtttgtgtaatatttatggatttgatttggaattataaagcggatttagtttttgttatatttatttattttagtgattttgggtatatattgtgtttttgaaggaggtatagtggttataaatggaaatagtatttgtttgtttttggggattttggttatagatttttgaggtttttttgggagttagtttaagataatgggtaagagtatggattttgaaggtagagttttttgtttggaattttagttttgttattttttaattgtgtggttttaataagttatttagtttgtttgtgatttaggttttttatttataaaatgggtataatagtttttattttatagggttgttatggtgattcgtgggttaatattaaaggagattttttaattttagtattattgatatttggggtcggataattttttgttttgggggttgttttgagtattatgggatgtttagtaatttttttattttttacgaattgttgtgataattaaaattgtttttagatattgttatatgttttaaatattttttaggggggtaaaattgtttttagttgagaattattgtattagattatgtcgtagatataaatagttaaatattagtaattttacgtggtttaatttaataattataaagtatttaatagttaaaattttttgaattttgtagatatatttatgtgttttatttgggataaacgaatttaatgtttttattagacgttta

SEQ ID NO: 2466 - DNA, 2425 bp, Artificial Sequence
  chemically treated genomic DNA (Homo sapiens)
tgagcgtttggtgaaagtattgggttcgtttattttagatgaagtatataaatgtatttataaagtttaaagagttttaattgttaaatattttataattgttagattgaattacgtgaaattgttgatatttggttatttgtatttacgatataatttaatatagtggtttttaattggaggtaattttgtttttttaggaaatatttgggatatgtggtaatgtttggagataattttggttgttataatagttcgtagagggtagggaggttgttaaatattttataatatttaggatagtttttagaataaagaattattcggttttaaatgttaatggtattgaggttgagaaattttttttaatattagtttacgaattattatgataattttatgaggtaggaattattatgtttattttatagatgaggagtttgagttataggtaggttaagtagtttgttaaggttatatagttgggaaatggtagggttaggattttaagtagaggattttgtttttagagtttatatttttatttattattttagattggtttttaggaaagttttagaagtttatgattaaggtttttagaagtaggtaaatgttatttttatttatggttattgtgttttttttagaggtatagtgtgtgtttagagttattggggtgaatgaatgtaatagaagttgagttcgttttgtgattttaggttaagtttatgagtattatataagtttagtgtgttaaggcgatattgtgaattgtgagatttggtaacgggggcggtggggtattaaggtgttgtataattttgttatttttttagtttttagcgtatataagttttggattgttggtggtttttgggtttgttttaagggtttataataggaaaatgtttttattttattttttggtatttggtattaatttatttatagtaattaatataaagttagatatttttttattggtgttttttttaaatgttttttatttggtttgtgagttggcgtttttttattttttaagtggtgattggttggcgggggtaggtggtttataagatttttatagtataatttggtttgttggatttattgagtttgggcgtttttgttttgttaaaagtatatattgttttgatggatttagatggttttttttttgaatttttttttttttttaaggtttgttaattgagtacggtaacgtagttaagtgttggaagaagtgtcgtttatatttagtatttaattacgcggtgggggcgcggggtgggtagagttacgatgatgattttttttatgtgaatggtgtttttttagttttaataggaattatgtttaagcgtgttgttgtatgtttgttatggagtgtggttttcgaagaatattttttattttgatttttgtgtcgagtaattttttatttttgtgtgggtgttttttgaggttttggtaaatgttttaattaagtattcgttttaggttttttggatttagtttatgggaattttattttttttgcgttagtttttttttttgattgttttagtgtttcgtgggtgagagaatgaagtttttggttatagtttggttatttgaattgtttagtaagaatttaatttatcgaaattagtttggtatcgtagttatttggaagtttgaaggaatttgtattttagtttttagtatttgtttagagtcgaaattttgatatattataaatgattggttttgataaatatagcgttgtgttttagggttaattttgaaaagaataatatggtaaaggtagattttatttagttgtgttttttgtgtaataattttattttgatttaaatattgattttaaaagtattatgtttgtaattatagagatttagaattggtttgataaatttaggagagttataataggtttataatgttttgatattagagaattttagaattttagagttggaaaagatgttaaaggtaatttaatttaaattaatgttatggagattagtggtaaatttaggttttggaggttgatagttagagtttgaatttttaattttttttgttatttgtgttcgttatttggaaagttatttaatttttttgggttttagtttttttatttgtaaaatgggttaaagtattttttagggtgtttgagagaagtaaatgatttagaatagtagttagtttataatatttaataaaagttagtttagaataagttatattgaaattcgtaaggagaggaggaatgagtttggtttttttttttttaagttttttttttagtttttaataagagtagttaaagttggtttagaattttagatataagtgggttgtttttttttagttgggttttgtatgtttttgggtttttttttttttttttggtagt

SEQ ID NO: 2467 - DNA, 2492 bp, Artificial Sequence
  chemically treated genomic DNA (Homo sapiens)
aattaatttttaagtgtatttttaaatgtatttttttagttgttaggtagatgagtattttttttttgtgaatttatttttaattttttttttttagttatttattgtacggtattattaatattttttagtatttttgttttggagtttaaagtgatatagttggtaagaagttgcgtaggggttggagtttatatttgttgggtattagagtttttgttttgagttatttgttcgtgttgggatcggtaggttatttttatagtagattatttttatttatttttagtgttttagtacgtagttttttgggaatttagattatgatattttttttgggaagtggtatggagaattttggttaggtgttttaagttaagtttatgttaatgatattagggtatagagaagttttttgtggtttatggggaggtgggaatatttgtaatacggtttttttaattttatttcgttaggattggagagtacgaaggagttcgtttttttgtaaaaatgggtagttagagggttttgggggttaaatggatatttttttgtttgtagttttttgtagtttttttatgtagataggtatggttaagttttgtggagttgataggtgtattttgattttagagtattgtgtgggtttttaggggttgtaggttattgttgtttttttttttttttttattataaaaggtaggtttttcgagaagtattgggcgtatgttttcgagtgaggggttttggtttatagggtagcggttggggtagagttgttggattggtgagtttattgggagtttttagttttgggttaggtttatatagagtttggggtgggggttaatgttattgttgaatgtgtttttttttagtgatttttaaagggagatgaaagttaaaaataattttggtgggggaaatagttggtggatagcgggttagtgatgggggtgggtaggaggatgtggtattgtcggggggaggaagtagattaaatgtttttttttttttaagtcgtaagggacggatagtattatttgtggtttttgtggttggtattttttttgtagtgtttttttgttaggagtttttttagataataagttgtagaagagagtaggagatggagtaggtattgtgtgtatcggattgaaatttttaagtgttttttgtatttgttttagtgttagttatagtttaggtttttaacgtttttcggttttttatgttggaagtttttttagtagatggttttatggttagagttggttttttgtgagttttgttgttgttttaattgtagtgtttattatttgagttttttttcgcgagttatttttattcgttaaagtgaatttaggtcgattttgtttttgttgtgtttggtttgttatttattttttgttatgagtgattttaaatatgttttatgatcgaagagttttgagtagagagaatttagtagttttttaggagttatatttgtttttattttaattatttttttgtgatattgtgggtttgttttttatttgttatttttgatttaggttttaagatatatgtgatttattttattttagtttgataattagagataattcggtgtaattatatgttttttgatagtaattggggtatgagagtataggtggttagggagtgtgggtggtgttaggtttttatagggtatatattgtggtttacgtcggttttttttttagatgatatgttatttttattgttttgtgatatttggaaatagtattataagatagtttttttaaggttttaaagtttttttttgttaaggatggtgattagtttattttagttttttgagaataaagtaaaaggaaatgattattattaaaatagaatataagaatgatgtaaaaaaaaaagggttttttgtagtaaaattataaaagggttgtaaagttttagaattttttttattgatgttttgtaaaatataggtattgggtttatgttttttagcgaggggttttggtttatagggtagtggttttttaggcggagtgtttataggtggtttagatgttttattggttttgtttttttttagtttgcgtttcggatagattgggtagtgtgcgggaattattttgcgttttattgttttttgtttatattgtttttgtatttatttgaattgttttagattattttggtcggttgttttttttagggtttttgcgaatattttttttttaggaaattaagttagaagatgtttttttttttttggaattttttttgtatttgattcgtatattttttaggttttggtcgttgtttttgttggatggattgtagttttttagggaaggtttttattttagttttttttgtgttaattgagtatttgttatatttaagtatcgggttcggtattggggattttttgagtgaaataaaggttttttgtttttatagagtttacgttttttattagaaag

SEQ ID NO: 2468 - DNA, 2492 bp, Artificial Sequence
  chemically treated genomic DNA (Homo sapiens)
ttttttagtagagaacgtaagttttgtgagggtaaggaatttttgttttatttaaggaatttttagtatcgagttcggtgtttgaatgtagtaggtgtttaattaatatagggaggattggaatgaaaattttttttgaggggttgtagtttatttaataaggatagcggttagggtttaagaagtgtacgggttaagtgtagagggagttttaaggagaaggagatattttttagtttggttttttaaaggaggaatattcgtagggattttgaagaaggtagtcggttaagatgatttggggtagtttaggtggatgtaggagtagtgtgaataagaggtagtaaaacgtagggtggttttcgtatattgtttagtttgttcggagcgtaggttgaggaagggtagggttaatgagatatttgggttatttgtgaatatttcgtttggggagttattgttttgtgagttaaggtttttcgttgggaggtatgagtttagtgtttgtgttttgtagagtattaataaaagaaattttagaattttgtagtttttttataattttgttgtaagaagtttttttttttttatattatttttatattttattttaatagtagttatttttttttgttttgtttttagaggattaagataagttaattattatttttggtaaaaggagattttgaagttttaaaaaggttgttttgtgatattatttttaagtattataagatagtaaaagtggtatattatttgggagaggggtcgacgtggattatagtgtgtgttttgtgaaagtttggtattatttatattttttgattatttgtgtttttatgttttagttgttgttaggaagtatgtgattatatcgaattatttttagttgttaggttgggataaaatagattatatatattttaggatttaggttagggatggtaagtgaaaagtaggtttatagtgttatagaggggtaattaaagtaaggatagatgtggtttttgaagggttgttgaattttttttgtttagaatttttcgattatagggtatatttgagattatttataataaagaatagatagtaagttagatatagtaaaaataaagtcggtttaaatttattttagcgagtgaaggtggttcgcgagagggggtttagatgataggtattgtagttagggtagtaatagagtttataggaggttagttttggttatgaggttatttgttaaggagatttttagtataagaggtcggagggcgttgaaggtttgggttgtggttggtattggggtaggtgtaagagatatttaggagttttaattcgatgtatatagtgtttgttttattttttgtttttttttgtagtttattatttgagagaatttttaataggaagatattgtaggggaaatgttaattataaaggttatagatagtgttgttcgttttttgcggtttgagggaaaaggagtatttggtttgtttttttttttcgatagtgttatatttttttgtttatttttattattggttcgttatttattagttattttttttattaaaattatttttaatttttatttttttttgaaggttattaggagaaagtatatttaatagtggtattaatttttattttaagttttgtatgggtttgatttaaggttgggggtttttaatggatttattaatttagtagttttgttttagtcgttgttttgtgagttaaggttttttattcggaggtatgcgtttagtgtttttcgggaaatttgttttttgtgatgggaggggaggaggaggtagtagtgatttgtagtttttgggagtttatatagtgttttgaggttagaatatatttattaattttatagagtttggttatgtttgtttatatggggagattgtagaaggttgtaggtagaagggtgtttatttggtttttagaattttttaattgtttatttttgtagggagacgggttttttcgtgttttttagttttaacggaatggagttaaagaagtcgtgttgtagatgtttttatttttttataaattatagaaaatttttttgtgttttggtattattggtatgggtttggtttagggtatttggttaggattttttatattattttttaaaaaaggtgttatagtttgagtttttagagagttgcgtgttagaatattgggaatggatgggaatggtttgttgtgggagtagtttgtcggttttagtacgggtaggtggtttaggatagaggttttggtgtttagtagatgtaaattttagtttttacgtagttttttattagttgtgttattttaggttttaggatagaaatgttaaagggtattggtggtatcgtgtagtgggtagttggggagaaggggttgggggtaagtttatagaggaaaaatgtttatttgtttagtagttagagaaatgtatttaaaaatatatttaaggattagtt

SEQ ID NO: 2469 - DNA, 2489 bp, Artificial Sequence
  chemically treated genomic DNA (Homo sapiens)
tttatggttagggatagtgatattagtgtgtttattaagtatttgatttatttgtttaggtaaaattttagaagagatattgggatttgtgtggagagtttttttattgtagttattttgttaagtttattgtaaagtgacgaattttgtggatatttatagagaaaaaatagttttaaatgttatagattaatgttgtacgttgtagagatatagtttttgggttttgtgagttgtatttgggtattacgtagagtttagttgttatttgtttttttgaaggttagttaagaagttggttttagtttgggtatggtattattgttttatattttagttatttgggatattttgggtttaagtatttttttttattgttggattaagtattttttattttttgttttgggaaattagattttagtaggttattaattattttagaaagtttagtagagttggttttggtttgggggtgttttttgagttgggtggaagaagagattttatataattttttaattttttttttaaggttgaattttttataagtaaaattttaaaattttttttaaagaagaaaaatatttagataatttttaaaatttttttttagttttaagattgtgtaattttgtgatattagtattgaaagtttttgtatttttttaattatatatttttttatgttagggaaaggtgtatgtaagtgagagaataaaaaattttataatcgtggggattttttttttcggttttggagtttttttttttttgtttttgtacggggtagttttttttttttgttttttttttttttttttgtttattaaattttttgcgttttagaattaaaaataaaaaataaaaatttaaaattatgattttaggggtgaaagaatattgagaaattatagaaagtaaaaatgaaaagttaatatagaaaaagtttgatttgaattagaagtagtatttaaaattataggtttagaaaaagtttgaatagaatttagggttgaggttagttttgagtttgtaggttttgtttttttataaaggtgagtagatgggtttggagagggttgtttatgttatggaagggtttttatgttatcgaggttaaaattaaagtaggagtaaattagttttgttagtgtgtatagtcggtattaaagaggtaataacggtagagaatattttttgaaagatatatatgaaattagtaacggcgatggtttttggaagaattaggttagaagtagatttaatttgtattgtgtatattttttggtattttttttaattgaacgtatgtgaatgtattatttatttaaaaataaatgtgtaaaaatacgtgttacgataaagtaaaatgaggagatagtataaaaaagataaggataattttaaattttttttaataaaacgttgtttaaaaatttaagaggaaaaaagggtaggttttagttagtggagagaataattgaaaaataagagttacgtgtttttatggttttggttaattttattttttttttatttttattcgtttatatttgttttggagtatttatagtaagtttggttttatgtttagaatatcgtttggttttttttttttttttttgtttatatttttttagttattcgttgtttttttttttgttttttttttagtttttagtttgtttattaaattttaggtggtattttttattttttgttatgagggagtttatttgtttatgtaatttttttatcggagataaaatgtattttttaaagttggtttgtaatgatattttttatgtttgttttgtttatttatgattttgatattttttttatcgagagggtagaatttgtgttttttttttttgaatttaggtgggttatagttttggtagaagtgatattttgtgattttaaggttaggttataaaaagggaatgtagtttttgttagtaattttgggatatatatttggagttcgagttgttgtgtaagttatttgtttgttttgagtttattatattataaggaagtttaagttagtttataggagagacgaggtgaagagaatgagatgttagtttttattgttttagttttttagtgttttagttttagttattatttgattgtaattttatgaaagattgagttagaattacgagtttagttttttttgatgttgatatatagattttatgaaagagaataaattaatttttgttttaagttattatgatttgggatgatttgttatgtagtattggataattgtaatatttgtttttaaatagtagaattttaaacgtttaggttttatttttaatttattttatgtttttgtttttattgattttttgttattgagtttgattaagtttttgagttattaattttagatatttgtttaaataaatttattgtgattgtttatattatttatttttttaaaataatttttgttatagttggttttt

SEQ ID NO: 2470 - DNA, 2489 bp, Artificial Sequence
  chemically treated genomic DNA (Homo sapiens)
gaaggttaattataatagggattgttttggaggaatggatagtgtagatagttatagtgaatttgtttaaataaatatttggaattggtgatttaagggtttggttaagtttagtggtaaaaaattagtgagaataggaatatgaagtaagttagagatggggtttagacgtttgggattttattgtttagaagtaggtgttgtagttatttagtgttgtataataaattattttaaattatagtggtttaaagtaaaaattagtttatttttttttatgaagtttgtatgttaatattaggaagggttgggttcgtggttttggtttagttttttatggggttgtagttagatagtggttggggttgggatattagagagttggagtagtggagattggtattttattttttttatttcgttttttttgtgggttagtttgggtttttttatagtgtggtgggtttagagtaggtagatggtttatatagtagttcgggttttaagtgtgtgttttaggattgttggtagaagttgtattttttttttgtgatttagttttaaggttatagagtgttatttttattagagttgtagtttatttagatttagagagaggaaatataggttttgttttttcgatggaaggagtgttaaagttatgggtaagtagagtaggtatgggagatgttattgtaagttaattttgggaaatatattttgttttcggtggggaaattgtatgaataaatgaatttttttatagtagagaatggagagtattatttgagatttgatgggtaaattgagaattgggagagaagtaagagaggaggtagcgagtgattgaggagatgtgggtagggagagaggaggaaagttaggcgatgttttgggtatgaagttaggtttgttgtgggtgttttaaggtagatgtgaacgagtgaggatgggaaagaagtggggttggttaggattatgggaatacgtggtttttgttttttagttgttttttttattagttggagtttatttttttttttttttagatttttaaatagcgttttattaggagaaatttaaaattatttttgttttttttatattgtttttttattttgttttgtcgtggtacgtgtttttatatatttatttttgaataggtaatgtatttatatgcgtttaattaaaaaggatattaaagaatgtatatagtgtaaattaagtttgtttttgatttaatttttttagagattatcgtcgttattggttttatgtgtgttttttagaaaatattttttatcgttgttgtttttttgatgtcgattgtatatattagtagggttgatttgtttttgttttggttttagtttcgatggtatagaggtttttttatagtatgaatagttttttttagatttatttatttatttttgtgagagggtagagtttgtagatttagggttgattttagttttggattttgtttaagttttttttgaatttgtaattttaagtgttgtttttaatttaagttagattttttttatgttggttttttatttttgttttttatggttttttagtgtttttttatttttaagattatgattttgaatttttattttttatttttggttttaaggcgtagagagtttagtagataagaaggaagggagaagatagaaggaaaaagttgtttcgtatagagatagagggaagggggttttaaagtcgaaagaagaggtttttacgattgtgaaattttttgtttttttatttatatgtatttttttttggtataggggaatatatagttagggaaatgtaggggtttttaatattggtattatagaattatatagttttggagttgaaaggggattttaaggattgtttgggtgttttttttttttaaaaaaaattttaaaattttgtttatagggaatttagttttagagaaaaagttaaaagattatataaggtttttttttttatttaatttaaaaaatatttttaaattaaaattaattttgttggattttttgggatggttgatgatttattgagatttgattttttagagtaggaggtgggaagtgtttgatttagtaatgggagggaatgtttgaatttaggatattttaaatggttggaatgtaggatagtggtattatgtttaggttgggattaattttttagttggtttttaaagggatagatggtagttgaattttgcgtaatgtttaaatatagtttatagaatttaaagattgtgtttttgtagcgtgtagtattggtttatagtatttgaagttattttttttttgtaagtgtttataaaattcgttattttataatgagtttggtaggatagttgtagtgaagaaattttttatataggttttagtgttttttttggaattttgtttgagtaagtaaattaaatatttggtaaatatattgatgttattgtttttagttatggg

SEQ ID NO: 2471 - DNA, 2417 bp, Artificial Sequence
  chemically treated genomic DNA (Homo sapiens)
gttgtttaggttggagtgtaatggtacgatttcggtttattgtaattttcgttcgtatcgaggtttaagcgatttttttgttttagtttttttagtagttgggattatagttattcgttattatgtttagttaatttttttgtgtatttttagtagagagggggttttattatgttggttaggttggttttaaatttttgattttaggtgatttatttgttttagttttttaaaatgttgggattataggcgtgagttatcgcggttaattaggaatgaatatttttaaggtttttgatatatattgttaaatattttttaagattgtgttggtttattttttttttttagaattttgggtgtgggagtttagaggttgttggttcgtttttagtaggtaaagatgttatttattttttaggaaggaagtgtagtagtttttgagcgttataggtttcgtttttgtgggtgttggagtgcgtttggtgttgtttttttttaggtttagatattatttgtcggtggtggacgtttgtaattattgtggttattagttggttttagggagacgatgtagttgtgcgtttttattttattaaagtggaacgtatttttaaggttttggaagtgatagagtgcgtaattttttttggttatttatttgtttttttttaggggaattttgtttgagttagtaggagtaaattggattgggtgggcgtgttggggtgaagggttaggattgtatgataggtgggcggttagaaaagtcgggggtgagggtattatggagaatttaagttgggttagtaggttttttgtgtaagtgttttgttttgtataatacgatagttgttttagtagttgttagtattgtgttcgggtttttttttttgtagtttttatggcgttataggttgaaaagaagagacgagagtagtgtggtttttagtatttttagaagttttgtggtggaggtaggtattggtggtttataattagtgtagagaggttattgttgtttttaaaatttatgtgtattggagtattttgtttttgtgtgttagtattttatttattttttttttagttatttttatttttattattaattttggtaattttgttttgtaattaaaatagtttttagtatatggtataatcggagagtttttgatatttttttttggagatttatgtttgcgttttgggggtattcggtattagtgatgggtagttttgtttgttgatttttcggttgtttttaattggatttgagtattttaagagaaattgtaaaatgttttaagatagaaaggttttacgaggttttatttttagagttaaggttgtagtattttttattaagtagatttttaatcggcgtataggaaggagttgagaagagtgagtatatataggtttgaagttttttgttttttgaagtagatgtgatattttaattttattgaagtagttttatttgtaagtattttgattaggtaagtatttagttcggtatagtattttatttgtatgtgtgttttttttagtcgatgtgtttgaggatattgagatttagtaggtaagttgtttaaagttatttcgttttagagtagtagagtttttatggatagttaagatatttttgtaggtattgttgtttgttggatttatttatttttgggtttttttgttttttagggattaggatgttatgagaatttttttttatttttagtttttttttttatttttagttttttttatagaaagaagttaattaagtatttttagagagtttaatattatatttttgggggggtggttttttaaagaacgggtataatattttattgtggttattttataggtaaggaaattgaggtatacgttggaatgattattttgggtggttttttagtagtagacgtgatggtgaagtttgtgtttttgatttttagtattgaatgaaggtgttaaagggtggggcgttaattttagtttagggttggtattttagatttggagttggtggtatggtgttatagtggtagtattggagttaatagatgtatatgttatattagtgtggggcgtggtagttattggtttgggtttttttgtttgttacgtaggtgatatatagtgatttgtttttcgattttttgttattgttgtaggagttttttggtgaaggttattttttatgtttgtagagttatgtatgttttattttttgggaaagtagatgggtagtagagttttttttgttattgcgagagggttagtggttatttatggagtagttttaacgttagtggggttatttttgattttgtttttaattacgtgagtgggagttgagttggtttttgggggaggtgttttgtattggtttacgagaatatttttat

SEQ ID NO: 2472 - DNA, 2417 bp, Artificial Sequence
  chemically treated genomic DNA (Homo sapiens)
gtgggagtgttttcgtaaattagtgtagagtattttttttaggggttaatttagtttttatttacgtggttgagggtagggttagaggtggttttattgacgttgaggttgttttataggtggttattggttttttcgtaatggtagaaggaattttgttgtttatttgtttttttagggagtgaggtatgtatggttttgtaggtatggaagatggtttttattagggggtttttgtagtagtgatagggagtcgagaggtaggttattatgtgttatttgcgtgataggtagaggggtttaagttagtgattgttacgttttatattgatatgatatgtgtatttgttgattttaatgttgttattatggtattatgttattagttttagatttgaaatgttagttttgagttagggttagcgttttattttttagtatttttatttaatgttggaagttagagatataggttttattattacgtttgttgttaagaagttatttaagatagttattttaacgtgtgttttagtttttttatttataaagtggttataataaggtgttgtattcgttttttaagggattatttttttagagatgtggtattaaattttttggagatatttagttagtttttttttgtagaggagattgggagtggaaggggaggttagggatgggggagggtttttatagtattttagtttttgaaaagtagagggatttaggggtaagtgaatttagtaggtagtagtgtttgtaggggtgttttggttgtttatggaagttttgttgttttggagcgaggtgattttggataatttatttgttgagttttagtgtttttaggtatatcgattgggggagatatatatataggtggaatgttatatcgggttgggtgtttatttagttagagtgtttataaatggggttattttaatgaaattagggtgttatatttattttagggaataaaggattttaagtttgtgtatatttattttttttagtttttttttgtgcgtcggttaagggtttgtttgataggaaatgttatagttttggttttaaggataggatttcgtggggtttttttgttttggagtattttatagttttttttagaatatttagatttaattagaaatagtcggggagttagtaggtagggttgtttattattagtgtcgaatgtttttaagacgtagatatgaatttttaaagaggaatgttaaaagtttttcggttatgttatgtgttaaaggttattttagttataggataaagttgttagggttgatggtgggggtggaggtggttggaaggaaagtggataaaatgttagtatataggggtaagatgttttagtgtatatgagttttgggggtaatagtggtttttttgtattgattgtgaattattagtgtttgtttttattataaagtttttgaagatgttgggggttatattgttttcgttttttttttttagtttgtggcgttatgaaggttgtagggaggaggattcggatatagtgttgatagttgttgggataattgtcgtgttgtgtagagtaggatatttgtatagaggatttgttggtttaatttgagttttttatggtgtttttattttcgatttttttagtcgtttatttgttatgtagttttgattttttattttaatacgtttatttagtttagtttgtttttgttaatttaaataagatttttttggagagaagtaagtgagtggttaaggagggttacgtattttgttatttttagggttttggggatgcgttttattttggtaaaatgagagcgtatagttgtatcgtttttttggagttagttgatggttatagtgattgtagacgtttattatcgatagatgatgtttggatttagaggagaatagtattaaacgtattttagtatttatagaaacgagatttgtggcgtttagaggttgttatattttttttttaggagatgggtaatatttttgtttgttgggaacgggttagtagtttttgggtttttatatttaggattttgggggaggggaatagattagtataattttggaaagtgtttggtaatatatattaagagttttaaaaatgtttatttttggttggtcgcggtggtttacgtttgtaattttagtattttgggaggttgaggtaggtggattatttgaggttaggagtttgagattagtttggttaatatggtgaaattttttttttattaaaaatatataaaaaaattagttgggtatggtggcgggtgattgtaattttagttattagggaggttgaggtaagagaatcgtttgaatttcggtgcgggcggaggttgtagtgagtcgagatcgtgttattgtattttagtttgggtaat

SEQ ID NO: 2473 - DNA, 444 bp, Artificial Sequence
  chemically treated genomic DNA (Homo sapiens)
ttgttgattggatagatggatggatggatggatggatggatggattgatggatggaaatttggttattattgatgtttgagttttttatttttttgggttttttatttttggagtttttatttgtttgtgatagttgtatgagaaatatatgttttttttaggagtaaatttttaatttaaataggtagtatagagttagtttagtattttatattggaggtatttagggtggagtttaggttgatgagatggtgtaggatgaggttttttggtttagttgggaattatttttttttagattttttgtttagagtttaattttttttttttttagtgttattttttttgttagtttgtttagttttttagggtgtttggatttttaggttttattttgtgtttagtatagtagggtttagtgttttagtaattgggaaggtttg

SEQ ID NO: 2474 - DNA, 444 bp, Artificial Sequence
  chemically treated genomic DNA (Homo sapiens)
tagatttttttagttgttggggtgttggattttgttatattggatataaggtgaggtttgaaagtttaggtattttgaggagttgggtaaattagtagaaaagatggtgttgggagaaaggaaagttagattttggatgggaaatttggaaagaagtggtttttagttgggttaaaaagttttattttatgttgttttattgatttgggttttattttgagtgtttttagtgtgaggtgttggattggttttgtgttgtttgtttgggttgagggtttgtttttaggagaggtatgtattttttgtatagttgttataagtgagtgagggttttggaggtggagggtttaagagggtggggagtttaggtgttagtgatagttagatttttatttattggtttgtttgtttgtttatttatttatttatttatttaattaataa

SEQ ID NO: 2475 - DNA, 457 bp, Artificial Sequence
  chemically treated genomic DNA (Homo sapiens)
gggataggatttattgtaaggtttttgggtttatttatggtaggtgtaggtttgtgtgtataagggtatttaattttgatatatatttggaggagggaagagggttttggttgggggtttttgagtgggattgttggttgttttttgttaaatttttgattttagtatttttttttgttatgttttttttttagggtttgtgtatttttagtttttgattttgttgttgggtgttgggttggtgtttggattgggagttttgggtttggtttggtggttgtataggtgagtaggagggatttggttttgttaaatggggagtgattagaggtggaaggggtaggattagaatttttgtaaaagaaagagttagatttagagttttggttttggtttggtgaagaatgggagaggttaaaggtgggagtgaggttgttggttggtgagtagagtttta

SEQ ID NO: 2476 - DNA, 457 bp, Artificial Sequence
  chemically treated genomic DNA (Homo sapiens)
tggggttttatttattagttagtggttttgtttttatttttgattttttttattttttgttaagttaggattagagttttaggtttagtttttttttttgtgaaggttttggttttgttttttttatttttggttattttttatttaatgaggttgggttttttttgtttatttgtgtagttattagattaggtttaaagtttttagtttgagtattaatttagtgtttagtagtgggattaggagttggggatatatggattttgggggaaaggtgtggtggggagggatgttgaggttaggggtttgatgagggatagttagtagttttgtttaagaatttttagttaaggttttttttttttttttgggtatgtgttggagttaagtatttttgtgtgtataggtttgtatttattatgggtaggtttgggggttttgtaataggttttgtttt

SEQ ID NO: 2477 - DNA, 498 bp, Artificial Sequence
  chemically treated genomic DNA (Homo sapiens)
aagttgtaggtggatggagtagtgattagaagttagagttatagtgtaattttggggggtgggagtttttagggttagaatagttattatatttgtgttggttagggtttgtatgtagtttgatattgttgatgttagggtgtttgtggttttatttgttatttttaggaaatttgttagggagggagaaaggtgaggtttagttttatggagataggaaattaagtagttattgttggatattgggttttagagtaggttgaggggatagtgggatggggtggatatgggggtttgaggtttatagttaggttggatttgggtgaggttgtagttggtttgtagggagtgtatggtttgtgtgatgtttagtgttagtttaagggtggtttttgttttggggtttttttaggagtattgtggggtggaggagggggtgagggggtttggagggtaggttagatttttttttttaggttatgttatatttttgagggt

SEQ ID NO: 2478 - DNA, 498 bp, Artificial Sequence
  chemically treated genomic DNA (Homo sapiens)
gtttttagaggtatggtatggtttggagaggggagtttgatttgttttttaggtttttttatttttttttttattttatagtgtttttggaaggattttgaggtagaagttgtttttgagttggtgttaagtattatgtgagttgtgtgttttttgtgggttgattataattttatttggatttggtttgattgtgagttttaggtttttatgtttgttttattttattgtttttttagtttattttgggatttagtgtttggtagtgattgtttggttttttgtttttatggagttaggttttatttttttttttttttggtaggttttttggaagtggtggatgaggttatgggtgttttggtattggtggtgttgggttatgtgtaggttttggttagtgtaggtgtggtggttgttttggttttgggggtttttgttttttagggttgtgttgtggttttggtttttgattgttgttttatttatttgtagttt

SEQ ID NO: 2479 - DNA, 482 bp, Artificial Sequence
  chemically treated genomic DNA (Homo sapiens)
gggagaaagaggattagatgagagtggtgtttttgtttatgtttgttttttttttgtagagaattattttttttagggatggtaggaatgttatgtgtttaatgggatatagtgttttttggagagatatatttataattgggaggagtttgtgtgttttgatagtgatgtgggggagttttgggtggtgatggagttggggtggtttgttgtggagtattggaatagttagaaggatattttggaggagaagtgggtagtgttggataggatgtgtagatataattatgagttgggtgggtttatgattttgtagtgttgaggtgagtgagggttttgggttggtggttttagggtagttttgtgggtttgtgtttagggtgtaggagtagttgggttggtttaagggattttagtgttgggtggaaaggggattttgggttggggatttatggggggagtttatttggagtttgttaggg

SEQ ID NO: 2480 - DNA, 482 bp, Artificial Sequence
  chemically treated genomic DNA (Homo sapiens)
ttttgataagttttagatgggttttttttatgaatttttaatttaaagttttttttttgtttggtattaaggttttttaggttaatttggttgtttttgtgttttgggtatgggtttgtggggttgttttgggattgttggtttaaagtttttatttattttggtgttgtagggttatgggtttgtttagtttgtagttgtgtttgtatattttgtttggtattgtttgttttttttttaggatgtttttttggttgttttagtattttgtagtaggttgttttagttttgttattgtttggaatttttttatgttgttgttgaagtgtgtgaattttttttggttgtagatgtatttttttaggaagtgttgtgttttattaaatgtgtagtatttttgttgtttttggaaaaggtaattttttgtggggagggggtggatatgagtggaggtgttatttttatttaattttttttttttt

SEQ ID NO: 2481 - DNA, 497 bp, Artificial Sequence
  chemically treated genomic DNA (Homo sapiens)
agggatatggtttgggtataatgttaatataattttttatatttttttattttatagtagtttagtatttttaatgtgtttttatgttgggtgtttttagtgaaagttagttgggagtttagtattattagtgttattgttaatgttgttaagttggagtttttagggagttttagatatattatgttggagaagaggataggattaggggttagaggagtaggtaagttttatttagggagaattatgatttttttttatttatattttaaattatagggaggaagttattgatttttttgtttttggattgggtaattttgtgttggagaattaattagtatttgagtttaatagtattattagttgttgtttagagatgttgtatgaaggtttttttttgaaataattttattttttaaaggattgttttaatttagtatttgaaaggtttgaattagttgtatgtaaaatattttaattggggagttattgtg

SEQ ID NO: 2482 - DNA, 497 bp, Artificial Sequence
  chemically treated genomic DNA (Homo sapiens)
tataatagttttttaattaaagtgttttatatgtaattggtttaaattttttaagtattaaattaaaataattttttaaagaatgaaattattttagaagaggatttttatatagtatttttgagtagtaattgatgatgttgttgaatttagatgttgattggttttttgatatgagattatttaatttaggagtaaggaaattagtaattttttttttataatttggaatgtgggtggaggggggttatagttttttttgagtgagatttgtttgtttttttggtttttggttttgtttttttttttagtatggtgtgtttgaagttttttggaggttttagtttggtagtgttgatagtgatattgatggtgttgagtttttgattggtttttgttggggatatttgatgtaagagtatattgagggtgttgagttattatggggtgggggaatatagggagttgtgttaatattgtgtttaggttatgttttt

SEQ ID NO: 2483 - DNA, 484 bp, Artificial Sequence
  chemically treated genomic DNA (Homo sapiens)
taataggatgttggtagggattttgggggataagaatgggggtgggattttttatttattatttattaagttttttttggggttttggggattatttatgttttggatgttttgaaatataagatgggtgtgagtagtttgaaggtggtttggagggatttgtggtttttagaggtttggttatttttgagggtgtgatggttagatttttaatttattttaaatttaagtaaatatagttggtttaggtttgtagtgtgtgggattgtggatttgtgggtttgtgggttttggttttgttttttttgaagatttattttttatgtttagagtttttagggtattatgttatatggttttttttgtgtatggggagtgaatgttgaggtagggtagtgtggggttagagtagggggagtttatagggaatgggaagtatgttgagagaggagagggagtaggaaggtagttagaaaggtggaga

SEQ ID NO: 2484 - DNA, 484 bp, Artificial Sequence
  chemically treated genomic DNA (Homo sapiens)
tttttatttttttagttgtttttttgttttttttttttttttggtatgttttttattttttgtgagttttttttgttttggttttatattgttttgttttagtatttgttttttgtgtatagggagggttatgtggtgtggtgttttgagggttttgggtataggaaataaatttttaagaaaaataaaattaaagtttataagtttatagatttatagttttatatattgtaggtttgggttagttgtgtttgtttgggtttgggatggattggaggtttgattgttatatttttgggaatggttgggtttttgaaaattataggtttttttgggttatttttaggttgtttatatttattttgtgttttagggtgtttgaggtatggatggtttttagggttttaaagggagtttggtgagtgatggataggagattttatttttatttttattttttgaggtttttgttagtattttgttg

SEQ ID NO: 2485 - DNA, 476 bp, Artificial Sequence
  chemically treated genomic DNA (Homo sapiens)
atgtttttgtttttggttgggtaatttttggatttatttattgtttgtaattttttgggttgaagagattattttttgggagttaattaatttattttttggagtgtgtgtttttttttgtttttaggagttggttttttaaaattttttgaggtttgtgtatgttttttttgattttttgtgtttttattttttatagaaatttatgtatttatgtttttttttttttttgagtttgtagaggattttgttttgttttttttatatttagggttgttttttttgttgttaatataaatttgttgataggttatgtttgggaagtgggtggggtgttttggagtggtgttgaggtgttgtaggtttggtttttggttgtgggggagttgtattttgaagttttgttggaatttgtgtttggggttagtagggggtattagagttaatagggattgtatgtaaaatttatttttttt

SEQ ID NO: 2486 - DNA, 476 bp, Artificial Sequence
  chemically treated genomic DNA (Homo sapiens)
ggaggaagtgggttttgtatatagtttttgttgattttagtgttttttgttggttttagatgtgagttttggtgaggttttagggtatagtttttttgtagttagaagttgggtttgtagtgttttagtattgttttgggatattttatttgttttttaggtgtgatttgttaataggtttgtattggtgataaaaggagtagttttgaatgtagggaaagtagggtggagttttttgtaggtttgggggaggggaggggtgtgaatgtgtggatttttgtggagagtggaaatatggggagttgaggggagtatgtgtgggttttagaaagttttgggaaattgatttttgggagtagggaggaatgtgtgttttagagagtaagttaattgatttttggggggtggtttttttagtttggggggttatagatagtaggtaaatttagagattatttagttaagggtaggggtat

SEQ ID NO: 2487 - DNA, 391 bp, Artificial Sequence
  chemically treated genomic DNA (Homo sapiens)
tttttgtgggtaggagaataaggattatttgggttttttagttttgaatgagaattttatttttattagaatgttttttttaattttagtgtatgatgaggaaatttatttatttttagttaggatttgataaattttaatattaaatgattaaaatatttgttattgaggttttattggtgagatttgttttttgtttttgggtgtagttttttgggggttgttttttggattgtgttttgtatatttgttattgagggtgtgagaagtgtttaagttggtgatatgtgatttgggatgtttttattttttgggttaggagtagtagttgttaaggatagtagtttgtattgtgtggttttagggaagtagggtttggtttttaatatga

SEQ ID NO: 2488 - DNA, 391 bp, Artificial Sequence
  chemically treated genomic DNA (Homo sapiens)
ttatattaaaagttagattttgtttttttaaaattatgtaatgtaagttgttgtttttagtagttgttatttttggtttgagaaatgaaggtgttttagattatatgttattagtttaggtgttttttatatttttgataataggtgtgtggggtgtagtttgaggagtagtttttaagggattgtatttgaggatggagaatggattttattagtgaagttttagtggtaaatgttttgattatttgatgttggaatttgttaaattttagttagagataagtaaatttttttattatatgttgaggttaagaaaaatattttgataagagtgagatttttgtttaagattggagaatttaggtggtttttgtttttttatttatagggg

SEQ ID NO: 2489 - DNA, 483 bp, Artificial Sequence
  chemically treated genomic DNA (Homo sapiens)
gttgtgttttaattggtaagggattgtgttaaagatttgaatggatgatgttatgattttagattatatgattttttttaattttatagattttgtataaatgaagtgttggattttatttgaaagttgtaaaaattaatggtttagatatatttataataaattgatttaaattttttttataagaagaaaaattaagattatttatttgaaaagaaagatggagagggaggaggaagaagagaaaatggttgggtggtggtggttgtaggttgtgtagtggtagtggtttttttttgtggtggatgatggatagttaggataggaaggtggtggtgtataataatagtattgggtttgtgaagtgtggttatatgtaggttttaattttttagaagatatttttttagttttggttggaagatttattattagattaattattaaagtgggaaatattgaataaggattttatggttggtg

SEQ ID NO: 2490 - DNA, 483 bp, Artificial Sequence
  chemically treated genomic DNA (Homo sapiens)
tattaattataagatttttgtttaatgttttttattttggtggttgatttgataataggttttttaattaaagttgggaagatgttttttggaaagttagagtttgtatataattatattttataagtttggtgttgttgttgtatattattatttttttgttttggttgtttattgtttgttgtgggggagagttgttattgttgtataatttatagttgttgttgtttggttgttttttttttttttttttttttttttatttttttttttaaataagtggttttaatttttttttttatagaaaaagtttaaattagtttattataaatatatttaaattattaatttttgtagtttttaggtaaagtttagtattttatttatataaagtttatgaggttagaagagattatgtaatttaaagttgtgatattgtttatttaagtttttggtataattttttgttagttagagtatagt

SEQ ID NO: 2491 - DNA, 431 bp, Artificial Sequence
  chemically treated genomic DNA (Homo sapiens)
aatatgtttttattttatttggttttgttaggtaagtaagggattttgtgtgttggaaaaagaattattttggtgtagttgtttaagaggagtttggggaggatgttggtttgtgaggtttgttgtagataaggtggtggtgatgtttgggagttaggttagtgttgtggtggtagtgttggggttttttgtgtggtagggtggtttgggttttggttttttgttggttttttggaagtgggtttgtggttagtgtgggagtagtagtagagatggaggttttagtgttttttttttttttttgtttgtttgagttaggggaggttaggtggtttgggtgtttggagttgggggtttgttgtttgagaatgagaattttttttttttagaatgtggagattgtttgattattaggagtataaagttattat

SEQ ID NO: 2492 - DNA, 431 bp, Artificial Sequence
  chemically treated genomic DNA (Homo sapiens)
atgataattttgtgtttttggtgattgaatagtttttatgttttgggggaagaaaatttttatttttggatagtagatttttggttttagatatttgggttgtttggttttttttggtttaggtggatggggaagagagagaggtgttggagtttttatttttgttgttgtttttgtgttagttgtgggtttgtttttagggaattggtgggaggttgaagtttaggttgttttgttgtgtgaaaggttttgatgttgttgttgtggtattggtttggtttttggatattgttgttattttgtttgtgatgagttttgtgggttagtgttttttttaagttttttttgggtggttgtattaaagtaattttttttttaatatataagattttttgtttatttaataggattaaatgaagtgaaagtatgtt

SEQ ID NO: 2493 - DNA, 412 bp, Artificial Sequence
  chemically treated genomic DNA (Homo sapiens)
tgtggtttaggtagttatttggttatagatagatagtggtggttatatatatttttgtttttgtatttgtggttaggttggggtatttgtgtgttaggtggaatgtaggggtgttttgggtttgtatatttttttatgtttgatatgttgttgttgttagagtttgttttgttgtgtttttgtttttggatatttgtgtttttgtttgtttttgggtttgagtttgttttagtttttgtttttgtaggatttgttgtaatttatttgttgttgttgtagttgttgtttttgttttgagtattgagtttgtttagtttgttggtgttgagtgtagggtttgtttttattttaggttttttgtgtggttttatttgttgttatatatttagatattttattttgtttattttgt

SEQ ID NO: 2494 - DNA, 412 bp, Artificial Sequence
  chemically treated genomic DNA (Homo sapiens)
gtagagtgggtagggtgaaatatttgggtgtgtggtagtgggtggggttgtgtggggggtttgggatgggggtgggttttgtgtttggtgttggtgaattgggtgggtttagtgtttagagtggaggtagtggttgtggtagtagtaggtgggttgtagtagattttgtggggatggggattgggatgggtttaggtttaagaataggtgaaggtgtaggtgtttggggatgggggtgtggtggagtaggttttagtagtagtggtgtgttggatatggggaggtgtgtgggtttagggtgtttttgtattttgtttggtgtgtggatattttagtttggttatgggtgtaggggtgggggtgtatgtagttgttattgtttgtttgtggttaggtggttgtttgggttata

SEQ ID NO: 2495 - DNA, 475 bp, Artificial Sequence
  chemically treated genomic DNA (Homo sapiens)
tagttgttgttattatattggtttagaaggagggtggggggaggatgggttggggaggggtagtaaggggaagggatgtgtgttggtgtgtgtggagagggtgtttttttgtttttgtttttttggtttggtggggtttttttgtggttatttggggagatgttttagatagttgtggtttttgtgatttgtgttttttttgtagaaggtattattgggttgggttttagatgggtattttgtgagtggattggtgagttttaattttttggaatgtgttgttgggggttgtggtggtaggtttttggttttttggtttattttaggtttttttggtgttgagagtttttgaggtttgatttttttgtttgttgtttgtgttgtttattttgaaaataagagtgttttggtggaaggatttgagaataaaatgttggggtaaatggatatttgtaagaattattttttttaggtt

SEQ ID NO: 2496 - DNA, 475 bp, Artificial Sequence
  chemically treated genomic DNA (Homo sapiens)
ggtttgaggagagtgatttttatgaatgtttatttgttttagtattttgtttttaaatttttttattgaaatatttttgtttttaaagtgagtagtatgggtaataggtaaaggaattaggttttggaagtttttaatattagaaaggtttaaaatagattaaaagattggaggtttgttattgtagtttttagtagtgtattttggaaaattaaaatttgttgatttgtttgtaaggtgtttgtttaaaatttagtttaatagtattttttgtaaagaggatatagattataggaattatgattgtttaagatgtttttttgggtggttgtgaagggattttattgagttgggaaagtaggagtgaaggagtattttttttatatatattgatatatattttttttttttattgtttttttttgatttgttttttttttattttttttttgggttaatgtgatagtagtagttg

SEQ ID NO: 2497 - DNA, 443 bp, Artificial Sequence
  chemically treated genomic DNA (Homo sapiens)
ggtagtttttttttattatagggattttgtgtgttaggttttagttgtgttgttgttgaattatggatttaatagtagagaagttttgtaggttgtttgtgttggtttgggaaattggggtttagttggggtttgttatggttttggtgttgttttgttttttgttggtgttatggagtaagtggagagatttatttttttggttttaagaggtattaatggaggaggttgagaggtaggagttgaataattgatggttttttttggtttaggatttgttgaaaatgatatggtgtaaggtagaggggttgagagtgttgattataaaatgttgagaagttattttagggtggttatggttagaaggaggatttttatttaggatggggttataggtatttggggtgggtgttagaggtttttgttttgggttattttagggg

SEQ ID NO: 2498 - DNA, 443 bp, Artificial Sequence
  chemically treated genomic DNA (Homo sapiens)
tttttggaatgatttagggtaggagtttttgatatttgttttaaatgtttgtgattttgttttgagtgggggttttttttttggttgtgattgttttggagtggttttttagtattttgtggttagtatttttagtttttttgttttgtattgtgttatttttagtagattttgagttagagaaggttattaattatttagtttttgttttttagttttttttgttagtattttttaaagttgggaagataaatttttttgtttgttttgtggtgttgataggaagtagggtggtattaggattgtgataggttttggttgggttttggttttttgagttagtataggtggtttgtaaggtttttttgttattaaatttataatttagtggtaatgtagttggggtttggtatatagggtttttgtgatgaggaggggttgtt

SEQ ID NO: 2499 - DNA, 270 bp, Artificial Sequence
  chemically treated genomic DNA (Homo sapiens)
tatttttatttgtattattttattttttttttttggaaaataaatttatttgtggttttaaagtttaatttatttttagtaattttggtagttatgaatttttatataagaggtttttgtaggtttagtgttaaagttgttttttttgtagttttggtgattttttgggtttttttttttggttttggtgttttgggtgagtttagtatatgttgggattttggttgtttgttggtttggtttgattgtttttgtttttgagggtagagt

SEQ ID NO: 2500 - DNA, 270 bp, Artificial Sequence
  chemically treated genomic DNA (Homo sapiens)
attttgtttttagagatagggatagttgggttaggttaataaataattaaaattttaatgtgtgttgggtttatttgggatattagggttggagggagagatttgggaagttattgaggttgtaggggaggtagttttggtgttgggtttgtgggagttttttgtataggaatttatagttattggggttattgaggatgagttaggttttggaattataagtagatttattttttaaagaagaagaataaaatggtgtaggtgaagatg

SEQ ID NO: 2501 - DNA, 382 bp, Artificial Sequence
  chemically treated genomic DNA (Homo sapiens)
ggtggttttttggtttattgtttttagtttatttgttggtttttatttttgttttatgtttaggattttatgttttgttggtgttgtttgggttatggttattgtttatttggggtttatggaaatgtggtttttgttttttattgttgtttgttttgggaatgtggtttgaagtttaggatttggtagatgggtgtaggtgggtggttggttgtgtttttgttgtgggttattattgttttgtgtatggttgttagtttattgagtatgattattggtgtttaggttagttgtaggttgaatatgtttttgaagtggtgttgtaattgtagagggagggttagggttttttgttaagttaggattattttagattataggt

SEQ ID NO: 2502 - DNA, 382 bp, Artificial Sequence
  chemically treated genomic DNA (Homo sapiens)
atttgtagtttggggtgattttggtttgataagaggttttgattttttttttgtagttgtggtgttgttttggggatgtgtttagtttgtagttggtttggatgttggtggttgtgtttaatgggttggtggttgtgtgtgaggtgatggtgatttgtggtgaggatatggttgattgtttgtttgtgtttatttattaggttttgggttttgggttgtgtttttaaggtaagtggtggtgggggatagagattgtgtttttgtgggttttgggtggatagtgattgtagtttaagtagtgttgatagggtgtggggttttggatgtgaaatagagataaaggttagtgagtgggttgaggatagtgggttaggaaattatt

SEQ ID NO: 2503 - DNA, 282 bp, Artificial Sequence
  chemically treated genomic DNA (Homo sapiens)
gttttttattgtttttaggagtggttatttgggtattttgtgttttttttttttgtttgggtttaggttgaggatttgttagtagggtttagttgtttggagtttgtttagtttattttttagtttattttgtttgtgggatttttttgttgtttttgtttgtggattgagtggtaggttattttataagtatttggatatttgatatttgtggtgttaagataattttaagaaggttttttgtgattttgtaagttttgtttttttttttgggattttgtt

SEQ ID NO: 2504 - DNA, 282 bp, Artificial Sequence
  chemically treated genomic DNA (Homo sapiens)
ggtaggattttagaaaggaaggtagggtttgtaggattatggaaaatttttttagagttgttttgatattatggatgttaagtgtttgggtgtttgtaggatggtttgttatttagtttatgggtaggagtaatggggagattttataggtaaagtgaattgggggatgggttgaatgggttttaggtaattgagttttattggtaggtttttggtttgggtttgaataggaaggaggggtatagagtgtttaggtaattgtttttgggagtagtggggaat

SEQ ID NO: 2505 - DNA, 493 bp, Artificial Sequence
  chemically treated genomic DNA (Homo sapiens)
ttttgttttggtgataggagaataatgttggtgaatgttgtagtgggtgtttgagtgttttgtgtgtttttgagagtgggtgggagtggaagtttgagtggtttgtggtttttggtgatagtgtgttatttgttgttgtagtgtgtgtttgtgtggtttttgggttatttttggttaggttgtagtattgtggttggtgtgggtgtggtaggggtggggtggttttattgtttggtttttttgtttatgttttttgttgtagagtaagttgggttgttgtttttttgttatgggttttggtgagtttggagtttggttgggtttttggttgttttttaggttgatttgggttgagaggagttttggttgtttggttgtagttgggagagatttgggttagatttagaggggatttttagttggtgtgtggggtggttagggtggagaggttggtgggttattgggatgttgggtattaggggttggatggagt

SEQ ID NO: 2506 - DNA, 493 bp, Artificial Sequence
  chemically treated genomic DNA (Homo sapiens)
gttttatttagtttttgatgtttggtgttttggtagtttgttagtttttttattttgattattttgtatgttggttggaagttttttttaagtttgatttaagttttttttagttgtagttaaatgattagagttttttttaatttgggttggtttagggagtagttgggggtttgattggattttagatttattggagtttatggtgagaagatggtagtttggtttattttgtagtgggaggtgtaggtgggagagttgagtgataaggttgttttgtttttgttatgtttgtattgattatagtgttgtggtttggttagaaatagtttagaggttgtgtggatgtgtgttgtagtggtagatagtatattattgttggaggttgtaggttgtttaggtttttgtttttatttgtttttaggggtatatggagtatttggatatttgttgtgatgtttattaatattgtttttttgttattaggatagga

SEQ ID NO: 2507 - DNA, 284 bp, Artificial Sequence
  chemically treated genomic DNA (Homo sapiens)
ttaggttgtaggaggagtttgtagttttggaggtttttggttttttttttattttgttgtttgttttttagtgattagttggaatttaagatagtaatataagatgtgttgttggtgggagtgatggagtgtttgttgagtgggttgtagataagtattgtgattttggaggatgttttattattttgttgtaagaatatgttaatgggtgattgtttgaatgtttttagttaataggatattatttataatattttggttagttggaatggaagatgataaga

SEQ ID NO: 2508 - DNA, 284 bp, Artificial Sequence
  chemically treated genomic DNA (Homo sapiens)
ttttattattttttattttaattagttagagtgttatgaataatattttattagttggagatatttaaataattatttgttaatatgtttttatggtgaaatgatgaagtgttttttgaaattatggtgtttatttgtggtttatttagtaggtattttattatttttattaatgatatattttgtattgttgttttggattttaattaattattgaggggtgggtagtggggtgagaggagagttagaagtttttaggattgtaagttttttttgtagtttgg

SEQ ID NO: 2509 - DNA, 457 bp, Artificial Sequence
  chemically treated genomic DNA (Homo sapiens)
gtagggatatgggggttgtagtttatagtgaaggtgggggagatagggtgagagggtgttgttggaggtggggtgtgagggatggtttgtgatattttgggattgtggggtagaaagtgtagttttaggggaggttggggttagaggtgaagtttgtggggagggtgagatttgggtgtaggtgtttataggtgagggtggggtttaggttttagttgggttttgagttttggtttaggtttttatttgtggttttggttttaatttgaggtggagtttgggattaaagtttagatgaggttttttgtttagggtttgtgttggggattggggtggggatttgtattttgggttagtttgggtgtattttattgggattattggggtgggggatatgggttgggtggttttttgggagaagagggatagggagtgtagttggtggagaggataagaa

SEQ ID NO: 2510 - DNA, 457 bp, Artificial Sequence
  chemically treated genomic DNA (Homo sapiens)
tttttgttttttttattagttgtgttttttgtttttttttttttaaggagttatttggtttatgttttttgttttggtggttttgatgagatgtatttaggttgatttagggtgtaaatttttattttaatttttaatgtaaattttgaatgagaggttttgtttaaattttaattttaaattttattttaaattggaattggaattatagatggaagtttgaattggaatttaaagtttagttggaatttgaattttgtttttgtttgtgagtatttgtgtttgggttttgttttttttatgagttttatttttgattttgattttttttagaattgtgttttttattttgtagttttagggtattgtaagttgttttttatattttatttttagtaatgtttttttgttttgttttttttatttttattgtgagttgtagtttttatgtttttgt

SEQ ID NO: 2511 - DNA, 452 bp, Artificial Sequence
  chemically treated genomic DNA (Homo sapiens)
ggtttgtttatttttttttttggtgtgatttttttaagtttaatttttagggattttttttaggaatgttgagagtattagttgttttggttatgttaggtatttggttattaggtttttttttattttaggggtaattattgttagagggaaaaatggaaatattaggttatttgtgatttgtatatttattttttgtttagagagataagtaggaggttaggggaatagatgggattgtgggaatagttaagggtagagggtgaagggtggtgattagaaggaaagatggaatgtttatatattttttgttgtttttggttttagttgtggaggaagtggggtttggaggatattgtattagataggttttgtttagaaaattggaaaagaataaatattgattataagagtgtaggagaatgggtttttttattattaaaaataggtat

SEQ ID NO: 2512 - DNA, 452 bp, Artificial Sequence
  chemically treated genomic DNA (Homo sapiens)
atatttgtttttgatgatggaagggtttatttttttgtatttttgtaattaatatttgtttttttttaattttttaaataagatttgtttggtgtaatgttttttgagttttgttttttttatggttggagttgggagtggtagggaatgtgtgggtattttgtttttttttttgattgttgttttttattttttgtttttggttgtttttatagttttatttatttttttggttttttgtttgtttttttaaatgaggagtgagtatgtagattataaataatttggtgtttttgtttttttttttggtggtggttgtttttggagtggaaggagatttggtggttagatgtttgatatggttgggatagttggtgtttttagtatttttggggaaggtttttggggattggatttgaggggattatattaagaagaggggtgagtaggtt

SEQ ID NO: 2513 - DNA, 410 bp, Artificial Sequence
  chemically treated genomic DNA (Homo sapiens)
gaaattttttgttgtttattttggtttgaggaggtttaggggttttggagggggattagtagaggtaggtttttggttgagggagagtgagggtgtgtttaggattttgtgggtgtggttagtatttggtgaatgtatagttgatttgtaggtttagtttttggtgagtatttattgagagtgttttgttgtggttaggtttgtttaggtaggttatggtattatagatgtttgtgtttgtgatggagttaaatttggtttggaatatggtttttttgttattatgggttttgtttatgatgggtagaatagtattaagaatttgggggtggggagtggttagttgtgatttattttttagatttttgttatagttttttattttattgtgaagtttggttttttttagg

SEQ ID NO: 2514 - DNA, 410 bp, Artificial Sequence
  chemically treated genomic DNA (Homo sapiens)
tttggaaggaattaggttttatagtggggtggggagttgtggtagggatttgggaggtgggttatagttggttattttttatttttaggtttttgatgttgttttgtttgttatgaataaggtttatggtggtgagaagattgtgttttgggttaggtttagttttattatggatatagatatttgtaatgttatggtttgtttaggtgagtttgattataatgaggtgtttttagtggatgtttgttaggagttggatttgtgaattggttgtgtatttattaggtgttggttatatttgtagagttttgggtatatttttatttttttttagttagagatttgtttttattggtttttttttggggtttttaggtttttttgagttaggatgagtaataggggatttt

SEQ ID NO: 2515 - DNA, 424 bp, Artificial Sequence
  chemically treated genomic DNA (Homo sapiens)
aggatattaaggagaatttggaattttggtgtttttaggtggtggatttttgagttattggtaggttttgtggtattgagtttgagttttgagatggtaatgtgggggaagggggtaggaggttgttgggggtgtggtttttatgttttgagtagtgttttggatttgattttttttttatttttttaatttattttgtttttattttttttttttttttttttttttttttttttttttttttttttttttttttttttttttttatttttgttttttttttatagggtttggttttattgtttaggttggagtgtagtggtataattatggtttattgtagttttaattttttgggtttaggtgattttttttgtttagtttgattttgtttttaaaggttattgtatgaggtggggaagga

SEQ ID NO: 2516 - DNA, 424 bp, Artificial Sequence
  chemically treated genomic DNA (Homo sapiens)
tttttttttattttatgtagtggtttttaaaggtaaggttaggttgagtggggagggttatttgagtttaggaggttgaggttgtagtgagttatgattgtgttattgtattttagtttgggtggtagagttagattttgtgaaaagaaggtaagggtagggaaaagggggaaaggagggaagggaaagggaaggaaaggaaagaaaaaaggaaaggaaatgaaagtaagataaattaaaaaaataaaagaaaggttaagtttagggtattgtttagggtgtagaggttgtgtttttgatgattttttgttttttttttttgtgttattgttttggggtttgggtttggtgttgtggaatttgttagtggtttgggagtttattatttggaagtgttgggattttaggttttttttgatgtttt

SEQ ID NO: 2517 - DNA, 313 bp, Artificial Sequence
  chemically treated genomic DNA (Homo sapiens)
taggggagttgttaggattaagttggatggagttaggttgttttgtggtttttggggagggtttttagagggttgttgggtgaagggagttttttttaaaatggttttttgagttttgatgtatatatatgtagtttatttttaagtttagtgttttattagtttattgttttgttttttttagtatatttggtgtgtagttgtgattagtttaattgtggtatttttttattggttttgagttttggtgtgtttttttatgatattttttgggtatggagttgtgttgataggtttttgtgattggttgggt

SEQ ID NO: 2518 - DNA, 313 bp, Artificial Sequence
  chemically treated genomic DNA (Homo sapiens)
gtttagttagttatagagatttgttgatataattttgtgtttaggggatgttgtggaggggtatgttagggtttagggttggtggaaaggtgttatggttagattggttgtggttgtgtattgaatgtgttgggaagaatggaatggtagattaatggaatgttagatttgggggtgagttgtatgtgtgtgtattagagtttaggaaattgttttggaaaggattttttttgtttggtagttttttgggaattttttttaggagttatagggtggtttggttttatttagtttggttttggtagtttttttg

SEQ ID NO: 2519 - DNA, 410 bp, Artificial Sequence
  chemically treated genomic DNA (Homo sapiens)
ttagtaatagtgaagggagggagaatggtgggagaggattttagatgaatggtgggttgttggaggttgagtatgttagtaggatgttagtttttagagtaaagtttatgttaaatagttaatgtttgttttttttgtttttaggattatttttttgtatggggagtattttttatattaatattattatgtttttggtgtttggtattatttgttttttgggtattattgggaattttatggttatttttgtggttgtgaagaagtttaagttgtattggtgtaataatgtttttgatatttttattattaattttttggtagtagatttttttttttttttgggtatgttttttatgatttattagtttatgggtaatggggtgtggtattttggggagattatgtgt

SEQ ID NO: 2520 - DNA, 410 bp, Artificial Sequence
  chemically treated genomic DNA (Homo sapiens)
gtatatggtttttttaaagtgttatattttattgtttatgagttggtggattatgaagggtatgtttaggagaaagaggagatttattattgagaggttgatgatgaagatgttggggatgttgttgtattagtgtagtttggatttttttatgattgtgaagatgattgtggagtttttgatgatgtttaggaggtagatggtgttgaatattgaaggtatgatgatgttgatgtaggagatgttttttgtgtgaggaggtgattttggggatagaaggagtaagtgttggttgtttgatatgggttttgttttgagaattgatattttgttggtatgtttagtttttagtgatttattgtttatttggaatttttttttattattttttttttttttattgttgttaa

SEQ ID NO: 2521 - DNA, 494 bp, Artificial Sequence
  chemically treated genomic DNA (Homo sapiens)
ttttgaaggagtattaggtggaagtgatgttttatttttaggatgtgtttttgtatttgtgggttgttggggtttaggttgttgttatagtttaggttgaagaagagtaggttttggaggtagtgggtattgaagttgttggggttgtagtagtgatttgggttttgtaggaatttggttagtttgttgttggttgagagtttttatgtgaggggtattattggtttgaagtagtggaaggaggatttgaataagtgggtggggttgtggagtattgtgatgaagatggtgttggttggtattaggttgtgtattttgttgtagtggaagtgtatgtggttgtagatgatgttgaagtaggttttgggttgatagttttgtattaggttgtgggtgaagaaggttgggtagttgaagttattgtggttgttagggaaggtgaatttgagttggtgtttttggttgaagtggaataggatgttgagtagggtgtt

SEQ ID NO: 2522 - DNA, 494 bp, Artificial Sequence
  chemically treated genomic DNA (Homo sapiens)
agtattttgtttaatattttgttttgttttggttagaagtattggtttaagtttgttttttttaatggttgtaatgattttgattatttgattttttttgtttgtagtttggtgtaggattattggtttggggtttgttttaatattatttgtaattatatgtgtttttattatgatgaggtgtgtggtttggtgttgattaatgttatttttattatggtgttttgtgattttgtttgtttgtttgagttttttttttattattttgggttggtggtgttttttatgtggaagtttttggttggtgataagttgattgagtttttgtaagatttggattgttattatgattttaatggttttaatgtttattatttttgaaatttgtttttttttgatttgggttatgataatagtttggattttagtagtttgtaggtgtaggagtatattttggaggtggagtgttgtttttatttggtgtttttttaaga

SEQ ID NO: 2523 - DNA, 449 bp, Artificial Sequence
  chemically treated genomic DNA (Homo sapiens)
gttttttgggtttttgttagttaagggatgtttgttgtgtgttaattgttaagttttttattgtttttgtaaatttgttgatgtttttttagtgtatagggagattgtgtatgtgagtttgtttttgtgtgtattgtggagaggtagaggtatgaatgtagtataaggtataaaatgattattttagagagggttagatgattaagttagtaaatatttagggaatatgattgtgtttgttgtgtgttttttggagtagatataagggtgaatgaataaagaatggattttggttattgaaagtggagaggtagttgattttgtttgtggaggtttttagtagagttggatttggtagttttttggttatgaggggagattttgttggaggaaagaggtttttatttttattgtttgaaatgtgtaggatgtttttagattttttggtt

SEQ ID NO: 2524 - DNA, 449 bp, Artificial Sequence
  chemically treated genomic DNA (Homo sapiens)
ggttaaagaatttgagggtattttatatattttaaatggtgggaatggagattttttttttttagtagaatttttttttatgattgggggattattagatttagttttgttaagggtttttatggatggagttggttatttttttatttttagtgattgaaatttattttttgtttatttatttttgtgtttattttgggaaatgtgtagtggatatagttgtgttttttaagtgtttgttgatttagttatttggttttttttggagtagttattttgtattttgtattatatttgtgtttttatttttttgtagtgtgtgtgggggtggatttatgtgtgtagtttttttatgtgttgggagggtgttagtaggtttatagaaataatgaaagatttaataattggtgtgtgatgagtgttttttgattggtaggggtttagaggat

SEQ ID NO: 2525 - DNA, 424 bp, Artificial Sequence
  chemically treated genomic DNA (Homo sapiens)
tttttgttttgtatatttatgaagtttagtgaggttggttgtttaggttagttgtggatgggttatgaattatttatgaggaaatttttggttttgtttagaaaggttttgttgattatttatgagttgaggagtgggtttgggttggaaaaggttgttgatttttggtgggagggaagtgttgatgagttgaggtgagggttgttgagatgtgaggttttggtttagagagggtatttgggtgttgttagttttgtttttatgttaaaaaataatttttttttttttttttattatttaaggttttaagttggatttgaaagtattatattttgtgagggtttaaagtattgtgaagagaattgggagggtagggggttgaggaggaaggtaaaagggaggtgattttttttagaattggata

SEQ ID NO: 2526 - DNA, 424 bp, Artificial Sequence
  chemically treated genomic DNA (Homo sapiens)
tgtttagttttgggggaaattgttttttttttgtttttttttttagttttttgtttttttgattttttttatagtattttaggtttttatgaaatatgatatttttaaatttaatttaaagttttaagtaataagaaaagaaaaaaaaattgttttttgatataaagatagaattaataatgtttgagtgttttttttgggttgagattttgtgttttaatagtttttattttagtttgttgatgttttttttttattgggggttaatggttttttttggtttaaatttgttttttggtttatgaatagttaatgaggtttttttgggtgggattagaggtttttttatgaataatttatgatttgtttatggttagtttgggtgattggttttgttagattttatgaatatgtaaagtagggg

SEQ ID NO: 2527 - DNA, 371 bp, Artificial Sequence
  chemically treated genomic DNA (Homo sapiens)
atttttagagatatttttttgggaagatagttggaaggtagggttgagttggggttatttgtgatttagtggtgaggtgatgaggtattgatgaaagtattgtattttttttttttgagaaatgttttggtattagatgagttttgggggagggaggagaggaatttggtagggatttggttataagttatttggagggtggtgtgaggattggaaaagttgttgtttgttttgtttggttttattttttgaatgaggttattgaatgtgtatgggaggtttagtgttgttttattttagtttgatggagaaattttatttgaaattttaaagtagggtagggatatttttattagatatttttgtagttt

SEQ ID NO: 2528 - DNA, 371 bp, Artificial Sequence
  chemically treated genomic DNA (Homo sapiens)
aggttgtaaaagtatttggtgggaatgtttttgttttgttttgggattttgggtaggatttttttattaggttggagtggggtagtgttgagttttttgtgtatatttagtgattttatttaggggatgagattaaatagaatgggtagtggtttttttggtttttatgttattttttagatggtttataattagatttttgttaaatttttttttttttttttttaagatttatttgatgttaaagtgttttttaaaagggggaaatatagtatttttgttagtattttattattttattgttgggttataaatgattttggtttagttttgttttttagttgtttttttaaggggatgtttttgaagat

SEQ ID NO: 2529 - DNA, 500 bp, Artificial Sequence
  chemically treated genomic DNA (Homo sapiens)
tttttttttatagggttttagggttggtggttgttttgggtttatagttatgttttatttgttttttgttttaatagtttgtgtggtggtaaagttggtgtggggttggggaatgtagtgttttttaggaggggatttggttttttttttgtagtgtaggtgaaggtttagatgttagtgtgattttttataaggtgtggtttttagattttttggttggaagtgatgtttttttgttgtgggttttgggtttgaagtagtttggtttttttttggtaagtggttggtgttttagtagttgtaatttgagtttagttatttatatattattgtggttgatatttttattaaaaagttttttgagatgatttgtgtgtatgttgattttatgattagtgttgttgggaagaattttagagttggtggggtggggttggaagtagtaggtgtagtgatagggttgggtgtttaggaggttttagtgtttaattaggttaagg

SEQ ID NO: 2530 - DNA, 500 bp, Artificial Sequence
  chemically treated genomic DNA (Homo sapiens)
ttttggtttgattgagtattgaggttttttgggtatttagttttattattgtatttgttgtttttagttttattttattggttttggggttttttttagtggtgttgattatgaagttaatatgtatgtaagttgttttaggaaattttttaatgaaagtgttggttatggtggtgtgtaggtggttgagtttagattgtagttgttaagatattagttatttattaagagaaagttaggttgttttaaatttagggtttgtggtaaaaaagtattatttttggttggggagtttggaagttatgttttgtgggaggttatattggtatttaggtttttgtttgtattgtagaaggagagttgggtttttttttggagaatgttgtgttttttagttttatattggttttgttattatataggttgttgaggtaggaggtgggtaagatgtagttgtagatttaaagtaattattagttttgggattttgtgggagagga

SEQ ID NO: 2531 - DNA, 431 bp, Artificial Sequence; identical to SEQ ID NO: 2491
  chemically treated genomic DNA (Homo sapiens)

SEQ ID NO: 2532 - DNA, 431 bp, Artificial Sequence; identical to SEQ ID NO: 2492
  chemically treated genomic DNA (Homo sapiens)

SEQ ID NO: 2533 - DNA, 451 bp, Artificial Sequence
  chemically treated genomic DNA (Homo sapiens)
ttgagggtagatttttaaggttggaggaagaagttgtttttgggagtaggaggagttgttggattttttttttttaggtttttttttttgttttttagtgttttttgtaggtaggtaaataattttagtaggagtagtagtaggttttttagttgtagggttgtagttttgttgaatgagagaagtttttttttggtgagttagaggagtgtaggttatatatttgggtttttatttttatgttttttattgtgtttaggattgagtttagtgtgggagatgtgggttggggttgtgttggttatttttttttttttattttttgttttagttatgtttttagttttagggttgaggttagtggttagagtagattttatgatgttaggtagttttttattgggttggtttttggtaggattaggataggggtaggagggatttggagttg

SEQ ID NO: 2534 - DNA, 451 bp, Artificial Sequence
  chemically treated genomic DNA (Homo sapiens)
tagttttagattttttttgtttttgttttggttttgttaaggattagtttagtgaggagttatttgatattatgagatttgttttagttattggttttagttttggagttgaaagtatggttggagtaagaggtggaagagagggggtggttagtatggttttagtttgtattttttatgttgggtttagttttgggtatagtgggagatatggaggtagagatttgggtatatggtttgtgtttttttgatttgttagagagaggttttttttatttagtagagttgtagttttgtggttgaagggtttgttgttgtttttgttggggttgtttgtttgtttgtaagaggtgttggggggtaggaaaagaaatttgggaggaggggatttagtagttttttttgtttttagaggtggtttttttttttaattttggaggtttgtttttaa

SEQ ID NO: 2535 - DNA, 402 bp, Artificial Sequence
  chemically treated genomic DNA (Homo sapiens)
atttgggtttaggattttgtattttggaattttttgtttttttttgtgttgttataaggttaggaagtttgtaatttttatagtattaaggattttaaggaggtttaggagtaggttggtagaggtttgtggtaaaggtgtggtagttgtgattttatttttttttttttatgtgtgtttgtgttttgtggtgttattttatagatattttgtttgagaagggattatgtttgggaatttttagggttggattttgattgtagaatttgatgaaaggggttttgtagggtttagaatgaggaggaggtaatgagaattatttttggaggattttagaagtagaggttgggagtatttataggtgaatggagtttgaattatgattagaaaggaattgggaga

SEQ ID NO: 2536 - DNA, 402 bp, Artificial Sequence
  chemically treated genomic DNA (Homo sapiens)
ttttttaatttttttttagttatagtttaggttttatttatttgtggatgtttttagtttttatttttagaattttttagggataatttttattgttttttttttattttggattttgtaaagttttttttgttaggttttgtaattaaagtttggttttgggaatttttaggtataatttttttttagatagggtgtttgtgaggtggtgttatgggatatagatatatgtgagagggggagagtagggttatggttgttatatttttgttatgggtttttgttagtttatttttgggtttttttagaatttttgatgttgtgagaattgtaggttttttggttttatgataatataaagggaaataagaggttttagaatgtagggttttgggtttagat

SEQ ID NO: 2537 - DNA, 500 bp, Artificial Sequence
  chemically treated genomic DNA (Homo sapiens)
taaagtttgatagagaaggatgatttataggagtagttttgttgtgtttgaggattgtttgatatttgaaatgagttttggattagtttttggttgaagtttatttaggttttttttgtgaaggttaagttattagagttaattattatttttgttttattttgtttaaatattgttgttggggttgataattgtatttagtgaatatttgtattggaatttggagtatttatttttttttatttgtagtttgaggaattttgattttttggtgatttttagaagtttttggatgtagttgtttgtgaggtggatttgtttgttgttggttttggggttggatgatatgtttggagttttagggaggttgtgaggagtttgttttttggttaggaagtgattgttgtttgtgttgtggtttttaaggataatttttgggtggtaattatttttttttatttaggagattaatttttttgttgaggttttatttaaggttg

SEQ ID NO: 2538 - DNA, 500 bp, Artificial Sequence
  chemically treated genomic DNA (Homo sapiens)
tagttttaggtggaattttaataaagaaattgattttttgggtggaggaagatggttgttgtttaggggttgtttttaagggttgtgatgtagatagtggttattttttggttgaggggtaggttttttgtggtttttttgggattttgggtgtgttgtttagttttgaggttggtgatgggtagatttgttttatggatagttgtgtttagaggtttttggaaattattaaaggattagaattttttaggttgtaggtggagggaggtagatgttttggattttagtatagatgtttattggatatagttattaattttgatgatggtatttgaatagggtggggtaagagtggtggttgattttgatagtttagtttttgtgaaaggggtttaggtggattttagttaagaattgatttgaagtttattttaagtgttaaataatttttaagtatagtaaggttgtttttgtgggttatttttttttgttaaattttg

SEQ ID NO: 2539 - DNA, 480 bp, Artificial Sequence
  chemically treated genomic DNA (Homo sapiens)
gtttttatttattatagttgttagttttttttaattttaggaatttttgttttaagggaaataggatagatagtgtttgtgttttattttgtttatttttagatgaggaaatagttattaaggttttgtgtaaatttgttgtttatttaatagtttatattatttgttttgttttagttttttgtttgttagttggtgtttttggtagttagtaggtttgtgggggttttgttttagttaggttgggggttgggggttgggttttaggaattttgttgttgttgttggggttgttttaagttagtgtggatagaagtttagagtttaggggtattttagggttgaggggtttaggttggtttttgggttttgggtttagggtagttatttagggtgtgtgtttgtagttaattagggttgtggggaggaaggtttttggtattgttatagtttgtaggttttatgagtttggttttgggg

SEQ ID NO: 2540 - DNA, 480 bp, Artificial Sequence
  chemically treated genomic DNA (Homo sapiens)
ttttaggattaggtttatgggatttgtagattgtggtagtgttggggatttttttttttataattttgattggttgtaggtatatattttgggtgattgttttgagtttgagatttaagggttagtttgagttttttagttttgaggtgtttttgagttttgggtttttgtttatgttagtttggggtagttttaatagtagtagtagagtttttgaggtttagtttttggtttttagtttggttgagatggggtttttgtggatttgttggttgttaggaatattagttggtgagtgggaagttggagtaaggtaagtgatgtgggttgttgggtgggtggtgagtttgtatgggattttggtgattgtttttttatttgaaaatgagtagagtgggatatgggtgttgtttgttttgttttttttggggtgggggtttttaggattaggggaaattgatagttgtggtaggtggaggt

SEQ ID NO: 2541 - DNA, 364 bp, Artificial Sequence
  chemically treated genomic DNA (Homo sapiens)
gggttaggggttttataggtgagtggagttttagtagtttttttagttttgtgtgtttatgtattggttttttttttggttttatatttagtgtttaaggggttgtagtgagatggggtttgggttgtggagttgtgtttggttttgttgttttataagggtattgtggttgttagtttgtttttgtaattgttgtagagttatgtagggttataggtggtggttggttgtgggatttattttttgtgtatgatatttttaggtatttggttgggtgtggttttggtagttagtagggtttttgtattagttggtttagtttgtgttagagggtatggtggttggtatttttttttatattatt

SEQ ID NO: 2542 - DNA, 364 bp, Artificial Sequence
  chemically treated genomic DNA (Homo sapiens)
ggtggtatagaggaaggtgttagttattatgttttttagtatagattgggttagttggtgtagaggttttgttgattgttagagttgtatttagttggatgtttagaagtgttatgtataagaagtggattttatagttagttattatttgtaattttatgtggttttgtagtagttgtagggataggttgatagttatggtgtttttgtggagtagtaaagttaggtgtagttttgtggtttaagttttgttttattgtaattttttgaatattgagtatagagttagggagaagattagtatatgggtatgtagagttgagggggttgttggggttttatttatttgtgggatttttggttt

SEQ ID NO: 2543 - DNA, 467 bp, Artificial Sequence
  chemically treated genomic DNA (Homo sapiens)
tgtttttattgggtagggtaaattatattgtggtttgattataaaagttattttttaaaaaaagaagttttaaggtttttgagagatgtagttgagttttttatttggtagtgtttgatttaggaggtgatgtttgggttatgagttatagagtttggtgtttttttaagtagggagtataaatttttattttttttttttgttttttttgatgttagttggaaggtgtgtgagtgagtgaggggttgaggtattgtttgtgtgagtatatatagatatatatatatatatatatatatatatatatatatattttttagatttattttttgtttgttagttttatgagttagagagagatagagtgtggatgttgtaggaggtagtgtttggattttagttgtttaggagaggtgaggggttagatggggtttgaggatattgtgttagaaattgtggttttggtt

SEQ ID NO: 2544 - DNA, 467 bp, Artificial Sequence
  chemically treated genomic DNA (Homo sapiens)
ggttaaagttatagtttttggtatagtgtttttaggttttatttagttttttattttttttgggtagttggggtttaggtattgttttttgtggtgtttgtgttttgtttttttttggtttgtggagttggtaggtaggggatgggtttggaagatgtgtgtgtgtgtgtgtgtgtgtgtgtgtgtgtgtgtttgtgtgtgtttgtgtgggtggtattttagttttttatttatttatatgttttttagttgatgttagggagagtaggagggagggatgagaatttgtattttttgtttaaagggatattaggttttgtggtttatggtttagatattattttttgagttaggtattgttaggtgagaggtttagttgtgttttttgggggttttaaagtttttttttttggaaagtggtttttatggttgggttatggtataatttgttttgtttagtgagggta

SEQ ID NO: 2545 - DNA, 366 bp, Artificial Sequence
  chemically treated genomic DNA (Homo sapiens)
ggggagaaatgaaagtattgagtttaagtggtttgtagaattttgggggtttaggtggtatggtgggtgttggggttttgggtagagttttttggaggtttgtggtagttttatttttatggtatttattttttttgggttttgttgtagagaggaggaagtttttgttggttgagtgggtttggaggaagtgagtagtggggtttttgttttttggtttggtttttgaagattttagaagaatttggaatttgtttttatttggaatttagggattattttttgtatttagtaggtttttgtttttttgtgtggaaagtggttgggtgagttttggtattggggttattatatttgagtgttggg

SEQ ID NO: 2546 - DNA, 366 bp, Artificial Sequence
  chemically treated genomic DNA (Homo sapiens)
tttaatatttaagtatggtggttttgatgttagaatttatttaattgttttttatgtaggaaaataaaggtttattgagtgtaaagggtggtttttggattttgaatggaagtaagttttgggtttttttggggtttttggggattaggttgggaggtaggagttttgttgtttattttttttaggtttgtttagttggtaggagtttttttttttttgtggtagggtttgaggggggtggatgttgtgaaagtgaagttgttataaatttttagaaagttttgtttggagttttagtgtttgttgtgttgtttgggtttttggggttttgtaggttatttaaatttaatgtttttattttttttt

SEQ ID NO: 2547 - DNA, 333 bp, Artificial Sequence
  chemically treated genomic DNA (Homo sapiens)
tttatatgatttagtggatgggtattgtgaggaggtttttttaggaagtttttaatttggtgattattatggtgggttatgaatggatgagtgtagagttggttagttggattttttttaagtgtattttttttttttgatatttggttttttggagttgggaatttttttgttgtttttttgtttgtagttaatagagattttttttattgaggaaaaggtatatagatttggaattgttagatattgtaagtttattatgttttaaaaaatattaaaataatattgaaagttttttttttttagtttttttagggagggggttttagatat

SEQ ID NO: 2548 - DNA, 333 bp, Artificial Sequence
  chemically treated genomic DNA (Homo sapiens)
atgtttgggattttttttttgggaggattggaggggaggagtttttagtgttgttttaatattttttaaaatataataagtttataatatttggtggttttgaatttgtatgttttttttttagtgaagaaaatttttgttggttgtgagtagagaagtggtggaaggatttttgattttgggaagttaggtgttggaaggaggaagtatgtttgaagggggtttggttggttgattttgtatttgtttgtttgtggtttattgtggtggttattaaattgagggttttttggaaggatttttttatggtgtttatttattgggttatgtggg

SEQ ID NO: 2549 - DNA, 378 bp, Artificial Sequence
  chemically treated genomic DNA (Homo sapiens)
gttgtgagtttgttagaaggtgttgggggtgggtatagttattgtttattattatttttaatggggtattggtagttatgtggttggaaggggtttatggtgtaatggtttggaaggtagtgatattattgtttttgttttaagaattatttggttttttggggaagattggttgttggggagggttaaggggttaggtatttaggtttagtgattttatggtatttttgttgtttttttaggtatttgttgttgggttttggtaggggtttgtgtttgtggtagtgtatgtgggattggggtttttgtgtggttgtgtatttgggtttgtgtgtggtgtgagggagatttgttttgtttattatggggattttggtt

SEQ ID NO: 2550 - DNA, 378 bp, Artificial Sequence
  chemically treated genomic DNA (Homo sapiens)
gattagagtttttatggtgaatggaataggttttttttatgttgtatatagatttagatgtatagttatatagaaattttagttttatgtgtgttgttataggtataggtttttgttagagtttggtagtagatatttggggaggtggtgagggtgttgtggggttgttaagtttgggtgtttggttttttggttttttttaatagttagttttttttaaagggttggatggtttttaggatgggaatgatggtgttattgttttttgggttattgtgttataggttttttttgattatgtggttgttggtgttttgttgggggtggtggtgagtggtaattgtatttgtttttaatattttttgataggtttatagt

SEQ ID NO: 2551 - DNA, 269 bp, Artificial Sequence
  chemically treated genomic DNA (Homo sapiens)
tttttggggaagattggttgttggggagggttaaggggttaggtatttaggtttagtgattttatggtatttttgttgtttttttaggtatttgttgttgggttttggtaggggtttgtgtttgtggtagtgtatgtgggattggggtttttgtgtggttgtgtatttgggtttgtgtgtggtgtgagggagatttgttttgtttattatggggattttggtttgtatgtgggggtttttgggttggtgagatttagggttgtagatga

SEQ ID NO: 2552 - DNA, 269 bp, Artificial Sequence
  chemically treated genomic DNA (Homo sapiens)
ttatttatagttttggattttattagtttaggaatttttatatgtagattagagtttttatggtgaatggaataggttttttttatgttgtatatagatttagatgtatagttatatagaaattttagttttatgtgtgttgttataggtataggtttttgttagagtttggtagtagatatttggggaggtggtgagggtgttgtggggttgttaagtttgggtgtttggttttttggttttttttaatagttagttttttttaaagg

SEQ ID NO: 2553 - DNA, 496 bp, Artificial Sequence
  chemically treated genomic DNA (Homo sapiens)
tttttggttagatttggagtttataagttaattttagaaatgattggttgatttagttgttgttattatattggtttagaaggagggtggggggaggatgggttggggaggggtagtaaggggaagggatgtgtgttggtgtgtgtggagagggtgtttttttgtttttgtttttttggtttggtggggtttttttgtggttatttggggagatgttttagatagttgtggtttttgtgatttgtgttttttttgtagaaggtattattgggttgggttttagatgggtattttgtgagtggattggtgagttttaattttttggaatgtgttgttgggggttgtggtggtaggtttttggttttttggtttattttaggtttttttggtgttgagagtttttgaggtttgatttttttgtttgttgtttgtgttgtttattttgaaaataagagtgttttggtggaaggatttgagaataaaatgttggggtaaa

SEQ ID NO: 2554 - DNA, 496 bp, Artificial Sequence
  chemically treated genomic DNA (Homo sapiens)
tttgttttagtattttgtttttaaatttttttattgaaatatttttgtttttaaagtgagtagtatgggtaataggtaaaggaattaggttttggaagtttttaatattagaaaggtttaaaatagattaaaagattggaggtttgttattgtagtttttagtagtgtattttggaaaattaaaatttgttgatttgtttgtaaggtgtttgtttaaaatttagtttaatagtattttttgtaaagaggatatagattataggaattatgattgtttaagatgtttttttgggtggttgtgaagggattttattgagttgggaaagtaggagtgaaggagtattttttttatatatattgatatatattttttttttttattgtttttttttgatttgttttttttttattttttttttgggttaatgtgatagtagtagttgagttgattagttatttttaaaattagtttgtgagttttaggtttggttaggag

SEQ ID NO: 2555 - DNA, 285 bp, Artificial Sequence
  chemically treated genomic DNA (Homo sapiens)
aggggtagtttttttttattatagggattttgtgtgttaggttttagttgtgttgttgttgaattatggatttaatagtagagaagttttgtaggttgtttgtgttggtttgggaaattggggtttagttggggtttgttatggttttggtgttgttttgttttttgttggtgttatggagtaagtggagagatttatttttttggttttaagaggtattaatggaggaggttgagaggtaggagttgaataattgatggttttttttggtttaggatttgttga

SEQ ID NO: 2556 - DNA, 285 bp, Artificial Sequence
  chemically treated genomic DNA (Homo sapiens)
ttagtagattttgagttagagaaggttattaattatttagtttttgttttttagttttttttgttagtattttttaaagttgggaagataaatttttttgtttgttttgtggtgttgataggaagtagggtggtattaggattgtgataggttttggttgggttttggttttttgagttagtataggtggtttgtaaggtttttttgttattaaatttataatttagtggtaatgtagttggggtttggtatatagggtttttgtgatgaggaggggttgttttt

SEQ ID NO: 2557 - DNA, 448 bp, Artificial Sequence
  chemically treated genomic DNA (Homo sapiens)
tttttttttagttgtttgagggttggttggtgtgagtttaggtttttgtagggtatgttaggagtaagttgtgatttggttttgggttgtggagtttatgttattttttattgaggattttgggttgttttgttttgtgtatgggtatttgggttttgatagtttgttgggttttgggttattagaggttttgaattgtgttttggtgatagttagttttttgtatggggtatgtatagatttgggtttaggttggggtattgagatttttatatttagtagttgtggtgaggttggtttgtttgttttttggggttatttttgttgtgttgtttttttttttttttttgttttttttgttggttgttttttttttgttttttttgggtaggtatggttgggtgggggtgaggttttggtaaagttttttttgttttttagtttagtg

SEQ ID NO: 2558 - DNA, 448 bp, Artificial Sequence
  chemically treated genomic DNA (Homo sapiens)
tattgggttggaaaatagagggggttttgttagaattttatttttatttggttgtgtttgtttagagagggtgggggaggagtaattaatagagggggtaggggagagggaggagatggtatggtagaggtggttttgggaagtaggtaggttagttttattgtggttgttggatgtggggattttggtgttttagtttaggtttaggtttgtgtgtgttttatgtaaggggttgattgttattaggatgtaatttaaggtttttggtggtttagggtttggtgggttattagaatttggatgtttgtatgtgggatagagtagtttaggatttttagtggagagtagtatgggttttatagtttggggttaggttatagtttgtttttggtatattttataggagtttgggtttatattagttagtttttaggtagttgaggaagga

SEQ ID NO: 2559 - DNA, 374 bp, Artificial Sequence
  chemically treated genomic DNA (Homo sapiens)
tttgttgggtatagtgggtaatgggttggtgttggtagtgtttttgtagtttggtttgagtgtttggtaggagtttggtagtattatggatttgtttatttttaatttggtggtggttgatttttgttttattttgtgttgtgtgtttttttaggttattatttatatgttggatgtttggttttttggggtttttgtttgtaaggttgtgtatttgtttatttattttattatgtatgttagtagttttatgttggttgttgtttttgtggataggtgtgttgtgtttggggtttggttgggtagggttgtgggggtgggggttgggggaggagttttgaatagatttttattggttttaggaaggagagagt

SEQ ID NO: 2560 - DNA, 374 bp, Artificial Sequence
  chemically treated genomic DNA (Homo sapiens)
atttttttttttttaaggttagtgaggatttgtttaggattttttttttaatttttgtttttatagttttgtttagttaggttttaggtatagtgtatttgtttatggagatagtagttagtgtaaagttgttggtgtatatggtgaggtagatgagtaggtgtatggttttgtagatgagggttttaaagagttaggtatttagtgtgtagatggtggtttggaagggtatgtagtataggatgaagtagaggttagttattgttaggttgaggatgaataggtttgtggtgttgttaggtttttgttaggtatttgggttaggttgtaggagtattgttagtattagtttattgtttattgtgtttagtagg

SEQ ID NO: 2561 - DNA, 500 bp, Artificial Sequence
  chemically treated genomic DNA (Homo sapiens)
ggagatggttgatgtttagaatattttattggatagtttagggagtgtgggggttgtggtagtgtttgtggtttttgttttaatttttttgttgggtatagtgggtaatgggttggtgttggtagtgtttttgtagtttggtttgagtgtttggtaggagtttggtagtattatggatttgtttatttttaatttggtggtggttgatttttgttttattttgtgttgtgtgtttttttaggttattatttatatgttggatgtttggttttttggggtttttgtttgtaaggttgtgtatttgtttatttattttattatgtatgttagtagttttatgttggttgttgtttttgtggataggtgtgttgtgtttggggtttggttgggtagggttgtgggggtgggggttgggggaggagttttgaatagatttttattggttttaggaaggagagagtgggggattagaaagggaggtgggtgggaggaaataaaag

SEQ ID NO: 2562 - DNA, 500 bp, Artificial Sequence
  chemically treated genomic DNA (Homo sapiens)
tttttgtttttttttatttatttttttttttggttttttatttttttttttttaaggttagtgaggatttgtttaggattttttttttaatttttgtttttatagttttgtttagttaggttttaggtatagtgtatttgtttatggagatagtagttagtgtaaagttgttggtgtatatggtgaggtagatgagtaggtgtatggttttgtagatgagggttttaaagagttaggtatttagtgtgtagatggtggtttggaagggtatgtagtataggatgaagtagaggttagttattgttaggttgaggatgaataggtttgtggtgttgttaggtttttgttaggtatttgggttaggttgtaggagtattgttagtattagtttattgtttattgtgtttagtaggaagattagggtaaagattataggtattgttatggtttttatattttttgggttgtttagtgaaatgttttgggtattagttattttt

SEQ ID NO: 2563 - DNA, 419 bp, Artificial Sequence
  chemically treated genomic DNA (Homo sapiens)
gttgggtttaatttttttttaggggaattttaagataaagttgggggatgggagtttaggtagaaattgttgggggaattgagttagagttgaaagttttttttgtgatttttatttttagttttttggttggtttataggggttgggagggaggtagggggatattatttggttgagatatggggtggtggtagtgtgtgttttttagttttttttggtgttgggattgtggttatttttttagggttttgttgagttttggttgttggggttgtaaagattaaaagtttagagttagtttattttttgtgtagaggatagaggggtaaggtttggggtggagaggtggggagatgaggtttatgagaaagtttgaaattttttaagtatttagggttagataaagatttgtttttta

SEQ ID NO: 2564 - DNA, 419 bp, Artificial Sequence
  chemically treated genomic DNA (Homo sapiens)
taggaggtagatttttatttggttttgggtgtttgaggagttttaggtttttttataagttttgtttttttgtttttttattttaggttttgtttttttattttttgtataggaagtgggttggttttgggtttttagtttttgtggttttagtagttagagtttagtagggttttggagagatggttatggttttagtattggggaggattggagagtgtgtgttgttattgttttatgttttagttaggtgatgtttttttgttttttttttggtttttgtggattagttagagggttgggagtgaaagttatagagaagatttttagttttgatttagtttttttagtagtttttgtttgaatttttattttttaattttgttttagaatttttttagggaggggttgggtttagt

SEQ ID NO: 2565 - DNA, 483 bp, Artificial Sequence
  chemically treated genomic DNA (Homo sapiens)
aggtttgtaatggtgttggtatttgttagagtaaagtagaatttttttttttttagattttagtggttgagttgggttgttagggtagggatggtgagggtttaaatgttagggtagagtaggttatggtattttgtttatttataaatgtttttgtagattttggtgatggttgtattgggggtgtagtttttagaattatttgaagtttatgtagattgtttttttaagtatgggggtgggggaggttggttttttgagtagggtttggtttttgtattagtgtagttttattttttttttagtttaggtttaggttgttgggggtgtagagagggtgagttgtaagtggaggtgagaagggagtttgtgggatgtaggtttagagagaagtttttgaggaatttttttgttttttttatgagtggagttttggggtagttttgtgtttttgttatagttattttaggagatgatggttgt

SEQ ID NO: 2566 - DNA, 483 bp, Artificial Sequence
  chemically treated genomic DNA (Homo sapiens)
atagttattattttttgagataattgtggtagaaatatggagttgttttaaggttttgtttgtgaagggaatagagaggttttttggaggtttttttttgagtttgtgttttatgagttttttttttatttttatttgtagtttgttttttttgtatttttagtagtttggatttgggttgggagggaggtggggttgtattggtgtagaggttgggttttgtttagggggttagttttttttatttttgtgtttgggggagtagtttatgtgagttttgagtggttttgggggttgtatttttagtatagttattattagggtttgtggagatatttgtgggtggatgggatgttgtggtttgttttgttttggtatttgaatttttattatttttgttttgatggtttagtttagttattggagtttgggaggagggaggttttgttttgttttgatagatgttaatattattgtaggttt

SEQ ID NO: 2567 - DNA, 439 bp, Artificial Sequence
  chemically treated genomic DNA (Homo sapiens)
ttgatgtttttttttagtttttattttttttttagaagttttttttttttgttttgagaggggttgagttagttgtggtttttttttattttgattttagtggagataagttggggaagtttttgggagttgtgtgggtgagtagagttgagatttggtatggttgtattggttgggttattgtagggtgattggtggtttggtttgataatatgtttatttgagttatttttggtaaaggttattaggttttaggatggaatatgtatgggggaaatgttttttttgtgatatgtttattttgttttaaagtgagatgagggagggagggtgtggttgttaggtaatgaagtttagagtttattagagttgagggattgatgtgttgtgtatgggttgggttttatttttaggaagtttaggataaaattttgtttat

SEQ ID NO: 2568 - DNA, 439 bp, Artificial Sequence
  chemically treated genomic DNA (Homo sapiens)
atgaatagggttttgttttgagttttttggaaatgagatttagtttatatgtaatatattaattttttaattttagtaaattttagattttattatttggtagttgtgtttttttttttttgttttattttagagtgaggtgggtgtgttatggaagaggtattttttttatgtgtgttttattttggagtttggtaatttttgttaaagatgatttaggtaaatgtgttattaagttgagttgttagttattttgtagtgatttggttagtatagttatgttgggttttagttttgtttatttgtgtagtttttagaaatttttttggtttgtttttattggaattgggatggaagggagttatggttggtttagttttttttggagtagaaagaggaaatttttgaaaagaagatgggggttgggggaggatattaa

SEQ ID NO: 2569 - DNA, 450 bp, Artificial Sequence
  chemically treated genomic DNA (Homo sapiens)
aggtatatttgtttagtttttggttatgtgggtatttggtgttgagtatttatttgtttgtgttgattgatgtttttttttagtttttattttttttttagaagttttttttttttgttttgagaggggttgagttagttgtggtttttttttattttgattttagtggagataagttggggaagtttttgggagttgtgtgggtgagtagagttgagatttggtatggttgtattggttgggttattgtagggtgattggtggtttggtttgataatatgtttatttgagttatttttggtaaaggttattaggttttaggatggaatatgtatgggggaaatgttttttttgtgatatgtttattttgttttaaagtgagatgagggagggagggtgtggttgttaggtaatgaagtttagagtttattagagttgagggattgatgt

SEQ ID NO: 2570 - DNA, 450 bp, Artificial Sequence
  chemically treated genomic DNA (Homo sapiens)
atattaattttttaattttagtaaattttagattttattatttggtagttgtgtttttttttttttgttttattttagagtgaggtgggtgtgttatggaagaggtattttttttatgtgtgttttattttggagtttggtaatttttgttaaagatgatttaggtaaatgtgttattaagttgagttgttagttattttgtagtgatttggttagtatagttatgttgggttttagttttgtttatttgtgtagtttttagaaatttttttggtttgtttttattggaattgggatggaagggagttatggttggtttagttttttttggagtagaaagaggaaatttttgaaaagaagatgggggttgggggaggatattaattagtatggataagtaagtatttagtgttaggtgtttatgtggttaggaattaaatagatgtgttt

SEQ ID NO: 2571 - DNA, 481 bp, Artificial Sequence
  chemically treated genomic DNA (Homo sapiens)
ttatttaggttatttttttgtttgtatgaattttaggttatttttagaaagggttttatagttttggtgttttattttttgatttttgttaagttgtttttagtagtagttggaattttttgaagtggttgttatagatgttggtaaagtttggtttgggatgtttttattttgtattaggtatggggttgtttttgttgtatatttatttggaaattatttatatgttaagtattgtagaggtaaggggagtttgttattggattgtgtttaatatggttgtagggatatagataagtatattttttggtagaggtatgggtttggttggttggagttgtagtagttgtgtgtggttatagagtttttaaatgagggagatggatggttttgttttatagtgtgtttagagtatgtttatggtgtttgggaagattagggatttattatgtttggttttggttttttttatagtgaagtt

SEQ ID NO: 2572 - DNA, 481 bp, Artificial Sequence
  chemically treated genomic DNA (Homo sapiens)
ggttttattgtgagggaaattagagttgggtatggtgagtttttggtttttttaggtattgtggatatgttttgggtatattgtgaagtgaggttatttattttttttatttggaagttttgtgattatatatagttgttgtagttttagttagttgggtttgtgtttttgttagggaatgtgtttgtttgtatttttgtagttgtgttgaatgtagtttaatggtagattttttttgtttttgtggtgtttggtatgtggatgatttttaggtgaatatgtagtagaggtagttttgtgtttggtgtagggtggaggtattttaggttgggttttgttaatatttgtggtagttattttaaagagttttagttgttgttgaagatgatttggtaaaggttagagagtgagatattggggttatgagattttttttaagggtggtttgaggtttatataagtaaagagatgatttgggtga

SEQ ID NO: 2573 - DNA, 223 bp, Artificial Sequence
  chemically treated genomic DNA (Homo sapiens)
ttttgttgtttaaaattttgttagtttttaggaagtgttgttttgttaaaagtttgtatatgagatttttgtgggttaggattgattttttttttatatagggttgggtggggtaagtaggaaggagtttgttatagttaaggtgatgtatttttgttgggttagtttgaatagtagttgggttggtaagtgataggagtatgggttattttttttttagagg

SEQ ID NO: 2574 - DNA, 223 bp, Artificial Sequence
  chemically treated genomic DNA (Homo sapiens)
tttttggggaaaagatgatttgtgtttttgttgtttgttgatttagttgttgtttgggttggtttggtaaggatgtgttattttgattgtaataggtttttttttgtttgttttgtttagttttgtgtggggaggaagttagttttggtttatgggggttttgtgtgtaggtttttgataaaatagtattttttaaaaattggtagagttttgagtagtaggg

SEQ ID NO: 2575 - DNA, 495 bp, Artificial Sequence
  chemically treated genomic DNA (Homo sapiens)
tttataggtttttttttttttgggattggttagattttttttagatggttttatttttgttatggttgattggtttaggttggatatgtgatttaagtgaaatttaatgggatttttttttgtgattttgaatttggggaggagatttggagtttggaggtggtagtgatttgggagttgtgtgggtttgtttgttttatatattgtttttttgtttttttttttaatttatggtttttttagaggataatttttttttttaaattttttggatgaggtttttgtggtagttgagagagttatgtagtgggggtgttttttttgtttgtgggggagttttaggtggtttgtatagttttgtggtggttgggtttggttatgtgtgttttttggtttttatgtggttttagtagggtgtttgttttttttttagggtttttttttttaggagggatagtaggaaggtaggtaaggataggatttgagtttatattt

SEQ ID NO: 2576 - DNA, 495 bp, Artificial Sequence
  chemically treated genomic DNA (Homo sapiens)
aggtgtggatttaggttttgtttttgtttgtttttttgttattttttttgggggaggaagttttgggagggaggtgggtgttttgttggggttatatggggattgaggagtatatgtggttaggtttgattattatgagattgtgtgggttgtttggggtttttttataggtggggaaggtatttttgttgtgtgatttttttggttgttataggaattttgtttgaggagtttaaggaaaaaggttgttttttgagggggttataggttgaaggaaggggtaagaaggtagtgtgtggaatagataggtttatgtggtttttaagttgttgttatttttaggttttaggttttttttttgggtttagaattataggagagaattttattgggttttatttgggttatgtgtttagtttggattaattagttatggtaggggtggggttatttggagggagtttggttagttttagagaagaaagagtttgtggg

SEQ ID NO: 2577 - DNA, 390 bp, Artificial Sequence
  chemically treated genomic DNA (Homo sapiens)
tagatgggtatatttttttttttttattttatggttgttttagttttagtagttagtttgaaggatttttagggggtagttattttgttttggttttttttaggttgggaagtgggagtttgtgtttttaaatttttagtaggttgaaatggttgatgatattattggtttttgggagtggtagagttggagttggagttaagggagtttaggttgttgggggttgtagatatggagggttagagtagtaggggtagtaggaggttagggatttgggttggtttgggttttttgtttatgttttagggtgttgtttaaattggggtattttttaaggtaagatttttgagatttagtgttttttgtttttttgatttttggttttatata

SEQ ID NO: 2578 - DNA, 390 bp, Artificial Sequence
  chemically treated genomic DNA (Homo sapiens)
tgtgtggaattagggattaggaaagtggggggtattgggttttaggggttttattttggagggtgttttagtttgggtaatattttggggtatgggtagggaatttaggttagtttgggtttttggttttttgttgtttttgttgttttggttttttatgtttgtagtttttggtagtttggatttttttggttttggttttagttttattgtttttgggaattagtgatgttattagttattttaatttgttgagaatttaaaggtataggtttttattttttagtttggaagaggttgaagtaaggtggttattttttgggaattttttaaattggttgttgaggttggaatagttatggagtggggaggggagagtgtatttatttg

SEQ ID NO: 2579 - DNA, 497 bp, Artificial Sequence
  chemically treated genomic DNA (Homo sapiens)
tagttttatttgttttgtttgtttttagtagatattgtttttttttttatttttaaagtttttatttggtttagatttttttttgagattagtattatttaatagttttttataaaaaattgtttttttgattattgagggtaataatgaaaatatgtaattgaatttttaagaaattattatttttataatttgtgtttagtttttgagataaattaaatgttttttttgtatggtgagttgtttattgtgtattagagaggggttgatattgttttttattattgatgtgggatttattaagaagaatgttttatattgttttttgggaggtttttggtatttttagtttatggttttgagtgggtagagttggttagttggaggtgttgggtgggtggttaggtgggtttttttttgattatttttggttttgttattggttagttgtgtggtggtgtgggtggtaagtgggagggttagttagaattttagtt

SEQ ID NO: 2580 - DNA, 497 bp, Artificial Sequence
  chemically treated genomic DNA (Homo sapiens)
ggttaagattttgattggtttttttatttattatttatattattatgtagttagttagtaatagggttaggagtgattaggagggggtttatttgattatttgtttggtgtttttagttggttaattttgtttgtttagggttatgagttggaggtgttaggagttttttgggaggtagtgtgaggtattttttttagtaagttttgtattgatgataaagggtagtattagtttttttttgatgtgtagtgagtggtttattatataggggaggtgtttaatttattttgggaattgggtgtaagttataaaaatggtaattttttggagatttaattatgtgtttttattgttatttttggtaattaaggaaataattttttataaaaggttgttggatgatattgattttaggagaggatttgggttgggtgggggttttgggaatgaagaggagggtagtgtttgttgggggtaggtagggtaagtggagttg

SEQ ID NO: 2581 - DNA, 349 bp, Artificial Sequence
  chemically treated genomic DNA (Homo sapiens)
taggtatggtttattttttttttttttgttggtgttttttattagggattttattttgttttgttgtttgtttttttttggtttttgttggattttttttaagtgtttggtatgttttttattgattttgaagagtggttagtgttttttgtagtttgggtttgggggtgtggatgaaggagttttaggtagttttatgagtatagagagtattgtaggttgtggtgagttttggtttatttttttagttatatgattgtagttttttatgtgtattttagtgggtatggattagggttagtttttgagtatttttggttaggaagtttaggtattttagtgggttgtt

SEQ ID NO: 2582 - DNA, 349 bp, Artificial Sequence
  chemically treated genomic DNA (Homo sapiens)
ggtaatttattggggtatttgagttttttggttaaggatgtttagggattggttttgatttatgtttgttgggatgtgtataggaggttgtagttatgtagttgggaggatgagttggagtttattgtagtttatggtgttttttgtgtttatgagattgtttggggtttttttatttatatttttggatttgagttgtagagagtattggttattttttagagttagtgggaggtatgttgagtgtttgaggagagtttagtaggggttaggaagaagtgagtagtagggtagagtggagtttttggtggagggtattagtgagagaagagaggatggattatgtttg

SEQ ID NO: 2583 - DNA, 355 bp, Artificial Sequence
  chemically treated genomic DNA (Homo sapiens)
tagaatttttaattttatattatagtgtgttaggtatggtttattttttttttttttgttggtgttttttattagggattttattttgttttgttgtttgtttttttttggtttttgttggattttttttaagtgtttggtatgttttttattgattttgaagagtggttagtgttttttgtagtttgggtttgggggtgtggatgaaggagttttaggtagttttatgagtatagagagtattgtaggttgtggtgagttttggtttatttttttagttatatgattgtagttttttatgtgtattttagtgggtatggattagggttagtttttgagtatttttggttaggaa

SEQ ID NO: 2584 - DNA, 355 bp, Artificial Sequence
  chemically treated genomic DNA (Homo sapiens)
tttttggttaaggatgtttagggattggttttgatttatgtttgttgggatgtgtataggaggttgtagttatgtagttgggaggatgagttggagtttattgtagtttatggtgttttttgtgtttatgagattgtttggggtttttttatttatatttttggatttgagttgtagagagtattggttattttttagagttagtgggaggtatgttgagtgtttgaggagagtttagtaggggttaggaagaagtgagtagtagggtagagtggagtttttggtggagggtattagtgagagaagagaggatggattatgtttggtatattgtggtgtggagttggagattttg

SEQ ID NO: 2585 - DNA, 475 bp, Artificial Sequence
  chemically treated genomic DNA (Homo sapiens)
ttattttttatttattttttttagagatatttaagatattaatagtaggattgggatgtgtttatgaaaagaatttaaattttagtttaagttataggtataaagtatagtttaatagatagggaaggggtagggtaagggagtgtgattttggtggtagttggagaaggtattgttggagtatgtttaggaggagtttgttagtgttagggtaatgggataggaagggtaagttaagtttgagtttagggaatgtaaaggaaatagtagttatgttttttttatgttgttttggtatttttaagtagttttgtataaaatttttgtgtatatatatatatgtatgtttattttttttttttttttttttttttttttatttgtttgatagttttttttaggtttggattttatgtttgatttttgttttggtaagtttgtttttttttttagtttgttaggggtatattttgta

SEQ ID NO: 2586 - DNA, 475 bp, Artificial Sequence
  chemically treated genomic DNA (Homo sapiens)
tgtagagtgtgtttttggtaggttggaggggaggataagtttgttaggataaaggttagatgtagaatttagatttgaaggaaattattaggtagatagagagagagagagagagagagagagagtgagtatgtatgtgtgtgtgtgtgtaaagattttatgtggagttgtttggaaatattaagatgatgtaaaggaaatatggttgttgttttttttatattttttgggtttggatttggtttgttttttttgttttattgttttggtattggtgagttttttttggatatattttagtagtgttttttttagttgttgttagggttatatttttttgttttgttttttttttgtttgttgggttgtattttgtgtttgtggtttgagttaggatttgggttttttttgtaaatatattttagttttgttgttgatgttttaagtatttttaagaaggataaatgaggagtga

SEQ ID NO: 2587 - DNA, 223 bp, Artificial Sequence
  chemically treated genomic DNA (Homo sapiens)
ttttattttttgttttgggttaggtgggtattattaggggtttttttggtaaggagtattgggtaggtatttggttttgttaatttattattggaatagttggggggatagtagataggtatggttggatagatttgatagattaggtattaggttttttgtgttggttttgggttttttaagtaggaatgtgaatggttttaagatgttttatatggtttta

SEQ ID NO: 2588 - DNA, 223 bp, Artificial Sequence
  chemically treated genomic DNA (Homo sapiens)
tgggattatgtgagatattttgaggttatttatgtttttgtttaaagagtttgggattagtgtagagggtttgatgtttgatttgttaagtttgtttgattgtgtttgtttgttgtttttttagttgttttagtggtggattggtaggattgggtgtttatttggtattttttattaaaggagtttttggtagtgtttatttagtttaggataaggagtggaa

SEQ ID NO: 2589 - DNA, 448 bp, Artificial Sequence
  chemically treated genomic DNA (Homo sapiens)
gttttatgtttaggttttagttttgtttattgtaattttgtgtttgttatgtttagtaggtttttgttttagtttagtttttagagagtagattttaggtgttggttttgggggttttggtttgagttttagttattgtgttatgtttttggaattgggattaaggttattgttttaggtaagtggtttttaattttttttagtttgttttattttttgttgtttttggaaaatttgttttttttttttggggtttttttttttttgtttttttagttttaagtattgatttttatttttttttatggggtttggaggaggtgtattagtttttgggtaattggtaggaagggtttttatagtgggagtagttggatgtagtttggttttggggtttgagttgggattgggtagggttagggtttttttttttttttagggtagatgt

SEQ ID NO: 2590 - DNA, 448 bp, Artificial Sequence
  chemically treated genomic DNA (Homo sapiens)
atatttgttttggaagagaggaggagttttgattttgtttaattttagtttaggttttgggattaggttgtatttggttgtttttattgtggaggttttttttgttggttatttggagattaatgtattttttttaggttttatggagaaaggtaagggttagtgtttaaggttgggaggatagaggggaggaagttttagagagagaaaatagattttttagggatagtagagggtgagataggttgggaaaggttgagagttatttatttaggatggtgattttggttttagttttgaagatataatatagtgattgaggtttagattaaaatttttggggttagtatttggggtttgttttttgggggttgggttggagtaggagtttgttgggtatgatgggtatagggttgtagtgggtggggttgggatttagatatgaggt

SEQ ID NO: 2591 - DNA, 383 bp, Artificial Sequence
  chemically treated genomic DNA (Homo sapiens)
tttaattttattttgttggtttagaagtaggatgaggggagagataaagttaaatttttgattagttttttttgttttggttaggaagttagagtgtgagagtgtgtggggtttggtatttggttttatttggttatttgtgttgaataggatgttttgaaggatgataaggttgttttggattttgatgttatgtttgttttaaatttttgatggggagaaatgtggggtgttatgtggtatttttaggttattggtttttattttgggatttaggtgagaagttagggttttggggttttttgtgattttttggtttttgtttatggagggtagttgtttgattaaaataggattttttttttttaaggtatatttttaag

SEQ ID NO: 2592 - DNA, 383 bp, Artificial Sequence
  chemically treated genomic DNA (Homo sapiens)
tttggaaatgtgttttgggagagaaaggttttgttttagttaaatgattgttttttatgggtaaaggttaagaggttataggggattttgagattttggttttttatttgaattttagagtgggaattggtgatttggaggtgttgtgtggtgttttgtgtttttttttgttaaggatttgaaataagtgtggtattaggatttgaggtagttttgttgttttttagggtattttgtttagtatggatggttgagtggggttggatgttgagttttgtatatttttatattttggttttttgattagggtagggggagttggttaagggtttggttttgtttttttttttgttttatttttgggttagtaggatgggattgga

SEQ ID NO: 2593 - DNA, 293 bp, Artificial Sequence
  chemically treated genomic DNA (Homo sapiens)
gggttgttagggattgagttttgagttagtttgagatttaggaaattttgttaggagggagaagggagaagtagattttggatattagaaagttaggggaagggttataaaaggagtggatgtgatggaagggtgggtttttgggtttttttagaatatattttttgtgtttagggggattagaggggtagagtttattgtgtgaaagttttattgttatgattaggtagttgggatgtggggtggatgttagaaaagattttatggaataagagagagtttaggatagtagg

SEQ ID NO: 2594 - DNA, 293 bp, Artificial Sequence
  chemically treated genomic DNA (Homo sapiens)
tttgttgttttgggtttttttttattttgtggagttttttttggtatttattttatgttttggttatttggttatagtagtggggtttttatgtagtggattttgtttttttgatttttttgggtataggggatatgttttgaagagatttaggagtttgtttttttgttatatttattttttttgtgattttttttttggttttttggtgtttagagtttgtttttttttttttttttttgatggggttttttgagttttaggttggtttagggtttagtttttggtagttt

SEQ ID NO: 2595 - DNA, 388 bp, Artificial Sequence
  chemically treated genomic DNA (Homo sapiens)
ttttgaggggttgaattgttttttattttttggaagttgggaggttggaagaggggatgtgtgtgatggatttagtatatagttgggaatttgaggtatatttaagtttttgtttgtgttgtgtggagtttatatttttttttttattggggttttaaaatttttttttatttaatagggtggtgttgtttaaagttttgggtatatattagggttggggagggggtggtggagagggggttttagtttgtttaattattaggtaatggggtatttgttttttttttagttgggtttggatttgtgttttaggtttaggttgtaatgttttttttttttttttttttttttttttgtagttttgttgggttttgtttaggatagataa

SEQ ID NO: 2596 - DNA, 388 bp, Artificial Sequence
  chemically treated genomic DNA (Homo sapiens)
ttatttgttttgggtaggatttaatggaattgtaaaaagaagagaaagagaaagagaaaggtattgtagtttgagtttgggatgtgggtttagatttagttgagagaggggtaggtgttttgttgtttggtggttgggtaggttggagttttttttttattattttttttttagttttaatgtgtgtttagagttttgagtagtattattttgttgagtgaggggaggttttgagattttagtggggaaggaagtgtggattttgtatagtataagtgaaggtttaggtgtgttttgagtttttagttgtgtgttgagtttattgtatgtatttttttttttaattttttagtttttagaaggtggggggtagtttagttttttagag

SEQ ID NO: 2597 - DNA, 267 bp, Artificial Sequence
  chemically treated genomic DNA (Homo sapiens)
ttttggtttgattttttttttgtaggttggggtgggaatgggagagttgtattgtgtttagttgggttggatattggagatttgggttttttttttttttttatattgggttttatttttttttgatttattgatagtgattttttttgttattttagttttttgtttttatttaggttatgttatttgatttggaggatagtgttggtggttagaaatatgattgtttgttttagagttttttgttttggtaagttttagatgttt

SEQ ID NO: 2598 - DNA, 267 bp, Artificial Sequence
  chemically treated genomic DNA (Homo sapiens)
gggtatttggggtttgttagggtaggaggttttgggataggtagttatatttttggttattagtattgttttttaggttagataatgtggtttgggtagaggtggggaattggggtggtgagagggattattgttgataggttaggaaaggatggggtttaatgtggggaaaagaaaaagatttaggtttttgatatttaatttagttgagtatagtgtgatttttttatttttattttaatttataaagaggaagttaggttaggg

SEQ ID NO: 2599 - DNA, 408 bp, Artificial Sequence
  chemically treated genomic DNA (Homo sapiens)
ttttttgttttagttaggaattttgtggggttgatgagggttaatattttatttttttttttttttgtggttgatttttgggggtggtgatttggttttttttttttttgttaaagttagagttgttgatggtttgttattggttttttagttagggttggtttttgtttttgtggtttagttgttgagttggggttttgttttttaggggttttttttttttttttgtttataagagtttgattttggttggttttagatttgatatgttttttgggtttattttggtaagttttaggtttggaggaggggtgggattagagttttgagtgagtattttgggaggtgaggaatttaggtttttagttttagggatgttattgtgttattttgaatgttatttttatt

SEQ ID NO: 2600 - DNA, 408 bp, Artificial Sequence
  chemically treated genomic DNA (Homo sapiens)
gatgaggatggtatttaggatgatatagtgatatttttaggattggggatttgggttttttgttttttagaatgtttatttagaattttgattttattttttttttaaatttgggatttattgagataggtttagggaatatgttagatttgagattagttgaggttgggtttttataggtagggagggaagaggggtttttgggagataaagttttgatttagtaattgggttatagaaataaaagttagttttggttgaagagttaatggtaagttgttagtagttttggttttagtagggagggaaaggattagattattatttttagggattagttatgaagaaggagagaggtggaatattggtttttattagttttataaggtttttgattagagtaggaga

SEQ ID NO: 2601 - DNA, 432 bp, Artificial Sequence
  chemically treated genomic DNA (Homo sapiens)
aaaatagttttgttttatttattttgtgtattttattttttgttttagttttgttgggtttgttttgtatgtaaggtggggttgggatttagggtttgagttttgttttttggatatttggtttattgtttgttaaaggttttgtggttggaggttttggtttttttatttttttatagggttttagggttgatttaggtttgtgggttaggaatgtgttaatggggtaatttgggttttgttggtttatgtaggtatttgtggattttgagaggggattgggtggggaggggtggggaggggtggggtggggtggtgttgtagagtgtagggtgggtggggttaggttagtagggagtgagtttgtttggttgttttgttttggagttattgtattgttggttgtagatataggttgtattatgaagttag

SEQ ID NO: 2602 - DNA, 432 bp, Artificial Sequence
  chemically treated genomic DNA (Homo sapiens)
ttggttttatggtgtagtttgtgtttgtagttagtagtgtagtggttttgaggtgaggtggttagataagtttattttttgttggtttggttttgtttgttttgtattttgtggtattgttttgttttgtttttttttgtttttttttatttagtttttttttaaagtttataggtgtttgtgtggattagtaaggtttaagttgttttgttagtatatttttggtttgtaggtttggattggttttgggattttgtgggagggtgaggaggttggagtttttagttataggatttttggtaggtgatgagttggatgtttagagggtgaagtttagattttgggttttagttttgttttgtatgtagggtgagtttggtggggttgaagtagaggatgggatgtgtagggtgaataaggtagggttgtttt

SEQ ID NO: 2603 - DNA, 359 bp, Artificial Sequence
  chemically treated genomic DNA (Homo sapiens)
tttgtttttttttgaggatgagttgggtgtattttttttttgtaggaagatgagggttagagatggaggtttatgttagggttatagagtttggaattttttttggagttaaaatagttttgttttatttattttgtgtattttattttttgttttagttttgttgggtttgttttgtatgtaaggtggggttgggatttagggtttgagttttgttttttggatatttggtttattgtttgttaaaggttttgtggttggaggttttggtttttttatttttttatagggttttagggttgatttaggtttgtgggttaggaatgtgttaatggggtaatttgggttttgttggttta

SEQ ID NO: 2604 - DNA, 359 bp, Artificial Sequence
  chemically treated genomic DNA (Homo sapiens)
tggattagtaaggtttaagttgttttgttagtatatttttggtttgtaggtttggattggttttgggattttgtgggagggtgaggaggttggagtttttagttataggatttttggtaggtgatgagttggatgtttagagggtgaagtttagattttgggttttagttttgttttgtatgtagggtgagtttggtggggttgaagtagaggatgggatgtgtagggtgaataaggtagggttgttttagttttagggaggattttagattttgtggttttgatatagatttttatttttagtttttatttttttgtaggaaggaggtgtatttaatttatttttagggggaggtagg

SEQ ID NO: 2605 - DNA, 436 bp, Artificial Sequence
  chemically treated genomic DNA (Homo sapiens)
taatttgtaaatttttttttgaaataagagagagagggtaattgaaattatttaaggtagtatttggaatatgtaggttaaagattgagttagggagggattgttattatatgggttgtggggaggtagagtttttttgtgtttttgagagtatttttttttggggttttattagtttttaatttgttttttgaatttttatttttttttttgttttgtgtttttggaaatttagatagtggttttatttttgtgatttatttagtaggaatgtgggagtttttgaattgttttagttaaagttttttaatttttttttggtgatgaatgggtgaggtttttaaatgaaatgtggaggtttttagttttagtttgtggttttttttttttttggtgtaattatttttgtgtagaatatgttaagtgttttgttttt

SEQ ID NO: 2606 - DNA, 436 bp, Artificial Sequence
  chemically treated genomic DNA (Homo sapiens)
ggaagtagggtatttgatatgttttgtatagaaataattatgttgaggagggggagggttgtgggttgggattgggagtttttatattttatttgagggttttatttatttattattgaaggggaattaaaaggttttagttggagtaatttgagaatttttatatttttgttggatgaattatgggagtggggttgttgtttgggtttttaaaggtgtagagtaaggggagaggtgggaatttgagaggtgagttgggggttggtggggttttggggaggggtgtttttggggatataggggagttttgtttttttatagtttatgtgataataatttttttttggtttagtttttggtttgtgtgttttaagtgttgttttagatagttttaattgtttttttttttttattttaggaggaggtttgtaaattg

SEQ ID NO: 2607 - DNA, 391 bp, Artificial Sequence
  chemically treated genomic DNA (Homo sapiens)
tggggttaagtttattttatggatttttttttttgtttttttaggagtagtttattgaaatgtgttttttgtttatagaagtattgtgatatatagatgttttatgatatattgtatatattaggggttttgtgttttttaggaagagggtttttatttgaagtggggtttgatggttgttatgtgttggtttatgttttttttggttttgttgatgtttagggatatggagtgttgtagtaggttggagaagatttttatttggttagagttgtagtatttggtgattttaaattgttgtattaggaattgagtgaaaagaggaagatgttgtggtggtggggttgagttgggttaattttggggttggtagagatagttgaggaggggt

SEQ ID NO: 2608 - DNA, 391 bp, Artificial Sequence
  chemically treated genomic DNA (Homo sapiens)
atttttttttagttgtttttgttggttttagggttagtttggtttagttttattattatagtgtttttttttttttgtttagtttttggtgtagtggtttgagattgttaagtattgtagttttgattaagtggagattttttttagtttgttgtagtgttttatgtttttgaatattggtagggttaaggggagtatgaattggtatgtggtggttattgggttttgttttaagtgagggttttttttttggggagtatagggtttttggtgtgtatagtgtgttatggggtgtttgtgtattatggtatttttgtagatggggaatatattttagtgagttgtttttggaagggtagggaagagagtttataaggtgaatttggtttta

SEQ ID NO: 2609 - DNA, 258 bp, Artificial Sequence
  chemically treated genomic DNA (Homo sapiens)
gagttggttggggatttttagtgtgtgttttttggtattgatttattgaagttggagttggttggggaatggtaggaggatgttgtagtgttattagtgtggaggatatgttgtaatttgttagtgttattttggttgtagttggttaggaattattttgttgttaatgtttttttttttagtagttatggagtatataatttgtatagtatttgttagtgtttttatttttttttgtaggagggagagtgtggatat

SEQ ID NO: 2610 - DNA, 258 bp, Artificial Sequence
  chemically treated genomic DNA (Homo sapiens)
atatttatatttttttttttataaggagaggtggaggtattggtaggtgttgtataagttgtgtgttttatggttgttgggaagggaggtgttaatagtaggatggtttttggttagttgtaattggggtgatattgatagattatagtgtgttttttgtattaataatattgtggtgtttttttgttattttttagttagttttaattttagtggattaatattaaaaggtgtatattgaaaatttttagttaattt

SEQ ID NO: 2611 - DNA, 486 bp, Artificial Sequence
  chemically treated genomic DNA (Homo sapiens)
taggggaagtagagaatgaagattgattagaataattttttgggaatgtgttttgggttttttagagggaagagttttttttttatttagtgttgtaggatttatagaggaaggagagttttggttattagggaggagttatatgagaggatttggtgtttttataaatgggaatgtgagtttatgaaagttggtttttgttttgggtttgattgtgatttatgaggatattgtgtagttattatttgagttttttataataaatagtgagagtgttatggatagatttatttttgaggagtttagtaaagtgggaggattgaggttatagggagaagatataggtattatttggtttggttttgatagggggtagtggatagaatagtgtggaggtagtggggtttttagaggttttggttattttgttatattatggtttgttttggtttggatattagagggtatttggggattatttttgag

SEQ ID NO: 2612 - DNA, 486 bp, Artificial Sequence
  chemically treated genomic DNA (Homo sapiens)
tttaggaatgatttttaagtgttttttagtgtttagattgagataaattatggtatgataaggtgattagagtttttagagattttattgtttttgtattgttttgtttattgttttttgttagggttaggttaggtggtgtttgtgttttttttttgtgattttagtttttttattttattgggttttttgggagtgaatttgtttgtggtgtttttattgtttattgtagaggatttaggtggtgattatataatgtttttataggttataattaaatttagagtagggattgatttttatggatttatgtttttatttgtggggatattgggtttttttatgtggtttttttttggtggttagggtttttttttttttgtggattttgtagtgttgaatagaagggaagtttttttttttaggaggtttagggtatatttttagagggttattttggttaatttttattttttattttttttg

SEQ ID NO: 2613 - DNA, 411 bp, Artificial Sequence
  chemically treated genomic DNA (Homo sapiens)
tatagaggaaggagagttttggttattagggaggagttatatgagaggatttggtgtttttataaatgggaatgtgagtttatgaaagttggtttttgttttgggtttgattgtgatttatgaggatattgtgtagttattatttgagttttttataataaatagtgagagtgttatggatagatttatttttgaggagtttagtaaagtgggaggattgaggttatagggagaagatataggtattatttggtttggttttgatagggggtagtggatagaatagtgtggaggtagtggggtttttagaggttttggttattttgttatattatggtttgttttggtttggatattagagggtatttggggattatttttgagaagattgaggttgattagagtagaatt

SEQ ID NO: 2614 - DNA, 411 bp, Artificial Sequence
  chemically treated genomic DNA (Homo sapiens)
ggttttgttttgattaattttagtttttttaggaatgatttttaagtgttttttagtgtttagattgagataaattatggtatgataaggtgattagagtttttagagattttattgtttttgtattgttttgtttattgttttttgttagggttaggttaggtggtgtttgtgttttttttttgtgattttagtttttttattttattgggttttttgggagtgaatttgtttgtggtgtttttattgtttattgtagaggatttaggtggtgattatataatgtttttataggttataattaaatttagagtagggattgatttttatggatttatgtttttatttgtggggatattgggtttttttatgtggtttttttttggtggttagggtttttttttttttgtg

SEQ ID NO: 2615 - DNA, 386 bp, Artificial Sequence
  chemically treated genomic DNA (Homo sapiens)
agggttattgtgttgtaattgttattattttttggtattttaagtgatatttgagtattatttaagggaaatggtttatattttggtaatttttttatttgttttatttttttttttgaattagggattttggtagagatagagttttagtagtttttatttgtttttttgtgttggttttgtttatttatggatgagttagttggaatgtttggatattttagtttagtggttgtggtattaggagttgttaggaggtgggaatgtagagaatgtggtttattgtgtttttgtttgtttaggttgaatttgtagagaggtttggaaggtgaatgatataatgtttgttaagggtttgggatgataggtgtatgtgaagatgagga

SEQ ID NO: 2616 - DNA, 386 bp, Artificial Sequence
  chemically treated genomic DNA (Homo sapiens)
tttttatttttatatgtatttgttgttttaaatttttgataaatattgtgttatttattttttaaatttttttgtggatttagtttgggtgggtgggagtatagtgagttatattttttgtatttttgttttttgatagtttttggtattatagttgttgagttgggatgtttaaatattttaattgatttatttgtgggtgagtaaggttgatatgaggggatgggtggaggttgttggggttttgtttttgttgaagtttttaatttagagaagaaagtggggtgggtgggggaattgttgggatatgggttattttttttgaatgatgtttgggtgttatttgaggtgttaggaagtggtggtagttgtagtatagtggtttt

SEQ ID NO: 2617 - DNA, 500 bp, Artificial Sequence
  chemically treated genomic DNA (Homo sapiens)
tatggagttagaatttaaatttaggtatgtgaggtttgagtttaggtttttattagggttattgtgttgtaattgttattattttttggtattttaagtgatatttgagtattatttaagggaaatggtttatattttggtaatttttttatttgttttatttttttttttgaattagggattttggtagagatagagttttagtagtttttatttgtttttttgtgttggttttgtttatttatggatgagttagttggaatgtttggatattttagtttagtggttgtggtattaggagttgttaggaggtgggaatgtagagaatgtggtttattgtgtttttgtttgtttaggttgaatttgtagagaggtttggaaggtgaatgatataatgtttgttaagggtttgggatgataggtgtatgtgaagatgaggataaagattgattttttttttggggttgttagtatagttttgtattttttttatatatgtt

SEQ ID NO: 2618 - DNA, 500 bp, Artificial Sequence
  chemically treated genomic DNA (Homo sapiens)
gatatgtgtgggagggatgtgaaattgtgttggtagttttaagaaaagaattagtttttgtttttatttttatatgtatttgttgttttaaatttttgataaatattgtgttatttattttttaaatttttttgtggatttagtttgggtgggtgggagtatagtgagttatattttttgtatttttgttttttgatagtttttggtattatagttgttgagttgggatgtttaaatattttaattgatttatttgtgggtgagtaaggttgatatgaggggatgggtggaggttgttggggttttgtttttgttgaagtttttaatttagagaagaaagtggggtgggtgggggaattgttgggatatgggttattttttttgaatgatgtttgggtgttatttgaggtgttaggaagtggtggtagttgtagtatagtggttttggtggaagtttgggtttagattttatatatttagatttgagttttggttttatg

SEQ ID NO: 2619 - DNA, 340 bp, Artificial Sequence
  chemically treated genomic DNA (Homo sapiens)
gggggtagattatattatttttaatttattaagggatttttttttgatagagattgagtaagatttaattgttttgagttgtgtggattttatgtttagttgtgtatttgtgtaataattagatatgttttttggttttttagatatattttggaatttgaaagggaaagtgaaagttataattttttagtagtttatgattaagtatagtaaatatgttgttttttagtattatttgtagtttaggtttagtttttttgttgttgtatttagaggagtagttgtagattagatatttgggttttttttatttaatttatttgttttatatttttaggat

SEQ ID NO: 2620 - DNA, 340 bp, Artificial Sequence
  chemically treated genomic DNA (Homo sapiens)
attttgaggatgtgaggtaggtgggttggatgagagggatttggatgtttggtttgtggttgtttttttaagtgtagtagtaaggaggttgggtttggattgtaggtggtgttggggagtagtgtgtttattgtgtttggttatgagttgttgggaagttgtgatttttatttttttttttgaattttagggtatatttgggaggttggaggatgtgtttggttattatatagatgtatagttggatgtgggatttatatagtttagaatagttggattttgtttagtttttgttagaggaagattttttggtaagttggggatagtgtgatttattttt

SEQ ID NO: 2621 - DNA, 495 bp, Artificial Sequence
  chemically treated genomic DNA (Homo sapiens)
agagggggtagagatttatttgaggttattgagttgttttgaatttttttttgtattattgggtttaaagatttatttttttatgttgtttggaattgttggtttagtttggaggtgtagtgtagggataggttgtttttgtttggtaggagtttttttttatggtttgtaggtttggtagttgggatagggttgaatgggaggtattgttggtagattaggtaagttaggtttttttaggttgaggtgaagaaggggtgggtggtgggtgggagtagtggttggagttatagggttttttgtttgttttagttgaggattgaggttttggtttgaatttttgggttagtttgatagggagggggtattagtagttggtttgggagttagtagttttgggtttttttttgttatgtgggttgtttttttagaggttgttttttagtttttgaaaaatatattttattaataagtagttttgaggttatagtgggg

SEQ ID NO: 2622 - DNA, 495 bp, Artificial Sequence
  chemically treated genomic DNA (Homo sapiens)
ttttattgtgattttagagttatttattaatgggatgtgttttttagagattaggaagtagtttttgggagggtagtttatatggtaggagggagtttaggattgttgatttttgggttagttgttggtgttttttttttgttgggttggtttaaggatttaggttggggttttagtttttggttggggtaggtaggaggttttgtaattttagttgttgtttttgtttgttgtttgttttttttttattttagtttggggaagtttggtttgtttggtttgttgataatgttttttatttagttttgttttagttgttaggtttgtgggttgtggaggggggtttttgttaggtggggatagtttgtttttgtgttgtgtttttaggttggattagtagttttaggtggtatggaggggtgagtttttgggtttgatggtgtaaggggggatttagagtagtttagtggttttaggtaagtttttgtttttttt

SEQ ID NO: 2623 - DNA, 492 bp, Artificial Sequence
  chemically treated genomic DNA (Homo sapiens)
tgttttagagtttattttgggagattttttttttggagaattttaggaagtttttagagtttttgtttgttagtttttgagaggtttagagggggtagagatttatttgaggttattgagttgttttgaatttttttttgtattattgggtttaaagatttatttttttatgttgtttggaattgttggtttagtttggaggtgtagtgtagggataggttgtttttgtttggtaggagtttttttttatggtttgtaggtttggtagttgggatagggttgaatgggaggtattgttggtagattaggtaagttaggtttttttaggttgaggtgaagaaggggtgggtggtgggtgggagtagtggttggagttatagggttttttgtttgttttagttgaggattgaggttttggtttgaatttttgggttagtttgatagggagggggtattagtagttggtttgggagttagtagttttgggttttt

SEQ ID NO: 2624 - DNA, 492 bp, Artificial Sequence
  chemically treated genomic DNA (Homo sapiens)
gggagtttaggattgttgatttttgggttagttgttggtgttttttttttgttgggttggtttaaggatttaggttggggttttagtttttggttggggtaggtaggaggttttgtaattttagttgttgtttttgtttgttgtttgttttttttttattttagtttggggaagtttggtttgtttggtttgttgataatgttttttatttagttttgttttagttgttaggtttgtgggttgtggaggggggtttttgttaggtggggatagtttgtttttgtgttgtgtttttaggttggattagtagttttaggtggtatggaggggtgagtttttgggtttgatggtgtaaggggggatttagagtagtttagtggttttaggtaagtttttgttttttttgggttttttagaggttggtgggtaggggttttggggattttttggggttttttaggaagggggttttttaaggtgggttttgagata

SEQ ID NO: 2625 - DNA, 354 bp, Artificial Sequence
  chemically treated genomic DNA (Homo sapiens)
taggtttagagagtttggaggaggagtttttgttagattggagagaagtaggtttgagtttttttaaaggtagtttttggggatttttaggattataggttgagatgagatgtagggtggttggaggaagtgagaggtgaatttagtttgggattggttgggtgagattttttatttgttttttgggattattgtttattatggttgtggtttagtagttgtgggttgagaggtgagtgttggggtgtggttgtttttgggtttttttattgttttttataggttttagggataaaggttagtttttttgtagtttttgattaatatgagaggttggggttgagttagaattta

SEQ ID NO: 2626 - DNA, 354 bp, Artificial Sequence
  chemically treated genomic DNA (Homo sapiens)
tgggttttgatttaattttagttttttatgttgattagggattgtagaaggattggtttttgtttttaaggtttatgaggagtagtgagaaggtttgggggtggttatattttggtatttattttttggtttgtagttgttgggttatagttatggtgggtgatggttttagggagtaggtggagagttttgtttagttagttttaggttgagtttattttttattttttttagttattttgtgttttgttttagtttgtggttttgggagtttttaggagttgtttttggggaggtttaggtttgtttttttttagtttggtagaggttttttttttaggttttttgggttta

SEQ ID NO: 2627 - DNA, 282 bp, Artificial Sequence
  chemically treated genomic DNA (Homo sapiens)
ggagtttttgttagattggagagaagtaggtttgagtttttttaaaggtagtttttggggatttttaggattataggttgagatgagatgtagggtggttggaggaagtgagaggtgaatttagtttgggattggttgggtgagattttttatttgttttttgggattattgtttattatggttgtggtttagtagttgtgggttgagaggtgagtgttggggtgtggttgtttttgggtttttttattgttttttataggttttagggataaaggttagtt

SEQ ID NO: 2628 - DNA, 282 bp, Artificial Sequence
  chemically treated genomic DNA (Homo sapiens)
gattggtttttgtttttaaggtttatgaggagtagtgagaaggtttgggggtggttatattttggtatttattttttggtttgtagttgttgggttatagttatggtgggtgatggttttagggagtaggtggagagttttgtttagttagttttaggttgagtttattttttattttttttagttattttgtgttttgttttagtttgtggttttgggagtttttaggagttgtttttggggaggtttaggtttgtttttttttagtttggtagaggtttt

SEQ ID NO: 2629 - DNA, 398 bp, Artificial Sequence
  chemically treated genomic DNA (Homo sapiens)
agtaagtagggaggggttgagggttggagagtaggtgtggggggtgggggtggggtgtaggttaagggaggaggtttggagagggagtaggaggggtgtagattttgttattggggagattttagttatttatgtttgttggttttggtttttgtagggagttggagagaagaatgtgtttagtgtttaggggagttgaggttgttagttagtagttagagtagtttgtgaggttattgtggtataggttttttggggtagtagttgtgttttaaggtaaggttgggtgtggggttggttagtttgggagtttatagtttagttttgtagttgggtatattggttgtagtatggattattggggaggttgggtgggggttattagttttgggattggt

SEQ ID NO: 2630 - DNA, 398 bp, Artificial Sequence
  chemically treated genomic DNA (Homo sapiens)
attaattttaggattaatgatttttatttggtttttttagtggtttgtgttgtggttggtgtgtttgattgtagggttggattgtggatttttgggttggttagttttatatttagttttgttttgggatatagttgttgttttgggggatttgtgttgtagtggttttatgagttgttttggttattggttggtagttttggtttttttgagtattgagtatatttttttttttaattttttgtaggagttaaggttagtgggtgtgggtggttgaaatttttttggtaatagggtttgtgttttttttgttttttttttgggtttttttttttaatttgtattttgtttttattttttatatttgttttttggtttttagtttttttttgtttatt

SEQ ID NO: 2631 - DNA, 479 bp, Artificial Sequence
  chemically treated genomic DNA (Homo sapiens)
tgttatagatggtgatatggagtttgtgaaggagggagtaagtagggaggggttgagggttggagagtaggtgtggggggtgggggtggggtgtaggttaagggaggaggtttggagagggagtaggaggggtgtagattttgttattggggagattttagttatttatgtttgttggttttggtttttgtagggagttggagagaagaatgtgtttagtgtttaggggagttgaggttgttagttagtagttagagtagtttgtgaggttattgtggtataggttttttggggtagtagttgtgttttaaggtaaggttgggtgtggggttggttagtttgggagtttatagtttagttttgtagttgggtatattggttgtagtatggattattggggaggttgggtgggggttattagttttgggattggttatatttggagagttttaggtagggtgaggagtggaaggatagaa

SEQ ID NO: 2632 - DNA, 479 bp, Artificial Sequence
  chemically treated genomic DNA (Homo sapiens)
ttttgtttttttattttttattttgtttggggttttttagatgtaattaattttaggattaatgatttttatttggtttttttagtggtttgtgttgtggttggtgtgtttgattgtagggttggattgtggatttttgggttggttagttttatatttagttttgttttgggatatagttgttgttttgggggatttgtgttgtagtggttttatgagttgttttggttattggttggtagttttggtttttttgagtattgagtatatttttttttttaattttttgtaggagttaaggttagtgggtgtgggtggttgaaatttttttggtaatagggtttgtgttttttttgttttttttttgggtttttttttttaatttgtattttgtttttattttttatatttgttttttggtttttagtttttttttgtttatttttttttttatgggttttatgttattatttgtggta

SEQ ID NO: 2633 - DNA, 500 bp, Artificial Sequence
  chemically treated genomic DNA (Homo sapiens)
atttgtttttggtatttttgggtaataaagtagagtttagggttttttttttttttgttgtttttattgagtttagatggtatatttttattgtggttttaagagggggtgttatgtgagtttggattttagattttgggggttgggttttttagtgagtttttggtgggggaatagagtgggtagtggtttgtgagggttttgtagaatgggggtttattttttatgtggttagttttggaagatagggttaaatatttggtgggttggtgggtggttggttggtggaggaagtaggaagttggaatgaatttgattataaatagtttatattatgtggtttttgtaggtggaggtgtttatggaaagggttttgggtggttgtggggtgggagggtataggtttttgttttttatagttgtgatggtgttatttaagtataggttgtttttatttgtttttgtagtaatggttttgtttttttattttttttgtttat

SEQ ID NO: 2634 - DNA, 500 bp, Artificial Sequence
  chemically treated genomic DNA (Homo sapiens)
atagataaagaggatggggggataaagttattattgtaggagtaggtaggggtagtttgtatttagatgatattattatagttgtggggagtaggggtttgtgtttttttattttatagttatttggggttttttttgtgggtgtttttatttgtaggggttgtgtggtatggattgtttgtggttaaatttattttaattttttgttttttttgttagttagttgtttgttagtttattgggtgtttggttttgttttttagagttggttatgtggaaaataaatttttattttatagggtttttataagttattgtttattttatttttttattggagatttgttgagaggtttagtttttaggatttaggatttgagtttatgtagtatttttttttaagattatggtggaaatgtattatttgggtttaatgaggatggtgagagagaaaagggttttgggttttgttttgttgtttaggaatgttagggataggt

SEQ ID NO: 2635 - DNA, 467 bp, Artificial Sequence
  chemically treated genomic DNA (Homo sapiens)
tatagtgtagtgtttggtttttttatggtgtgtgataatgtggttatttttattggttggtgttgtgtggagttgggtgtgttggaggtgtttatgtttgagattgaggatttggtgttgtgtaagaatgagaagagtgtggtgttgtgtttgttggaggtggtgtggtgtggggtatgtttgggtttgttggttttatgttttgtgtagtttgagtaggagattgagtgggagttgtgtgttgtatttttagtttttaatgtttttgttgttggggaggatattattgaaattgtttttgtattagggatttttgtttgtggtttttgtatgatatttagtgatttgtgtaattttgatgagttggtgagttttttagtattaggtgttagggatttgatagtatagttagtgtttgtaatttgtttttgaattttttagggtttattttgttatttgtagaatag

SEQ ID NO: 2636 - DNA, 467 bp, Artificial Sequence
  chemically treated genomic DNA (Homo sapiens)
ttgttttgtagatagtagggtggattttgggaggtttagggatagattgtaggtattggttgtgttgttgggtttttggtatttggtgttgggggatttattagtttgttgaggttgtgtaggttgttgggtgttatgtgggggttgtgggtaggagtttttggtgtgggggtggttttagtggtgttttttttagtggtaggggtgttgggggttgggggtgtagtatgtagtttttgtttaattttttgtttaaattgtatgaggtgtggggttagtaggtttaggtgtgttttatgttgtgttatttttagtaggtatagtattatgttttttttgtttttgtgtagtattaggtttttagttttaaatatgagtatttttggtatatttagttttatgtggtattagttgatgaaggtggttatgttgttgtgtgttatgaaggagttaggtattatattgtg

SEQ ID NO: 2637 - DNA, 385 bp, Artificial Sequence
  chemically treated genomic DNA (Homo sapiens)
gattgggtttggtgattttgttgttgtaggttttttgtagtataggttttgagagtaatggtgtggttgtttgattgttatggaataaatatatattaggtgagtattagtttgaggttgaggggtatatggagttggtttgagtttagttaggagtttggaagtaagtttagttttttttggttgtgtttttgagggtttgattgtgaaatgtttgtatgtatgggttggagttgtttgttatgtgtggtaattgtggtaggaatttgatttatgtatggatgttagtatttataagtgagaggtgttttagatatgtggtgttggttttggaagtagttggtgggtggtgaggaaatgttatagttttggaaagatagaggtt

SEQ ID NO: 2638 - DNA, 385 bp, Artificial Sequence
  chemically treated genomic DNA (Homo sapiens)
ggtttttgtttttttagagttgtgatatttttttattatttattagttgtttttaaagttgatattatgtgtttgaggtgttttttatttgtgggtgttggtgtttgtgtgtgagttaggtttttgttgtagttgttatgtgtggtaaataattttaatttgtgtgtatgagtgttttgtggttaggtttttgagggtatggttgggaggagttgggtttgtttttagatttttggttgggtttaggttagttttatgtgttttttggttttaggttagtgtttgtttggtgtgtgtttgttttgtgatagttaggtaattgtattgttgtttttagagtttgtgttgtaaaaggtttgtggtgatagggttattaggtttagtt

SEQ ID NO: 2639 - DNA, 500 bp, Artificial Sequence
  chemically treated genomic DNA (Homo sapiens)
taattttttggttttttttaagtgttttttttgtatttttttgattatagtagttggtggtatagtgtgtgtatttgtgggtaggagttagtgaaggtttttttttttttttttaaagttttaggttttatggtttgttatttgtaaaattttaattatgagggggtgtttttttgtttgttgttttgtagggagatttggtttaggttgttggagttttgagttttagggtttttgtgatggaagggtgggtgtggtttttatatttggttttttagttttatttaaggaggattgttagatagttttgttttgaggtgtaggaggttgggttgttttggttattttgaatttatttgaagttagagggtttgagtttggggggtggttgggtgtttatttttagagtttgtttagtgttttgttgagtttagtgttgtgtaggtgtgggtattggtttgtgagttttttgtgtgttgtttgagtttatattatgaagg

SEQ ID NO: 2640 - DNA, 500 bp, Artificial Sequence
  chemically treated genomic DNA (Homo sapiens)
tttttatggtgtgggtttaggtagtgtgtaggaagtttgtggattagtatttgtatttgtataatgttgagtttagtaagatgttgggtaagttttggaggtgagtatttgattgttttttgggtttgggttttttagttttgggtggatttagggtagttgaggtggtttggttttttgtattttagagtgggattgtttggtagttttttttggatagggttggaagattaggtgtgggggttgtgtttgtttttttattataaggattttggaatttggaattttagtggtttaggttgggtttttttatggggtggtgggtaggaaggtgtttttttgtggttggaattttgtgggtggtagattgtggggtttggggttttggagggagggaaggaggtttttattaatttttgtttatagatatgtatattatgttattagttgttgtggttaggaggatatgagggaaatgtttggaaagaattaaagggttg

SEQ ID NO: 2641 - DNA, 402 bp, Artificial Sequence
  chemically treated genomic DNA (Homo sapiens)
ggaggaggaagatgaatagtgtttttgttaattttggtttttttggtttatgggatgggagatgttattattttatgtatttattttagttagttttatataggttgattggggaggttttttttgagtttaatttgataagttttgaggagtgagttgtatttattttgttttgtttgggatagggtggggggtttttgggtagggggttgggggttgtaggagtatggtgggtggttgttttgtatttgtttgaggaaggattattttttttgttaagtttttgtttggttgtgtttgtttttagtttttgtgtttttttttaatttgttattttgtaagggttggtttaagggtttttttttatagggtttgtattttttgtttaggttggtatgttga

SEQ ID NO: 2642 - DNA, 402 bp, Artificial Sequence
  chemically treated genomic DNA (Homo sapiens)
ttagtatgttagtttaggtagggggtatgggttttgtgagaaagagtttttgagttaatttttgtggggtgatgggttagaaaaaggtatagaagttgagggtgggtatagttaagtaaaggtttggtggaggaagtggtttttttttaggtaggtgtagagtggttgtttattgtgtttttgtagtttttagttttttatttagggattttttattttattttagataggataaagtaggtatagtttattttttagagtttgttaggttgagtttaagggaaatttttttggttggtttgtgtggggttggttgaggtggatatgtggaatggtgatattttttattttataaattggaagggttagggttgatagaggtattgtttatttttttttttt

SEQ ID NO: 2643 - DNA, 439 bp, Artificial Sequence
  chemically treated genomic DNA (Homo sapiens)
ttattatattgtaaaagttgtttttttttttgtttttttgatttatttttttagggtttattgttagttgtaggttatggttgtgaagtatagttgagtttttttttttattgagttgtgttaggtgtatggtgattatgtagtttttatttttgagttgtagtagttttaggttgtttgttttttagtttttttgtagttgttgatagtgtttttgagtttgttgttggttttgtagttgttgttttagttttgtttgtttttttttgagtatttggttttgggtttgtagttgttgtttttgttgtagttggtttttgtgagttttttgtagttgttgtatttttgttattaagaattgggttaggtttttaggtttttttttatttgttaggatagaataggggatagaataggtagtttaggtaagtaaaattta

SEQ ID NO: 2644 - DNA, 439 bp, Artificial Sequence
  chemically treated genomic DNA (Homo sapiens)
tggattttatttgtttgagttgtttattttgttttttgttttgttttggtagatgaggaggggtttgagggtttgatttaatttttgatgatagaggtgtgatggttgtgggaagtttgtaagagttagttgtagtgggagtagtaattgtaggtttggggttgggtgtttgaggaggagtgggtagggttggagtagtggttgtgggattagtagtaggtttaggagtgttgttaatggttgtgggaggattgggaggtgggtagtttggagttgttgtggtttaaggatgagaattatatgattgttatgtgtttggtatagtttagtgaggagaagaatttggttgtattttgtagttgtgatttgtagttggtggtaggttttggggagatgggttggggaggtaagggaaggggtagtttttgtaatgtagtag

SEQ ID NO: 2645 - DNA, 451 bp, Artificial Sequence
  chemically treated genomic DNA (Homo sapiens)
ttttgatagtgtttgatttttagtgttttttgtgtttgggtgaagggtttgtgtttttgagttgagttgttggtaggtattttggaggtagagtaggttaattttggtatgaatttggtggttttggtatttgtaatttgttttgatattttttttgtgagttaggtggtgagttattttataatgtaattttaaattgaggttttttgtttttttttaggatttttttttttatagtattattatatgtatatagttgtaaaaaggttaagaggaaatatttttgatgggtttaggattttaaaaagtttttaagggttttttgtattagtaaggtttagtgttgttgttttataggtaaagtatggtatagtggggagtgagattgagaatgaagtggtgttttagtttaggttgtggggatttgtttttgtttagtttggttgttttt

SEQ ID NO: 2646 - DNA, 451 bp, Artificial Sequence
  chemically treated genomic DNA (Homo sapiens)
agggatagttaagttgagtaaggataggtttttgtagtttagattggggtattgttttgtttttggttttattttttgttgtgttgtgttttgtttgtgagatggtggtgttgggttttgttggtatgaggggtttttgggggttttttggagttttgggtttgttggggatgtttttttttgatttttttgtggttgtgtgtatgtagtgatgttgtgagggaggagattttaggggagggtagaaagttttagtttaagattgtattgtggggtgatttattatttggtttatggaggggatgttaggataggttgtgaatgttaggattgttaagtttatgttagagttggtttgttttatttttagagtgtttgttagtaatttagtttagagatataggttttttatttaggtatgaaaagtattggaggttagatattattaggg

SEQ ID NO: 2647 - DNA, 384 bp, Artificial Sequence
  chemically treated genomic DNA (Homo sapiens)
tttgtttttttttttggttatatttttttttatttggttgaaatggtaggtattttagaatttttggggtaggattattattttttgtttttatattgtataggattttttgggagttttgttataggtttttattggatgaatttttggaaggtttttattatttgtttggtggttttggggatgtgtatggtgttaaatggggttgttatagtatatgttttgtttttgtatttgttgagttgatagtttatggtgttattttttttatttattttgatgttaattagaaatttatatttattatgatatttagtttgtagggagagagagttgtattttattttggttgtttagtgtttgggtttggaaattttgattttt

SEQ ID NO: 2648 - DNA, 384 bp, Artificial Sequence
  chemically treated genomic DNA (Homo sapiens)
ggaaattagggtttttaggtttaagtgttgggtagttagggtaaggtgtagttttttttttttgtagattgagtattgtaataagtgtgagtttttggttggtgttggggtggatggggaggataatattgtgggttgttggtttggtaagtataagggtgggatgtgtgttgtggtagttttgtttgatattgtgtatatttttgaagttattaagtaggtggtgaaggttttttaggagtttatttggtgaggatttgtgatggggtttttgggaagttttatgtggtgtgggagtagagggtggtgattttgttttgggaattttggagtgtttgttattttagttagatgaaggaaggtgtggttagaggagagagtagg

SEQ ID NO: 2649 - DNA, 499 bp, Artificial Sequence
  chemically treated genomic DNA (Homo sapiens)
tttttagtttggaggaggtagaggggtttgtttagtttttattttttaaagtgtattttttagtggttagtagtagaggggaataggtttggggatttgggagttgttattttgtgatggttttttttatttatagagtatttgttgtattttttattggtaaggggtgtttttgaggttattggggtagttgttttttggttatgagttttttgttttttttggagggtttggttttgtgtatttttttttttagggtttggtgggggttgtgtttttggttttggtttgggttttttttttatttgttgaagatttgttttattgagtgtatgaagtgatggtagttatgtaggaatttgtagttttttagtttgtgttgaaaagtatttgaggtaggggtgggggtgggtggttgagaggttttttggttagtttttgtgggtttagttgtgtttgagttgtttagtagttgggttatgtagtagatgttgttttt

SEQ ID NO: 2650 - DNA, 499 bp, Artificial Sequence
  chemically treated genomic DNA (Homo sapiens)
aggaataatatttattgtatggtttagttgttggataatttagatatggttgagtttatgaaggttggttggggggttttttagttgtttatttttatttttgttttggatgttttttagtgtaagttggagggttgtaggtttttgtatggttattattgttttatgtatttagtggggtgggtttttagtaagtggggggagagtttgaattggagttggagatatagtttttattaggttttgaggaagggggtgtgtaggattagattttttaggaaaggtaagagatttatgattaggggatagttgttttggtagttttgagagtattttttgttggtgaaggatgtggtaggtgttttgtggatgagaggaattattgtaggatgatagtttttgggtttttaaatttgtttttttttgttattagttattgagaagtgtattttaagaggtgggagttgggtagatttttttattttttttaggttgggag

SEQ ID NO: 2651 - DNA, 455 bp, Artificial Sequence
  chemically treated genomic DNA (Homo sapiens)
tgtaagggagtggtgatttttttaagttgggagtttttttattagggggttttttaagggtatttttgtttttagtgggggagttgttattttattttgttttgtttagtttgagatatgtaattttttttagtttttattttttgttgaatttttaaggtggggttggggggatgtttaggtttaggaaggaggttgggggtttggttgttggatgttgtttattggtagtttggattagagtaggagttttattattatttgtggggataggtgggatatatgtatttttggggttattttagattttttggaggatgttgattgatattgtttagtttgagaattattgtgtttttggagtagaggtttttttattgtttttgggtagtgggtgttgggtatagggtttttttggatgagtggggtgggtatgagagtatatggaattgggg

SEQ ID NO: 2652 - DNA, 455 bp, Artificial Sequence
  chemically treated genomic DNA (Homo sapiens)
ttttagttttatgtgtttttatgtttgttttgtttatttggagaagttttgtgtttgatgtttgttatttaagggtaatggggaggtttttgttttggggatatagtagtttttaaattggatagtgttaattagtattttttaggaggtttaggatggttttggaaatgtatgtgttttatttgtttttgtaggtggtgatgaaatttttgttttggtttgggttattggtgaatagtgtttagtggttgggtttttaattttttttttgagtttgaatatttttttaattttgttttgagaatttagtgaagagtaaaagttggagaaaattgtgtgttttaggttaagtagagtaaagtggggtgatggtttttttgttaggaatagagatgtttttagggaattttttgatggaagagtttttggtttaagaaggttattatttttttata

SEQ ID NO: 2653 - DNA, 471 bp, Artificial Sequence
  chemically treated genomic DNA (Homo sapiens)
tttttatttgtttattttggataataattagtatagtgtagtgtggttttgtagtgatattatttgtagagaggttaggtttagttttttttgttttttaaaaggttagtaggttttaggagttgggggtggggtttggttgtggggtttttatgttttaggggttagggtagattttttttagttggtaattattgtagattttttttttggttagtatttggggatttttttgtttttgttttgtttttttattttgtttgttgagatatagggttttatgggttttttttttggggttgggttgattgtggtttgtgaggggtagttattgtgttgggtttttttgttagaggtagaaattataaaattatttggaatatatatgttttaagtgatagatttaatttaattttataaatattgattttgtgtttaatttatttgttttttagtgttagtttatttttg

SEQ ID NO: 2654 - DNA, 471 bp, Artificial Sequence
  chemically treated genomic DNA (Homo sapiens)
taggaatgagttggtattggaggatgagtggattagatgtgaggttaatatttgtggaattgaattgaatttgttatttggggtgtgtatgttttaggtaattttgtggtttttgtttttggtaggaaaatttaatatgatgattgttttttgtaggttatagttagtttggttttaggagagagatttgtggagttttatgttttagtaggtaaggtagggggatggggtaggggtagggaggtttttgagtgttggttaggggaggaatttgtagtggttgttggttaaggagggtttgttttggtttttggggtatggaggttttatagttaggttttatttttagtttttgggatttgttggttttttaggagatgggggaggttgggtttgatttttttgtaggtggtgttattgtagggttatattgtattgtgttggttgttgtttagggtgggtagatagagg

SEQ ID NO: 2655 - DNA, 371 bp, Artificial Sequence
  chemically treated genomic DNA (Homo sapiens)
aagtttaaatttttttgattttatgtttgttattatagttggagggaaattgattttagaatttatttgatatgttggatttttttgtggtatttattttattgtttagtagttagttatgatgttataagtttattagatttttggtagggggaaaatgttggggaattggaaagaatggatgttttttatttgttaggaaggtaggggaaggagttgggtatgtttgggaggagaagttgtgtggttggtgggggataggagtaggtttaatgtttgtgatattaaatgttaggtagaaatttgaaaattttagttatttagatgtttttttaatatttagatgtttggtattgagtagattatgtttt

SEQ ID NO: 2656 - DNA, 371 bp, Artificial Sequence
  chemically treated genomic DNA (Homo sapiens)
ggagtatggtttgtttagtgttagatatttggatattgagaaaatatttgggtagttggggtttttaggtttttgtttgatatttaatattataaatattgagtttgtttttgttttttattagttatgtggtttttttttttaaatatatttagtttttttttttgtttttttgatgggtaagaaatatttattttttttaattttttagtgttttttttttattggaaatttgatgggtttatgatattatggttggttgttgagtgatgaagtggatgttataaagaaatttgatatattagatagattttgaaattggtttttttttagttgtagtaataggtgtgaagttaggagaatttgagttt

SEQ ID NO: 2657 - DNA, 467 bp, Artificial Sequence
  chemically treated genomic DNA (Homo sapiens)
ttgtttttttgttttatatataatgtttttttagaaggaagggaagagttaggaggggaggggtaggggtttataggttgtattaaatggtggttttttattgtaaaatttagtttaatttgaattttagtattagagggtttatggggtggagttttgggatttttagttttgtttttttttaggttaggtgttatggtgtagatttgtatggtttttttttgttttttgttgtaagtttttgttgtttattgtttttgtgtaaggtgttttagtttgtaatttagtagtgtaggttgggtttgaagaagtgggagtgtgtgggtaggtagatggggtgtatggtggttgagtgtattattgggtggttgagttgtagtagtgttatgttgtagttatggttgttttttttgtggtatgggtgtaggagtaggtggtttattttgaaggatatttttttaggttag

SEQ ID NO: 2658 - DNA, 467 bp, Artificial Sequence
  chemically treated genomic DNA (Homo sapiens)
ttggtttggagaggtgttttttaaggtgagttgtttgtttttgtatttgtattatgaagaggatagttatgattatgatgtggtgttgttgtagtttgattatttggtggtgtgtttggttgttgtgtgttttgtttgtttgtttgtgtgtttttatttttttgagtttggtttgtattgttggattatgggttggggtgttttgtgtgagggtggtgagtagtggggatttgtggtgggaggtggagggagattgtgtggatttgtgttgtaatatttggtttggagaagggtggggttgggggttttggggttttattttataggttttttagtgttgggatttaaattgggttgaattttatggtagaaaattattatttaatgtggtttgtaggtttttgtttttttttttttagttttttttttttttttggaagggtgttatgtgtggggtaaaggggtag

SEQ ID NO: 2659 - DNA, 340 bp, Artificial Sequence
  chemically treated genomic DNA (Homo sapiens)
ttaattgtattgtaatgagaggatttaatttttatttttgattgttgggatttttgtagtttttagagttggtaggggttgggagtgttgtttaggtaggtttttggagaagggagtggtaagaggatttggagttattgtgtttggagattggaagaaatttggatgaagttgagaaggtattatttgtttgtattgtagaagtaataagaaaattttagaaattggtaattggtggatgtgtatttttttttatttgtattgattggtattttgagtttttgaaaggagtggttggaagaagagaatgtagaattttggatatggtttttattttgga

SEQ ID NO: 2660 - DNA, 340 bp, Artificial Sequence
  chemically treated genomic DNA (Homo sapiens)
tttaggatgagagttatgtttaagattttgtattttttttttttaattattttttttaagaatttaaaatgttagttagtgtaggtaaaggaagatgtatatttgttggttgttaatttttgaaatttttttgttatttttatgatatagataagtgatgtttttttaattttgtttaggttttttttaatttttgaatatggtgattttgaatttttttgttatttttttttttagggatttatttaggtagtatttttagtttttgttagttttggaagttgtagagattttgatagttggggatggggattgaatttttttattgtagtgtaattaa

SEQ ID NO: 2661 - DNA, 468 bp, Artificial Sequence
  chemically treated genomic DNA (Homo sapiens)
ttattttgggtaagttgggtttgtagtgtgggtgtggtgaggatgtgtagtttatgtagttgtttttaagagtaagagaaagtgttggggtttttattgtagttgttggtgggaggtatattggggtagttggggtgtgttattagtttggttgttagggtgtggtttgttagggtattttttaggatttgtgttagggttttggatatgtggtgagtggatatgtgttggttgtaagtgtttaggtttatgaaggtgtttgtttatttgtggggggtgggatattagaggtgggattaggttgggttatggttaagggttaggtaggttagggaagggatggtggggtgggagggggtaattggggtggtggtagtggttgatgttagatttgtttttgggttgagaaatggatatagttagttaggtgaatagttagtgtggagggatagaggtagttatggtagg

SEQ ID NO: 2662 - DNA, 468 bp, Artificial Sequence
  chemically treated genomic DNA (Homo sapiens)
tttattatagttgtttttgtttttttgtattggttgtttatttggttagttgtgtttgttttttaatttggaagtgagtttggtgttgattgttgttgttattttagttatttttttttattttgttgttttttttttagtttatttagtttttggttatggtttggtttggttttatttttgatgttttgttttttataggtggatagatgtttttgtgggtttgagtatttgtggttggtatatgtttgtttattgtgtgtttggggttttggtgtgggttttggaaggtattttagtgggttatattttgatagttgagttgatggtgtattttggttattttagtgtgttttttattggtggttgtggtgaaggttttgatgtttttttttgtttttgggagtggttgtatgagttgtgtgtttttattgtgtttatgttgtgggtttagtttgtttaggatgg

SEQ ID NO: 2663 - DNA, 494 bp, Artificial Sequence
  chemically treated genomic DNA (Homo sapiens)
tggttatgtgtttaagaatgttgtgattaaagtgaggagaaaggtagtttttgtgttatagtttttattttagatatatgagtttgtggagttgtgggaaagaaggaggaggtgttggatgaagttggaaatggtaaggggaggttggggaaatatttagttgttagtggtttttttggggtatgttgggattagttaagagaatgtaatagttaggggtgggagttttttttgtggttgtatatgttaggtttttttagttttgtaggtttaaatgaaggtttatgtgaagggggaattgttttggatagtttagtgttttttagagttatattattattattttttattatgtggaggtggttgaaaaaaaggagttatagatgggtaaggtttgaggggtgttgggttgatgaggtaaaaaaaaaagtaggtgttgtggtgttgatgggaggtttttttttttttataggatgttaggaaggaaatggggt

SEQ ID NO: 2664 - DNA, 494 bp, Artificial Sequence
  chemically treated genomic DNA (Homo sapiens)
gttttattttttttttggtgttttgtgagggagggagaattttttattagtattatagtatttatttttttttttgttttgttagtttgatgttttttaaattttatttatttgtgattttttttttttaattatttttgtgtggtggaaaatggtggtgatgtgattttgaggggtattgagttgtttagagtgattttttttttatataagtttttatttgaatttgtaagattggagggatttggtgtgtgtaattgtggagggggtttttatttttggttgttgtatttttttggttgattttagtgtgttttggggaggttgttgatagttggatgtttttttagtttttttttattatttttagttttgtttagtatttttttttttttttttatagttttatgggtttgtgtatttggggtggaggttgtggtatagaaattgtttttttttttattttagttatagtatttttgaatatatggtta

SEQ ID NO: 2665 - DNA, 377 bp, Artificial Sequence
  chemically treated genomic DNA (Homo sapiens)
gggtaatgaggggaagttagggttttgggggaaattttttatttggggtgagggatgtggaggtagatattgggtattggggtagggttagggggtggaggtgttttggggaggagagggtaggattgggtttgtattgggatgtattgttttagttggttttttgggaagattttgtatagttggggttttagtgattgttttgtaagtatggtgaatattatgttttttagtattagggagtttatgttttgaaaaaggatggatagtaaaggggttaaggtaaagtggtatagggatatatatgagggtttgttttttttttattagagttgtgatttttgatttaattgtttggaggttttggagtataggtt

SEQ ID NO: 2666 - DNA, 377 bp, Artificial Sequence
  chemically treated genomic DNA (Homo sapiens)
agtttgtgttttagagtttttaggtaattggattagaagttgtagttttggtgggaggaaggtgagtttttatgtgtgtttttgtgttattttgttttggtttttttgttgtttatttttttttagggtgtggattttttggtgttagaaagtgtgatgtttgttatatttgtggagtggttgttggggttttagttgtatggagtttttttagagggttggttggaatagtatattttagtatgggtttagttttatttttttttttttaaggtatttttattttttaattttattttagtgtttaatgtttgtttttatattttttattttaagtagggaattttttttaaaattttgatttttttttattgttt

SEQ ID NO: 2667 - DNA, 498 bp, Artificial Sequence
  chemically treated genomic DNA (Homo sapiens)
taagattttgttttatgttatttttttttgagaattggttttttttagttttaatttggtgtttagttttttttggaataatgttttggttatgttttaggttagttttgagttaggaggttttgatttgttgtgtattttattttatttttatttgtttttgttgtagttgttgttgtttagtaaggtggttgaggagttttattgggtggatttggtgttgtttgaggatattattgagtattttgtgtgtattaaggttggtggtgtttgttttaaatttggtattaagatgttggagaggttgtttttgggatggttggaggagaagtttgagggggttaatggttttttggtttggtggttattttggtattttttgagtgtttgggagtgtatggggggttgaggtgtttggtgtaagtgggtggagtgtgtgtgtttgtttggttggtatggatttagttgtggtgtgtttattgtggtgtagtattttaa

SEQ ID NO: 2668 - DNA, 498 bp, Artificial Sequence
  chemically treated genomic DNA (Homo sapiens)
ttggagtattgtattatagtgggtatgttgtagttgggtttgtgttagttgggtaggtatatgtattttatttatttgtgttgggtgttttggttttttgtgtgtttttgggtgtttaggaggtattggggtggttgttgggttgaggagttgttggtttttttaggttttttttttggttgttttgggggtggtttttttagtattttggtgttgggtttgaagtagatgttgttggttttggtgtgtatgaaatatttggtggtgtttttgggtagtattaagtttatttggtggagttttttggttgttttgttgggtggtagtggttgtagtaggggtgagtgggagtagagtggggtatgtagtaggttagggttttttggtttggggttggtttggggtgtgattggggtattgttttagaaaaagttggatattaggttagggttgagggaggttagtttttgggggaaggtgatataggatagggttttg

SEQ ID NO: 2669 - DNA, 484 bp, Artificial Sequence
  chemically treated genomic DNA (Homo sapiens)
atagagaatttagtgtgaagaaaagataaggataaatttggattatgtgtatagattttaggttttgttttagaggagttttgtgggagtttaggattggttttttttttatggatggttagtttttttttgattgtttttaagtttggttgtgttaagtattttgtgttgatataaagtattggtatttgatattttaatagtaataaatttgttagtgttttatatattgttagtttttagagtttattatttgtgtttttagaatagatgttaaggttatgtttttagttggattgttgtagttttgttgttgtgatgaggtaggtgtggaggttttagtagtttttttggtgttggtgtggaggttttttttgtggattatttgaagtagggttatgttgtattgtagttgtatagtattgtaaggattaagtagtgatgttttaattgtaaatgaagaggaaggtgaaatgaaggtaaa

SEQ ID NO: 2670 - DNA, 484 bp, Artificial Sequence
  chemically treated genomic DNA (Homo sapiens)
tttgtttttattttatttttttttttgtttatggttaggatattgttgtttgatttttataatattgtgtaattgtaatgtaatgtggttttgttttaggtgatttgtgggaggggtttttatgttagtgttgggaaggttgttggggtttttatatttgttttattatggtggtgaggttatgataatttggttgggagtatgattttggtgtttgttttgggagtatggatgataagttttggaagttggtagtgtgtaaagtattggtaagtttgttattgttaaaatgttaaatattaatgttttatattgatgtgaagtgtttaatatagttgggtttgggggtagttaggaggaagttggttatttgtggaggaggggttggttttggatttttgtaggatttttttgaggtagggtttgaagtttgtatatgtggtttagatttgtttttgttttttttttatattgagttttttat

SEQ ID NO: 2671 - DNA, 482 bp, Artificial Sequence
  chemically treated genomic DNA (Homo sapiens)
ttggtagtatttgggaagttttagtggttttttattggtggttttgttggtttagatgggatggtaagggttggtggttatagtgtagttttgtaggttattggtagttaggtgtttgaggttatggttagttaggtgttgtgggaggttgtagggtattttggaggaggagttgtggaatttttgtagttaggtttagagtgggtgtgtttggtagttatatatttaggggttgttgttgagttttaggtattgtagggtatgtaggggggttagggttttagtgggtagtgttgatagattgttggtaaatagatagagtgttatgaggtggttaaggttatggaaggtatgtgggtgtatatgggttatgtggttttggtgtagtaggagatggttgaggttgtgtagtttatggaaggtgtgtttgggtatgttggagatgtggttgttgtgtaggaagaggtgtgtgaggttgttta

SEQ ID NO: 2672 - DNA, 482 bp, Artificial Sequence
  chemically treated genomic DNA (Homo sapiens)
tgggtaattttatatatttttttttgtatggtaattgtatttttagtgtgtttgagtgtgttttttgtgggttgtatagttttgattgttttttattgtattagaattgtgtggtttatgtgtatttgtatgttttttgtgattttggttgttttatgatattttatttgtttgttaataatttattagtgttgtttattgaggttttggtttttttgtgtgttttgtagtatttgaggtttaatgataatttttgggtgtgtgattgttgggtatgtttattttgggtttggttgtagaagttttgtggttttttttttgaggtgttttgtagttttttgtaatgtttggttggttgtgattttaaatgtttagttgttaatgatttgtagggttgtgttgtggttattggtttttattattttatttggattggtagggttattgatgaggagttgttggggttttttaagtgttgttag

SEQ ID NO: 2673 - DNA, 395 bp, Artificial Sequence
  chemically treated genomic DNA (Homo sapiens)
ggaggatagataagtgaagggtagttatagtttagggtattaggggttattgtaggttaggttggggtgtatttagggttgggtatgggaggggtgttgtgtttgttatatgttgttttttttttagttttttggggttttttgtttagtttttttgaggttttttagtagttttggatttgtttaggagggaggaagtattgtttatttatgtagttgtttttagaggagtagtttgaggaagagtttaggaagtttttggtggttttgtgttttataagtttgttggttttgttgttttttgagttatttgtgtttttttttttttgtatttgtaggtttttatttgtgtagggaagaattaggggtttttttgggtttttaagagtttttga

SEQ ID NO: 2674 - DNA, 395 bp, Artificial Sequence
  chemically treated genomic DNA (Homo sapiens)
ttagaagtttttggaggtttagaagagtttttggtttttttttgtataggtgaggatttgtgggtgtggaggaggagaggtatgggtggtttagagagtagtagggttagtgggtttgtggggtgtaaggttattgaggattttttgggtttttttttgggttatttttttgaggatgattatgtgggtaggtgatgtttttttttttttgagtagatttgaggttgttgggaggttttaggaaggttgggtagggagttttggggagttggagagagggtagtatgtggtaggtatagtgttttttttatgtttggttttgggtgtgttttagtttggtttgtggtggtttttggtgttttgggttgtgattgttttttatttgtttgtttttt

SEQ ID NO: 2675 - DNA, 390 bp, Artificial Sequence
  chemically treated genomic DNA (Homo sapiens)
aaatagttggttaagaggaaagatagtggtggtaatgttgagagagtgttgaggaaagagtggagagtttgtagttaagatgaatatttatagtaagtttttaatagttaaggatttgaaagttattattgtttagttggatatgagagtaagaatttagtatattttgttgggttttgttagttgtgtagagtataaggttttaggtaagttagtgttggggtaaaatattgtttttgttgaaagtagagttaagaatggaatggaaaaagattgaggtttgtatagtgtatgtatggggattttaaaatggatttgaaaatattttataatgtaattttgggagattgtaatataaaaaggaaggaatttaatgtaggtgagttttaa

SEQ ID NO: 2676 - DNA, 390 bp, Artificial Sequence
  chemically treated genomic DNA (Homo sapiens)
ttgaggtttatttgtattgaatttttttttttttatgttgtgattttttaagattgtattgtggagtgtttttgaatttattttgaaatttttgtgtgtgtgttatgtaggttttagtttttttttattttatttttaattttatttttgatggaagtagtgttttattttgatattggtttgtttaggattttgtgttttgtataattagtagggtttggtaggatgtattgaatttttgtttttgtgtttagttggatggtgatggtttttaagtttttggttgttgggagtttattataaatgtttgttttggttataaattttttattttttttttggtatttttttagtattgttattattgtttttttttttggttaattgttt

SEQ ID NO: 2677 - DNA, 444 bp, Artificial Sequence
  chemically treated genomic DNA (Homo sapiens)
agggttgtgttattttggttgtagtagggttgtatttgtttttttaattaatgtattattttttttagaaatagaataaagataaaagtggatgtataataaattattttagtttgttagtgttttgagagatgaaaaattttgtttagagataggattgtgggtttataaaaaaattataaagtttaggtattttgttaagtttttagaatgttgttgggttgttttttttttttttatgtttagttgtgtgtggttgttgggatagtgtttattttggtaggtgatgagttagtgtgggaatttaggggttgttttagttttgttggggtgttgagttgtagggagtggtttgtattgattttttttttttttatttatgttatttaaaagtatattagaggggttttgagatgaaatttgtatattttttagagttttttt

SEQ ID NO: 2678 - DNA, 444 bp, Artificial Sequence
  chemically treated genomic DNA (Homo sapiens)
gggaaggttttgagaagtgtgtggattttattttaaaatttttttagtgtgtttttgagtggtgtgaatgggggagaggggagttggtgtaggttattttttgtaatttaatattttagtgaaattgaggtggtttttgggtttttatattgatttgttgtttgttggagtgagtgttgttttggtagttatgtatggttgagtatggagaaggaaagggtgatttggtagtgttttaggggtttggtagagtgtttgggttttatggtttttttgtaaatttataattttatttttgggtgaggttttttattttttagagtgttggtaggttgaaatgatttattatgtatttgtttttgtttttgttttatttttggaaaaggtggtatattggttagggaagtaggtatgattttgttgtagttaggatggtatagtttt

SEQ ID NO: 2679 - DNA, 346 bp, Artificial Sequence
  chemically treated genomic DNA (Homo sapiens)
aaatatgttattttttttatttaagaggtaagaattggttgtaagttatggggttattaaattggttgtagttatagtaagtagaagaggttatggtttaggtttttttagattttttttgggatatatggttttttgggggggtttggtgaaattatttggattaggagttattgtatatggttatattaggtttgttgtagaggtaggtagttaaggttatgtggtaggtggtgatttttttgtggtatgtggtaatgagaggttgtgagagatttatttttttggtttggaatagagtatggagtttttttgggttttttttgaagttatttttagttaggaa

SEQ ID NO: 2680 - DNA, 346 bp, Artificial Sequence
  chemically treated genomic DNA (Homo sapiens)
tttttgattgaggatggttttgagaagggtttagaagagttttgtgttttgttttagattaagaaggtggattttttgtagttttttattgttatgtgttgtaagggagttattgtttgttatgtggttttggttgtttatttttgtggtaagtttgatgtggttgtgtatgatggtttttggtttgagtggttttgttgggtttttttagagagttgtgtgttttagggaaagtttgagaaggtttgagttgtgattttttttgtttattgtaattgtggttggtttagtgattttatgatttatagttggtttttattttttaggtgaaggagatgatatgttt

SEQ ID NO: 2681 - DNA, 400 bp, Artificial Sequence
  chemically treated genomic DNA (Homo sapiens)
tttttgtttttttagttgtttttgggatattttagtatgtggatgagtagtttttgttatgtttttttttatttgtggttttggtgattatgttttggtttttgattgtttaatgttgggtttttgtttatatttgtggtagggttttggattggtgatgtgttattttaatttttggtgtttggttttttggttaattttgatttttggaattagtgggattagtaatatattaaggagttttgtttttttattagagttttggaatttgagattagttggtgatgatttttgaatattgttattgttgtaaatattttataattttaggttttggtattgagttattttttatgggtgatattatgaaattttgttttagttagttttgtaggttttg

SEQ ID NO: 2682 - DNA, 400 bp, Artificial Sequence
  chemically treated genomic DNA (Homo sapiens)
taggatttgtagaattggttgaaataagattttatggtgttatttatgagagatgatttaatgttaaggtttgaagttatagagtgtttatagtggtggtgatatttaggggttattgttaattggttttgagttttaaagttttgatgaagaaataagattttttgatgtgttattgattttattgattttaggagttaagattagttaggaagttaaatattaggagttggggtggtatgttattagtttagagttttgttatggatgtaggtaggagtttagtattaggtaattaggagttagaatatgattattagggttataaataggaagaggtgtgataggaattgtttgtttatatattggggtgttttagggatagttggagagatagaaa

SEQ ID NO: 2683 - DNA, 500 bp, Artificial Sequence
  chemically treated genomic DNA (Homo sapiens)
atttagtggagttggggaaggaagaaagtggggttgggagaatttttttaattttatttttgttggtttggggatgggtattggtttttagtaagagaagtatttttgggatgttgagtgttttattttgtttttaggatttaggtaggtaggttttagttttgttgtgtttttggatttataggttagtgtggtttgaagttttttttgggggttttgtgggtgtttatatgtatttggggggtatttgtgtgttgggtgttgttttgtggtagaagttgagtttttgtattagtgtattgatttttttgtgggttattttattgagtgggatgtgttgaggtggaggaggggtggggttagtaggttgggttttgtttttggttttgtttttagtttattttttatggttttatttttagttttttgtagtggtggtttagtagtatgagtttagggttggttttagggaggtgttttattattaggttgtgattgga

SEQ ID NO: 2684 - DNA, 500 bp, Artificial Sequence
  chemically treated genomic DNA (Homo sapiens)
tttagttataatttggtgatgaaatatttttttggggttgattttgagtttgtgttgttgggttgttgttatgaggaattagaggtgaggttgtgggaggtgggttgggggtgaggttagaggtgaggtttagtttgttgattttgttttttttttgttttagtgtattttatttagtgaaatgatttgtgaagagattaatgtgttagtgtaggagtttggtttttattgtaaggtggtgtttgatgtgtaggtgttttttgagtatgtgtgggtgtttgtgaagtttttagaggaaattttggattatgttgatttgtaggtttgggggtgtggtggagttgggatttatttgtttgagttttggagatagaatgaagtgtttagtattttgggaatattttttttgttgagagttgatgtttgtttttgggttagtagggatggggttggggaggtttttttaattttatttttttttttttttagttttattaaat

SEQ ID NO: 2685 - DNA, 470 bp, Artificial Sequence
  chemically treated genomic DNA (Homo sapiens)
ttttgattgtgaaaagggtattaatttgtgtaatggtgttgtgatttggttgtggattttagtttttaaagttgggtatttttaattaggagaaattaagtggggttgttatatattttgagaataagtaatattatttaaatttaggtagttttaattattaatttaattgttgaatttttgttgttatatgttttttaaatagattagtataattttaattaggatttaaaatgtattatttttgttttggaatttagaatttgtagttgatgggagtttttggaggtttaatgattttaattatggtgagaaatatttttttttggtggggaggggtgtggttggtggtgaggagggtatttttttgggttggagaaggttggatggtagtttgttttgaaagttttggtttgttggattgggggtttgggggtggggggaatatagagaagtagggttggtggagg

SEQ ID NO: 2686 - DNA, 470 bp, Artificial Sequence
  chemically treated genomic DNA (Homo sapiens)
tttttattagttttgtttttttatgttttttttatttttgaatttttaatttagtgggttgggatttttggggtgggttgttatttggttttttttgatttgggaaagtgttttttttgttattggttgtgtttttttttattgggagaagatattttttgttataattaaagttattaagtttttaaaggtttttgttggttgtaggttttgagttttggaatgaagatgatgtattttaagttttagttaagattatgttgatttatttaggagatatgtagtagtgagaatttagtggttaagttagtggttaaggttgtttaagtttaaatagtgttatttatttttaaaatatgtagtagttttatttaattttttttaattaaaggtatttgattttagaggttggagtttgtggttgggttgtggtgttattgtataggttggtattttttttataattagaa

SEQ ID NO: 2687 - DNA, 491 bp, Artificial Sequence
  chemically treated genomic DNA (Homo sapiens)
ttatagaaggtgattgtgggttgagtttgaggttttttttagatggggaagagagaatagtatattttttttgtttatgttttggtattttatttaagaattagttgtttgttagttatttgttattggagatagttttgttggtggtttttagaaaaagtgaagtagttagaggatgaattgttatttggggaatatatttgtatataggataggaatggatgggagtggggagtgttttggggttattgtttaaatgttatttttatggtttttaagatttgtattagtagtttagttgttgatgaattataatttttggataagttgtagaggttttttttgttttatgtgtttatttttgttgtttatattgggggatttatgttttttggggttaggaggagaaaataatgagttattggggataagagaaaaataaaaatgttttgtatgtgtaaaattatttaaaatggaggtttttagaggat

SEQ ID NO: 2688 - DNA, 491 bp, Artificial Sequence
  chemically treated genomic DNA (Homo sapiens)
gttttttaaaagtttttattttaggtggttttgtatatatagggtatttttgttttttttttgtttttagtgatttattattttttttttttagttttaggaagtataaattttttagtatgagtggtaggggtgaatatatggaatgaggggggtttttgtagtttgtttgagaattataatttattagtggttgagttgttgatgtaagttttggagattatgaggatggtgtttgaatagtagttttagggtgttttttatttttatttatttttgttttgtgtgtaggtgtgttttttgaataatgatttattttttggttgttttgttttttttgaaagttgttaatagagttgtttttgatgataggtgattaatgggtagttgatttttgagtgagatattgaggtgtgggtaggagaggtgtgttgtttttttttttttatttgggaagggttttaggtttagtttatagttattttttgtga

SEQ ID NO: 2689 - DNA, 478 bp, Artificial Sequence
  chemically treated genomic DNA (Homo sapiens)
ttaaggaatttgggtttaggtattgattttgaggagttggtgatgtaggtatggggtatttatgtagggttttagtaatttttgggaaggagaatttggggtttgaaggtgaggtgagtggatttaggattggataatttgggggttttagggaagtgagatttgaagtagttaggttatattgggtttttggtagtaggtagagggttttttgtgggaagtttttggttgttggtatttggtagttgttttttgtagaggtattgggtgtagagttgtgtttattgttttgaaatttgtgatgtttagtagttttgttttagttttattatagtttttgaatgtgtgttgtattggtttttagtagtgtataattttgggttgaatatgtagtagagtagagtaaaaagatggtgtttttgtgttggtttttttttagatataagataagaaggggtgaggagggagtttttgaata

SEQ ID NO: 2690 - DNA, 478 bp, Artificial Sequence
  chemically treated genomic DNA (Homo sapiens)
tgtttaaaagttttttttttatttttttttgttttgtgtttagaaagaagttggtgtggagatgttatttttttattttgttttgttgtgtatttagtttaaaattgtgtattgttggaggttaatgtggtgtatgtttaaaagttatgatgaggttggaatagggttgttaagtgttgtagattttaggatggtgagtatagttttgtgtttagtgtttttgtagggagtagttgttaaatgttagtggttagaaattttttatggggagttttttatttgttgttgaaggtttggtgtgatttggttgttttagattttatttttttgggatttttaagttatttagttttgggtttatttgttttatttttagattttgggtttttttttttaaaggttgttggagttttgtgtggatgttttatatttgtattgttagttttttagggttagtgtttgagtttaggttttttaa

SEQ ID NO: 2691 - DNA, 292 bp, Artificial Sequence
  chemically treated genomic DNA (Homo sapiens)
aattagttggtgaaggtttttaattagtaaaggaggaagtagttggggttggtgagggtgaggttggtagttaggtaggaaggtagtaggaggaggaggaagtggaggtggtattttttgagaggtgtatgtttagtgagttgtgaagatggtagggttggtggagtggttgttgtatttgattttttttttttttttaggatatgtgatggtgtttagtttggagttgggataaggtttttgtagttgatatttttataggagaagttttgggattggggtagtagtaagg

SEQ ID NO: 2692 - DNA, 292 bp, Artificial Sequence
  chemically treated genomic DNA (Homo sapiens)
ttttgttgttgttttagttttagagttttttttgtaggggtgttggttataggaattttattttagttttaaattggatgttattatatattttaaaaaaaggggagagattagatgtggtggttgttttgttagttttgttatttttatgatttattgagtatgtgttttttagaaggtgttgtttttgtttttttttttttttgttgtttttttgtttggttgttggttttatttttattggttttggttgtttttttttttgttggttaagaatttttattagttggtt

SEQ ID NO: 2693 - DNA, 246 bp, Artificial Sequence
  chemically treated genomic DNA (Homo sapiens)
ttttagagtttttggtgtggggtggggtatataggtagggattaatttatggagtttttagtttgttttgtagtgttttttataaaagttatggatttttttttgtttgttatatgttgtgtttattattgtgatggttttttttatggggatttttatatgatagagagtaaggtgttagttaaggattattgggtagttgggggttggtggtgttaagtagtaggaagtagtttagttggatga

SEQ ID NO: 2694 - DNA, 246 bp, Artificial Sequence
  chemically treated genomic DNA (Homo sapiens)
ttatttagttgggttgttttttgttgtttagtattgttagtttttgattgtttagtgatttttaattgatgttttgttttttgttgtatggaggtttttgtggaagaaattgttatagtggtgggtatggtatgtggtaggtaggggaggatttatagtttttataaagaatattgtaaagtaggttggagattttatgagttggtttttgtttgtgtgttttattttatattaagggttttgagg

SEQ ID NO: 2695 - DNA, 500 bp, Artificial Sequence
  chemically treated genomic DNA (Homo sapiens)
attagggtagttaaggggaaagattgatgtagaaggaatgaggtttttatgggttgggtttaaaagatttagagtgagtgtttagttgaaatatttgttaaaattttaaggaatatttatataaaaataagaagttgtttggtatagaagttagggtaggggatgttttttgaaggttatattttatggtaggtatatagtagtatgtttaaatatggtttttgttaaggttagagaggtattatttatatagaagaagttattattgtgattttatttattttgtgtttttattgtgtaattgaatgttgagtgtggatggtattttttttagtatttggttgtgttattgtgtttagttggtaagttttgggggagaagagaggtttagaaggaagattatttgagtttattagaataatgtgtgtttttaataaggtaggggtgtttaaatttagtaggtttaatagattaagttatgttatgaaggttttgtggat

SEQ ID NO: 2696 - DNA, 500 bp, Artificial Sequence
  chemically treated genomic DNA (Homo sapiens)
gtttataagatttttatagtataatttggtttgttggatttattgagtttgggtgtttttgttttgttaaaagtatatattgttttgatggatttagatggttttttttttgaatttttttttttttttaaggtttgttaattgagtatggtaatgtagttaagtgttggaagaagtgttgtttatatttagtatttaattatgtggtgggggtgtggggtgggtagagttatgatgatgattttttttatgtgaatggtgtttttttagttttaataggaattatgtttaagtgtgttgttgtatgtttgttatggagtgtggtttttgaagaatattttttattttgatttttgtgttgagtaattttttatttttgtgtgggtgttttttgaggttttggtaaatgttttaattaagtatttgttttaggttttttggatttagtttatgggaattttattttttttgtgttagtttttttttttgattgttttagt

SEQ ID NO: 2697 - DNA, 442 bp, Artificial Sequence
  chemically treated genomic DNA (Homo sapiens)
tattttgttttaagggtaagtaaggaatatgtttttttagttttaggggttattgtggttttttttttttttagttttgaagttatgggggtttttttgttatttttagttttttgggttattgaagtatttggttttttagtttttggagttattgtgggtttttttttggttttgagggttaagggggtttttgtttgttagtgttaaagtgtttggttggaggtggaaggaagtgatatttattgttttttttgagattgtgttgtttgtggtttggttggtagttgtagtgtagatagtttgagagttttgtttgtaggtggtgtagatatatgtagatattgtagatattgtagatattgttttggtgttgatttgataaatggttttgttttttttggaagttgtttgtgtgtttatttatttgtgtttagttaga

SEQ ID NO: 2698 - DNA, 442 bp, Artificial Sequence
  chemically treated genomic DNA (Homo sapiens)
tttaattgggtataaataaatggatatgtaggtggtttttaaaagaggtgaaattgtttattaagttggtgttggggtggtatttatagtatttatagtatttatatgtatttatattgtttgtaggtggggtttttgggttgtttatattgtaattgttggttgggttgtgggtgatgtggttttggggagaataataaatattatttttttttgtttttgattgggtgttttggtattggtgggtggggatttttttggtttttggggttggggaaggatttgtggtggttttagggattggggaattggatattttgatagtttaaggggttgggggtggtgagggggtttttatggttttgaggttggggaaggggagagttgtggtggtttttggggttgggggaatgtattttttgtttgtttttggggtagggtg

SEQ ID NO: 2699 - DNA, 333 bp, Artificial Sequence
  chemically treated genomic DNA (Homo sapiens)
ttttttttttttttttaaatttttatttgatattaaataaagtaaattttaaatagattaattgttgtatggttttgttttgtttttttagtttgtttttaggtttggtggggggttgggttgtggtggtggtagtggtgggagatgttggggtggttggtggaggtttatgtggtgttttaggtgggatgttagtgttttgaaggtggaggttttggttttttttttttgtggtttgggtatggtatttttttagttttatgtgatggttgtttggtggtattagtatagttggtttattattgaggtggatgagtatagttttaattttat

SEQ ID NO: 2700 - DNA, 333 bp, Artificial Sequence
  chemically treated genomic DNA (Homo sapiens)
gtggggttggagttgtatttgtttattttgatgatgagttggttgtgttggtgttgttgagtggttattatgtgggattgggagaatgttatgtttaggttgtaggggaggagggttagggtttttgtttttaggatgttggtattttatttagagtgttatatggatttttgttggttgttttggtattttttattgttgttgttattgtagtttggttttttgttagatttggaaatagattgaggagatggagtagaattgtgtgatagttaatttgtttgggatttgttttatttaatgttagatgaagatttagaaagagggagaggg

SEQ ID NO: 2701 - DNA, 457 bp, Artificial Sequence
  chemically treated genomic DNA (Homo sapiens)
tgtttagtttgggaagtgttttaagattattttgggagaggtttgggttgtggtgtttttgtttttttgttttgtgtaaggttggggattttgtttttttggagtgagggtgtttggtaggtattagtggttagtagtagttggggttgggttttatttgaggattgaggtgttgatgaatgtttatgtttggaagatattggttttttggtttatgtatttatttaattttaagttaggttttttagatttttaaattaatagtggattttgtaaattgttgtgttagaggaaaatttaagtgagtttgattgtgggaagtattgttgttatgaaaggtggtggtttagtgttatttgttgggatgtggtagttaagggagttggtgttgggggaggtttgaggttttgggtttttgggaggaaatagagttgtttgtaggaataaaggaggaaag

SEQ ID NO: 2702 - DNA, 457 bp, Artificial Sequence
  chemically treated genomic DNA (Homo sapiens)
ttttttttttttgtttttgtaaatagttttgtttttttttgaggatttgaggttttaggttttttttgatattggtttttttggttgttgtgttttggtaggtggtgttgagttattgttttttatggtgatggtgttttttgtgattgggtttgtttagatttttttttgatgtaataatttatagaatttattgttgatttagggatttggggagtttaatttaaaattaagtaaatatataaattagggagttagtgttttttgaatatgagtgtttattggtattttggtttttgggtgaggtttggttttggttgttgttggttgttggtgtttgttggatatttttgttttgggagagtaggatttttggttttgtgtggagtagagggatgaaggtgttgtagtttaggttttttttagggtggttttgagatattttttagattggata

SEQ ID NO: 2703 - DNA, 312 bp, Artificial Sequence
  chemically treated genomic DNA (Homo sapiens)
ggttgggtgtttagtttatagggaaagaggtggttgattgtagatatgattagttatttatttggggatttttgttatattatgtatgtgggttgtggtggggatgtttttggggatatgtttttttttagtaattatggtggtagttttgggagtatttattgtttattttgtagttttttggttaagaagttgtagttggtgtggagggtgggggtgtttttttggaggatggtatttttttttgtattttttttggttttattggttattttttttattattaagaatgttatttttttgttttagttt

SEQ ID NO: 2704 - DNA, 312 bp, Artificial Sequence
  chemically treated genomic DNA (Homo sapiens)
gagttggggtagggagatggtgtttttgatgatgggggagatggttggtggagttggggagggtgtagggggagatgttattttttgggggggtgtttttattttttgtattagttgtagttttttggttaggaagttgtggggtgagtgatgggtgtttttggagttgttattgtggttgttgaggaaggatgtgtttttgaagatatttttgttatggtttatatgtatggtgtggtggaagtttttgagtgggtggttgattatgtttgtagttagttgtttttttttttgtgaattggatatttagtt

SEQ ID NO: 2705 - DNA, 439 bp, Artificial Sequence
  chemically treated genomic DNA (Homo sapiens)
ataattttaagtttttttttgtagttattagtaggttataaagagtaaagggtttaggaatgtgttaagaagttgttttttggttttttgttattttagttatttttgattataaggttgtttttagaaggaaggtagtagagaatggttttatattgtttgatttgggtgttgtatttagtgtttattttgagttttattaatgaatagttgggtttgaaattattttttttttaggtttgtatagtaatttaagttattgtaaagtttatttttgtagtttttgtttttggttattttgatgatgttgattattttattttgtttaaatatttggtttataggtatttgttgtttaagttttttgtgggtttagtttagttttttggttatagtgtttttgtttatttggatttttattaggtgggtttttttttgg

SEQ ID NO: 2706 - DNA, 439 bp, Artificial Sequence
  chemically treated genomic DNA (Homo sapiens)
ttagaagaaggtttatttgatggagatttaggtgaatggaggtattgtggttgagaagttggattgggtttgtgagaggtttgagtagtaggtatttgtgaattaagtgtttgggtaggatgagatgattgatgttattggggtgattaagggtaaaggttataaaggtgagttttgtggtggtttgagttgttgtgtaaatttgggggagaagtggttttaggtttagttgtttgttgatgaggtttagagtgagtgttgggtatagtgtttgaattggatagtgtagaattattttttattgttttttttttgagaatagttttgtggttagaagtggttgggatagtggagggttaggggataattttttaatatgtttttggattttttgttttttgtagtttattgataattgtaaaggggagtttggaattat

SEQ ID NO: 2707 - DNA, 453 bp, Artificial Sequence
  chemically treated genomic DNA (Homo sapiens)
gaagtaagatgtttttagtggttgtatttatgattatggtttttttgtttattgtttgggtggggtttttaataatttttttaatttgtttattgtttttagttgagatttgtttaatgatatgtgggggtggggtatatgtttttaattgagggttggttttggtttgtttgatggtatggatgttttttttaattttttgtgtgatttggtattaattgttaattaaggtaagaatattgggtgtgtttttatttataaatttttttattatttttgttatattggtgttgttttggtttaagttgtgggtttgggtttgtgtttgtaatttgtttattagttttattatattgtaggtaattttagttatagtagttgttgtttttagatttatgttagtgtttaagagtataaaattgattttttttgtgaagggtgttagatttaggt

SEQ ID NO: 2708 - DNA, 453 bp, Artificial Sequence
  chemically treated genomic DNA (Homo sapiens)
gtttgggtttggtattttttatagaaggaattagttttgtgtttttggatattggtatgggtttgggagtagtagttgttgtggttgggattatttgtagtgtggtagaattagtaaataaattgtgggtatgagtttaagtttgtaatttggattaaagtggtattaatgtagtaaaggtgatgaaggagtttgtgggtgggaatatatttaatgtttttattttagttgataattggtattaagttatataagggattgggaggaatatttgtgttattagatgagttagagttaatttttagttaggagtgtatgttttatttttgtatattattgggtgaattttagttgaaggtggtgaataggttgagagggttgttgaaggttttgtttaggtaatgagtagaggaattatgattgtgggtgtagttattggaggtattttgtttt

SEQ ID NO: 2709 - DNA, 305 bp, Artificial Sequence
  chemically treated genomic DNA (Homo sapiens)
tttttttatttttagtatgtgaggttgggagtgggtgtaggtagtttagttgaagtttagaggttaagggatagttttgggtttttttttgttttgtgtggttttgttattttttgtttagagaagatagtttattttttttttttattattgtttttttttgggtttgttattgaggtaattttgaatgattggaatgttaatttttgatttttgtttgttttttttttgattagatataaagtagaagtgaatagggttggggtaggtgagggtagataaggagttatgtattagaattagtt

SEQ ID NO: 2710 - DNA, 305 bp, Artificial Sequence
  chemically treated genomic DNA (Homo sapiens)
agttgattttgatgtatggttttttatttgtttttgtttgttttagttttgtttatttttgttttgtatttgattggaggaggggtgggtggaagttaagggttaatgttttagttatttaaaattattttggtggtaggtttaggggagggtgatggtaggaggagaggatgagttgttttttttgagtaggaagtgataaaattatgtagggtaggggaaggtttagagttgttttttggtttttgggttttggttgagttatttgtatttgtttttagttttgtatgttgagggtggaggag

SEQ ID NO: 2711 - DNA, 404 bp, Artificial Sequence
  chemically treated genomic DNA (Homo sapiens)
tagtagtttttggaaggttatggtgggtaggtaaattagggtgttgtgggttaggtttagtgtggttagtgtatttagtgttttgaatgtttttggttgtagtttttttagtgtgtttttttttagttttagttgttgtaatgagtttagtttgtttagtgttttttggggtagtttatgtaggtggttggaggttaggttgagtaggagtaggtggtttaggttatggaaggtgtttttggttattagttttattttgtagtggtgtaggtttaggtgtgtgaggtgaggtatgttttggaaggtggttgtggggattatttttagtaaattgttttgtaggtttagttgttgggttagttggggatagtgaggagaaagtggggttgagttaggtagggatt

SEQ ID NO: 2712 - DNA, 404 bp, Artificial Sequence
  chemically treated genomic DNA (Homo sapiens)
ggtttttgtttggtttagttttattttttttttgttgtttttagttgatttagtggttggatttgtagggtaatttgttgaaggtgatttttgtagttgttttttagggtgtgttttattttatatatttggatttgtgttattgtgaggtggagttggtggttgagggtgttttttgtggtttgggttgtttgtttttgtttaatttggtttttaattatttgtgtgagttgttttaggaggtgttggatgggttgggtttgttgtggtggttggagttggaggggaatgtattggaggagttgtggttggggatgtttggggtattgggtgtgttggttatgttaaatttggtttataatgttttggtttatttgtttgttatggttttttaggggttattg

SEQ ID NO: 2713 - DNA, 400 bp, Artificial Sequence
  chemically treated genomic DNA (Homo sapiens)
tttggatttaggagtagagtttgtgaagtgttatttttagtatgttgagtttttttatttttttaaataatgtatttttgttattaggtattatgtattagtaaagagaggagggttgatgttagggtttggggatgggatatttaggttggggtgtttagatttttttgttgattattttattggttttgttgttttatttatatagagtttgtttagtttgttggtttgggtgttgatggatgaggatgtttggatttttttttattagttgttttatgatttagagtaggtgttttaggtattttgttggttttgtttgtgtatttggaaagtgtaagtgattagtttttgggtttttatatggttagagttttgggtttttgttggaaaagtattt

SEQ ID NO: 2714 - DNA, 400 bp, Artificial Sequence
  chemically treated genomic DNA (Homo sapiens)
agatgtttttttagtagggatttagggttttggttatgtggaagtttaggggttggttatttatattttttgggtgtgtgggtggagttggtggagtgtttggggtatttgttttgagttatagggtgattggtaaaagaagatttggatgtttttatttattagtatttagattggtaggttgagtaggttttgtgtgggtgagatagtagaattggtggggtagttagtagaaagatttggatattttagtttagatgttttgtttttgagttttgatattagtttttttttttttattaatgtatgatgtttgataatagaaatgtgttgtttaaaagaataagaaaatttagtatgttgaaggtaatattttataagttttgtttttgggtttaag

SEQ ID NO: 2715 - DNA, 495 bp, Artificial Sequence
  chemically treated genomic DNA (Homo sapiens)
gaattggaaaagtatttgggtatttaaatttgtgtttttgatgttataaagaagaaataaattgattagtttgttaatgaagttgagagatttgatgttttttttaatgttgttggttttgtttattatggaattgttttggattgtgaggagaaagattgggattttttgatgaattttaatgtgtgtagtatgtatttgatgattaaggtatttttttttaaaatgtttgtttaaaaatttggtaatattattattatgttttttgtggtttttagtattaaaggagttgtgaatagatgtgtgtatagtataattaaggtagttgtgattggttttataaaatttgtggttgtagattttatttagtagggtattaggtgtaattgtgtgtgtttaggaatggttgatatgttatttttataagaaagaatataagttagaggaaattttgaagaggtatggaatgattttttgaagagataaaagatggga

SEQ ID NO: 2716 - DNA, 495 bp, Artificial Sequence
  chemically treated genomic DNA (Homo sapiens)
ttttattttttgtttttttaggaaattattttgtgtttttttaggattttttttggtttgtatttttttttgtagagatggtgtattaattgtttttgggtatatatagttgtatttgatgttttgttggatgaaatttgtagttatagattttgtgaggttaattatggttgttttggttgtgttgtatatatatttgtttataatttttttgatgttggaaattatagaaaatatggtgataatattgttagatttttgagtaagtattttaggaaggaatgttttgattattaggtatgtgttgtgtatattgagatttattgagaagttttagtttttttttttataatttaggatagttttatgatggataaaattagtaatattaaagagaatattaagttttttaattttattggtgaattgattaatttgttttttttttgtgatattaaggatatgagtttgaatatttaggtatttttttagttt

SEQ ID NO: 2717 - DNA, 452 bp, Artificial Sequence
  chemically treated genomic DNA (Homo sapiens)
aaggttttgagtttttgtttttgtatttatttttttttttataagttagttttttttttttttatttgagatgtaattttgtggttatagtagtagtagtagtaggaaggttggggttatggttttatttagttgggtagtgttaggtttggagatttaaggtgagggtttatttgatataggatgtgttatttgggtttgttagggaaggatttggggttttaaaagtgaagttgtttatttagggaagtgaggtagtgtgggatttattgtttttagttaattgtagggatttattgagtttattatgagggtggtgttggtagttgtttttgtttttttttttggaattttaggtaggtgtggttgttttatttagtttggggttttaagttgggaggatttatagttagagggttttttgttttttttaattttttttagaaattggt

SEQ ID NO: 2718 - DNA, 452 bp, Artificial Sequence
  chemically treated genomic DNA (Homo sapiens)
attagtttttgggggaggttggggagggtggggagttttttgattgtgagtttttttggtttggggttttagattgggtggagtagttatatttgtttgaagttttgaggaaaagggtggaaatagttgttagtattgtttttataataggtttaatgaatttttgtggttggttgggggtagtgggttttatattgttttatttttttaaatgggtagttttatttttagaattttgggtttttttttggtaggtttaggtggtatattttgtgttgggtgggtttttattttggatttttaggtttgatattgtttagttggatggaattatggttttagtttttttgttgttgttgttgttgtggttatagggttgtgttttaggtgaggggagaaggggttgatttgtggaggagggagtgggtatagaggtaggagtttagggtttt

SEQ ID NO: 2719 - DNA, 374 bp, Artificial Sequence
  chemically treated genomic DNA (Homo sapiens)
tattttttaagaatttatgagttttggtaataggtgggggtggggagggtaggtttaaggggtggtagttggtttaggataatttatttgggggtagtatgtttagagagattttgtgtaaaatttggggttttttggttttatttattatgtagttatatttgttagtattttttttttgtagggtaattatttttatttgtagtaggtttttatttaggtttgtgagaaatgtatgtttgtttgttggagttttgtgatttatagttgaggatattaggggttggtatttttttggtaagaattggtattatattttttgagttttgatattttggagtttgtagtggtattgtattagaatggagtttttt

SEQ ID NO: 2720 - DNA, 374 bp, Artificial Sequence
  chemically treated genomic DNA (Homo sapiens)
gggaagttttattttggtgtagtgttattataggttttaggatgttaaagtttagaaggtgtggtgttggtttttgttggaggggtgttagtttttggtgtttttagttgtggattgtagagttttagtgggtaggtgtatgttttttatagatttgggtgggggtttgttgtaggtggaaatggttattttgtaggaagaggatgttggtgagtatggttgtatggtggatggggttagggggttttagattttgtatagagtttttttgaatatattgtttttaggtgagttattttaggttagttattattttttagatttattttttttatttttgtttattgttagggtttatgggtttttgaggagtg

SEQ ID NO: 2721 - DNA, 465 bp, Artificial Sequence
  chemically treated genomic DNA (Homo sapiens)
ttttaaaaatgttatttggaaattaagtataattttgttaaaatgagtaaggattttatttaaatgaaattaaagagggttattttattttttttatttagtatttaaaataatttagagtgtgagaaattagattgtttagggttatatgtttttaaggattgttttttaatagttttttttttgtttttgttttggggttttagttttttttttttatttttggatttaagtttgtgtggtgttggttatattgattgatagttaggggatatgtatttattagtagggtgtgtttttttggtttttataatgaatgttggtttagttgttagtagtttttatgttaatgtttttttgttagtgaggttaggtttttaggtgttattggagttagaggagggtagttggtgtgtgttaagtagttattaggagttattttatgttaatgttttattttttgta

SEQ ID NO: 2722 - DNA, 465 bp, Artificial Sequence
  chemically treated genomic DNA (Homo sapiens)
tgtaggaagtggagtattggtatgaagtggtttttagtggttgtttggtgtatgttagttgtttttttttgattttagtggtatttgggggtttggttttattgatgggagaatattggtgtgaaggttgttggtgattgggttagtatttattgtgaagattggagggatatattttgttggtgagtgtatgttttttggttgttagttagtgtggttaatattatgtagatttgagtttaggggtggaggagagagattggaattttggggtagaggtaggaggagggttgttagagagtagtttttgggggtgtgtgattttgaataatttgattttttatattttaaattattttaagtgttaaataaaaaaaataagataattttttttaattttatttaggtgaaatttttgtttattttagtaaaattgtgtttaatttttagatgatatttttgggg

SEQ ID NO: 2723 - DNA, 459 bp, Artificial Sequence
  chemically treated genomic DNA (Homo sapiens)
ggaggtagagggagagttttttttagatgttattattattgttaagtagttgtattttttgttgggaaatttttttaggtaagagaatgtagagatgtttgtttgtagtttgggggaggatgttttattaggtgttggttatgaataggaggtttttttgggtgtgaggggtgtgttagggttgtttatttaggagtggtttgtgggaggattaggtgaggtttttaatggagtttttagtgtgtgtgttgaagaaggttttttggggttttgtaatgtttgtagttagttttttaagggtgtgtttgatttgttaggtgagtttttggttgagggtgtagtgtatatggttagttttgtgtaggtagattgtatagtttgttttaagggttatgtttattttgttaaggtgttaattttggatatttatttgagtaagattgagggggtataagtgga

SEQ ID NO: 2724 - DNA, 459 bp, Artificial Sequence
  chemically treated genomic DNA (Homo sapiens)
tttatttgtgtttttttagttttatttaagtagatgtttaaagttagtattttagtagggtgggtgtgatttttggggtgggttgtgtagtttgtttgtgtggagttggttgtgtgtgttgtgtttttggttggaggtttatttggtaaattagatgtgtttttggggggttggttgtgggtgttgtggggttttagggagttttttttggtatatatattgggggttttgttaggggttttgtttagtttttttgtgggttgtttttgggtgggtgattttggtgtattttttatatttaggaaagttttttgtttgtggttagtatttggtgaagtgtttttttttggattgtgggtgggtgtttttgtgtttttttgtttggaggaattttttggtgaggaatgtagttgtttggtagtggtggtggtatttgggaaaggttttttttttgttttt

SEQ ID NO: 2725 - DNA, 382 bp, Artificial Sequence
  chemically treated genomic DNA (Homo sapiens)
agggttttaggttgtggttttttatgaattgggtgtaatattttagggatttttttttttatgttatttttaagagtaggtatttatttgtttgaagtttgtatgaagttttatttgtttattttttattttttttttttttttttgtttttagttagtttttgtgtttaggatatttattaattatgatttttaaggttattagtagtaatagtagaaataaaagaaggtgtatagggttagaagttagggatattttttgtatattgtggagagtaataggtaggaagttgggtgtgtatatatttatttttattggtatggtgaagaaatgttatttaatagtgtgggtgtgggtattgtttaaattttttattttgga

SEQ ID NO: 2726 - DNA, 382 bp, Artificial Sequence
  chemically treated genomic DNA (Homo sapiens)
tttagggtaaagaatttgggtagtgtttatatttatgttgttggataatatttttttattatattagtgagggtgaatgtgtatatgtttagttttttgtttgttattttttatagtatgtgaagaatatttttgatttttagttttgtgtgtttttttttgtttttgttgttgttattaatagttttggagattatggttggtgagtgttttgagtataagaattggttgaggataaggaggagggagaaaggtagggggtaggtgaatggggttttatgtaggttttagataagtgggtgtttgtttttaaggatgatgtgaggaagaggatttttgggatgttatatttagtttatgggagattatagtttgaggtttt

SEQ ID NO: 2727 - DNA, 498 bp, Artificial Sequence
  chemically treated genomic DNA (Homo sapiens)
ggttggatgttagttttaggagagagaaatttttttttagtttgagggaagagagtggtgtgaagttgggggtttgtatgttttaggtaggaagaaagtggggttaatagatataggtaggtagtatgattatggtttaggagttagtttagggttggggggttgttttggttttagtgtttttttttgagagggtttttatttttggttttttgtttgtagttgaaggagtagagggaatgtgagtggtggtagtggtagtggaaggttttggttgtaggtagtttgttggaggagggaggagagtttgatgatttggtgttggttttgtgttttggggaggtttttgataaggatttatgtaagtttaagtgtagttgtaagtgattagggagttaggttttggaagttatttgggagtgggtaataaattggttaaattattgatttggggaattagttatataggaggttgggagatagggattggtgagaatg

SEQ ID NO: 2728 - DNA, 498 bp, Artificial Sequence
  chemically treated genomic DNA (Homo sapiens)
tatttttattagtttttgttttttggttttttgtgtggttagttttttaggttaataatttagttggtttattgtttgtttttgggtaatttttagggtttggttttttgattgtttgtggttgtgtttgagtttgtataagtttttgttgaagatttttttagagtgtagggttgatattaggttattgaattttttttttttttttagtgagttgtttgtagttaggattttttgttgttgttgttattgtttatgttttttttgtttttttagttgtgggtggggggttaaagataggaatttttttagggagaggtgttgaggttagggtagttttttaattttgggttaatttttaggttatggttatgttgtttgtttgtatttgttggttttattttttttttgtttaggatatataggtttttagttttatattattttttttttttaggttgggaagaagttttttttttttggggttgatatttaatt

SEQ ID NO: 2729 - DNA, 351 bp, Artificial Sequence
  chemically treated genomic DNA (Homo sapiens)
tagaggaggtttttggtattgttagttttgtttgtgatttttttattatttttggggagttagtggtttttttttttttttttatttttgtgtgtataaaggttatttttattgttttttgtggaaatatttttagaggattgagggtattttttgagaataaagtttttttttggggagtgttggttagggtttttgttattgtggtttgttgtttgtttagagttttgtgttttgataagaataaagtgattttgattggaattttgtagtttgttgttggttttgtttgtttttttgtagatgtgtagttttattttggttttttttttttttaaggaaaggggagtt

SEQ ID NO: 2730 - DNA, 351 bp, Artificial Sequence
  chemically treated genomic DNA (Homo sapiens)
aatttttttttttttgagaggagaggaggttagaatggggttatatatttgtaggaaaataggtagagttagtaataagttatagggttttaattggaattattttgtttttgttaaaatataaggttttgagtagatagtaagttgtaatgataagagttttggttaatattttttaggaagaggttttgtttttagagaatgtttttggttttttaaagatatttttatagagaataataaaaatggtttttatgtatataggagtgagaggagggagaaaggttgttgattttttaggggtggtggaagggttataggtaagattaatagtgttaaagattttttttg

SEQ ID NO: 2731 - DNA, 487 bp, Artificial Sequence
  chemically treated genomic DNA (Homo sapiens)
atggagatgattttgtttttgttttatttttttttggagttgtggtttgagttggtgtatttgatttttattgtgtggttttaagaggagatagttgttattgtattgggttttatagttattttttagaggtaaagtttgtggtttttgagttgttagttttttttttggggttgtttggggtatattgtttgggttggtttagttttttagtgtagttgtttaggaagattttaagtagtgttgaggggtgtagggttttttttttgtgattttggagttttttagtagttttggaattaattaagattttgaagaggttttggggagaaataaaatttatgtgtagggtagggtttgtattgggttatgttaagtaaatttttattttttttagagaattgatttgggattgaagtaaagtttttgaatattttggaaaatgttgatttttataggtttatattaattgtttttttttttttga

SEQ ID NO: 2732 - DNA, 487 bp, Artificial Sequence
  chemically treated genomic DNA (Homo sapiens)
ttagaaggaagaaggtagttggtgtgaatttatgaaaattagtgttttttaaagtgtttaagaattttattttgattttaaattagttttttggaggaggtaagagtttatttggtatggtttgatgtaaattttattttatgtgtggattttgtttttttttagagtttttttagaattttggttaattttagagttgttaagggattttagggttgtggagggagggttttgtgttttttagtgttgtttagggtttttttgggtgattgtattgggaaattaagttggtttaggtgatgtgttttgggtggttttaagaaaaagattagtggtttagaagttatgggttttatttttaggaagtggttatgaggtttggtatagtggtggttgtttttttttggaattgtgtagtgaaaattgagtgtgttaatttgggttgtagttttggagaggggtggggtagggatagggttatttttat

SEQ ID NO: 2733 - DNA, 392 bp, Artificial Sequence
  chemically treated genomic DNA (Homo sapiens)
tgtttttattaggtattgtttaggggttgtttatttttttttagtttttatgggggatgttgtgatttgataggtgaggagagtaagttttttagataggttgtttttttaaggttgtgtagtttttataagtttaaatgtgatttgtgttgggtaattttaaaatattgttgttgttagttttaggtggttttgtagggaggggtttttggtgttttttgtgaattggaattggaggttgattttttagagtgtgagaagttggtgggtttggtggttggggatgtgttgtggtgtgtgtgtattgggttgaagatttgttaggttggatgtttttgttgtgagtggtgtttttagaggttgtggttttttgtagtagttttgggtagttt

SEQ ID NO: 2734 - DNA, 392 bp, Artificial Sequence
  chemically treated genomic DNA (Homo sapiens)
agattgtttagggttgttgtagagaattgtggtttttgaggatattatttatggtagggatgtttaatttggtaggtttttagtttgatatatgtatattgtagtatgtttttagttgttaggtttgttagttttttatattttgaggagttagtttttgattttaatttatagaggatattggggatttttttttgtagggttatttggagttgatggtggtagtgttttggagttgtttgatgtaggttatatttgaatttgtgggaattgtatggttttgggaaaatgatttgtttaggagatttgttttttttatttgttaaattataatattttttgtggggattgaaggaaaatgggtagtttttgggtagtgtttggtgggaata

SEQ ID NO: 2735 - DNA, 475 bp, Artificial Sequence
  chemically treated genomic DNA (Homo sapiens)
tttttgaatattttttttaagatttaaaatagtaaaatgaaatttaatattattataaagttattttttggtaaataatttaaggaagataatttttgtatgtattttttttttaatagtttaggttaggtttttatatatagttttttttaaaatatttgagtgtaattatttagtaggttattggttgtaattttgagaaataaagtagtataatgtgatttgtatagagaatgattttatttattatgtttttaattatttatatttgttttaaattaaaatgttttggttgaatgtaggtatttgaaggaaggtttattttagtttagttttgtttttaatgtttgtgatatatagagtatgtgtgtttagggagaggttgtgtttagtgaagtagttgggtttttatttttatagggtgatattttaataggattttagttttttggggagttattttattgtgttattg

SEQ ID NO: 2736 - DNA, 475 bp, Artificial Sequence
  chemically treated genomic DNA (Homo sapiens)
tagtggtatagtgggatggttttttagggggttaaggttttattgagatattgttttatgagaatgagaatttagttattttattgaatgtagtttttttttgggtatatatattttatgtgttataagtattgagagtagaattagattgggatgagtttttttttggatgtttgtgtttagttaaagtattttgatttgaggtagatataaatagttggagatgtagtgggtaaaattattttttgtataaattatattgtgttgttttgttttttagggttataattgatgatttgttaaataattatatttaagtattttggggagaattgtatataggaatttagtttgaattattaagaaaaaaatgtatatgggagttgttttttttaaattatttgttagagaataattttataatgatattgggttttattttattgttttgaattttagaagaggtgtttagaaa

SEQ ID NO: 2737 - DNA, 373 bp, Artificial Sequence
  chemically treated genomic DNA (Homo sapiens)
tttggtattagttgtttttttggaatatggaattttgggtgagggaggtggagaatttttttttggggtttgttttttgtttttttgtttgtttgtagtttgaaggaagggtggtgggggtgggggtttgagtattttgtggtttgtggtgtgtaggagggtaggtttttggtttgtggttgtttttgaatgattttgtttttttttgttttggatgatagtattagggtgtagttgtaggagaggggttgatattttttaggagttttattggtgaagttttagtaagtggtattttttggggtttagagagttggtgtgttgtttggtttgggtttagatattagtttatttaagtttattttgggttttt

SEQ ID NO: 2738 - DNA, 373 bp, Artificial Sequence
  chemically treated genomic DNA (Homo sapiens)
aaaagtttaagataagtttgggtgagttgatgtttggatttaaattagatagtatgttgattttttggattttgggagatgttatttgttgaggttttgttgatggggtttttgaggggtattggttttttttttgtgattgtattttagtgttgttgtttagggtggggagggatggggttatttggaggtggttgtaggttagggatttatttttttatgtgttgtagattgtggggtatttggatttttgtttttattgttttttttttaaattgtaagtgagtaggagaatgagggatgagttttagaagaaagttttttattttttttgtttgaagttttatattttagggaggtaattgatgttagg

SEQ ID NO: 2739 - DNA, 308 bp, Artificial Sequence
  chemically treated genomic DNA (Homo sapiens)
gtatttgttgtttagttagaagttattttaagttattttaaaatgagttatgttgtttagtattttatttttgaaaattaagagaattgttttttagttaaattgaaaatagtaaatatttagtggtttaaatttatatatgggttttaaagttggggagattattttaggatgaaataaaattttaagtaaaatgaattttaaaataattaatttaagataagttgtttataggagttttattttggttagtttaaatgtaagtggttgtttgtatttgatttattttttatgagatgttataatta

SEQ ID NO: 2740 - DNA, 308 bp, Artificial Sequence
  chemically treated genomic DNA (Homo sapiens)
tgattgtggtattttatgaagaataaattaaatataaatagttatttgtatttagattaattgaagtaaaatttttatggatagtttattttaaattaattattttgaagtttattttatttgagattttattttattttaagatagtttttttgattttaaaatttatgtatggatttaagttattaaatgtttattgtttttaatttgattgaaaaatgatttttttgatttttaaggatgaagtgttaaatggtatgatttattttagaatagtttaaaataatttttggttggatagtaggtgt

SEQ ID NO: 2741 - DNA, 324 bp, Artificial Sequence
  chemically treated genomic DNA (Homo sapiens)
tttgttttttaatattatttaagaagattatgttgtattattttattttttatatttttttgttgataaatgattttattttatttgatttaattttatttttttattgtgtaatattattgatagatagtggatttatgtaggtatataagagatttatgtattttttgaatttaaattttgagttgaggatgatgtttttatttttaggtttttatttggtttgggagtttgtttttagtattattgttgataagatgttagtagtatatttaaaatttgttatttgagattttgattttattatattggttttttattttt

SEQ ID NO: 2742 - DNA, 324 bp, Artificial Sequence
  chemically treated genomic DNA (Homo sapiens)
ggaaatggagaattagtgtgatgaagttaaagttttaaatggtaggttttagatgtgttattggtgttttgttaataatagtattgaagatagatttttaggttgaatgggggtttgaggatggaagtattgtttttaatttaaggtttggatttaaaggatgtataaattttttgtgtgtttgtgtaaatttattgtttgttagtaatgttatatagtaaggagataaaattaaattagatagggtgggattatttattaataaagagatataaagagtagaatgatatagtgtggtttttttgggtagtattgaaagataga

SEQ ID NO: 2743 - DNA, 389 bp, Artificial Sequence
  chemically treated genomic DNA (Homo sapiens)
ttattttgttattaaattttttttttgggttaaattttttttttagatttgtagttattgttttttttgatttttataaagtaggaaatgtttatgtattgttaagtttttagagtttttgttgtttatagtaattaaatgagatgattgttttagttttaagtattggttttagagaagggtagagtatattttgaattggaaaattaaattaaataaaaataaatagttatgtgaggtatgtgagatgttagtttttttttggagaaatgtaagatagaaatttgattgtaaagttttatttttgaatgaaggtttttgtgatttgtttttagggttatattgttttttttttggattattgggaattatagttttagtaaatttag

SEQ ID NO: 2744 - DNA, 389 bp, Artificial Sequence
  chemically treated genomic DNA (Homo sapiens)
ttgagtttgttagggttatgatttttagtagtttaaggaagggatagtgtgattttaaaagtaagttgtagaaatttttatttaaagatagagttttatagttagatttttattttatatttttttaaagagaaattgatattttatatattttatgtggttgtttgtttttgtttggtttggttttttggtttaaagtatgttttatttttttttgagattaatgtttaggattgaggtaattattttatttgattgttatgggtagtgaggattttgaaaatttggtagtatatggatattttttgttttatggaggttaagagaagtagtggttgtaaatttgagagaaaaatttgatttaaaagagagatttaatgataaagtgg

SEQ ID NO: 2745 - DNA, 380 bp, Artificial Sequence
  chemically treated genomic DNA (Homo sapiens)
tatattttattttattatttgttttttatagttttgtaaattagtaaatttttataagatatataggttgagagtgtgaagttagttagaaaagttatgtggaaatgtatatttattttagagtagttggatttatatttaatatggtaaattaaaatgatgtaggtatttattttttttttttggagtttttaggtttttaaaatttaatattttattgttgatttgtttaaaatttttttaggtgaggtgaattttgagggtattttatttaattatatagttagaggagggtggggttttataagattagattttaaatgttggggtttttgtgggtttttaggttgttgggagtagaggtgaattgttttttgttt

SEQ ID NO: 2746 - DNA, 380 bp, Artificial Sequence
  chemically treated genomic DNA (Homo sapiens)
gaatagaaggtagtttatttttgtttttgatagtttgggaatttgtaagagttttagtatttgaagtttggttttgtgaaattttatttttttttggttgtgtgattgaatgggatgtttttgaggtttattttatttgagagggttttgggtagattagtagtaaggtgttaaattttagaagtttgaaaattttagaagagaaaggtaggtatttgtattgttttgatttgttatgttaaatgtgaatttggttgttttggaatagatgtgtatttttatgtggtttttttagttggttttatgtttttaatttgtgtgttttgtggagatttattgatttataagattgtgaggggtaaatagtgagatgggatatg

SEQ ID NO: 2747 - DNA, 378 bp, Artificial Sequence
  chemically treated genomic DNA (Homo sapiens)
attaaattattttgaaggttttgttagatatatgtattaattattggttattttagttgtatatttgtatggagaggagaatttggtgtttttaaattgattttggttggtaaagtgggaaagtagaaggatagggtggtaggttaaggggaatttaatttagaagtggttatgtggtatttatggttttgtattggttaggtggaagaaggaggaattatgtaagatttaggtgagggtgtataattatttttagttttttagttttgttttttgttttttggagtttatgtagttggataaatttgttgagttgtaatgtgaagtaattttttttgggagggggaaggttttagggtgaatttaagttaattttag

SEQ ID NO: 2748 - DNA, 378 bp, Artificial Sequence
  chemically treated genomic DNA (Homo sapiens)
ttggagttggtttggatttattttgaagtttttttttttttggggaaagttgttttatgttgtagtttagtaggtttgtttagttatataggttttagaaaataagaagtaagattggaaagttggggatgattgtatgtttttgtttgaattttatgtggttttttttttttttatttggttagtgtagagttgtgggtgttatgtggttatttttggattgggttttttttggtttgttattttgtttttttgtttttttattttgttagttagagttaatttgaggatgttaagtttttttttttatataggtgtgtagttgggataattaatgattaatgtatgtgtttggtagggtttttagggtaatttgat

SEQ ID NO: 2749 - DNA, 469 bp, Artificial Sequence
  chemically treated genomic DNA (Homo sapiens)
ttgtattttattattttttttttaattattttagtgtagtagatgtaagtagagttttatgtaattatttgagataaggatgaagaattgaaagataaataagtgatttattttaatggatttgttttagataggagaaatttgtaattttttttaggtgtgttttatggatttatagtggagtgaattatagatttgtataagttttgaaattgtgggtaattttatagtttttagattggttttttgtaataggtagttagtttttattgggttttttggatttttattttaaaaatggagaagatagattatagttattgattagggattgtgggaggtgttatgtgatggtgaggtattatgttagggagttgagttttgatttttttgttgggtgattttttatttttgggttgttagatttattttttggatgttgtgagtagatgttttatattagtattat

SEQ ID NO: 2750 - DNA, 469 bp, Artificial Sequence
  chemically treated genomic DNA (Homo sapiens)
atggtgttggtgtaggatatttatttatggtatttaggaagtagatttagtagtttagaggtggagaattatttagtaggaaggttagagtttagttttttagtatgatgttttattattatgtggtattttttatggtttttggttagtggttgtgatttgttttttttatttttgaaatgggagtttaaggggtttagtgagaattgattgtttgttgtgagaagttgatttgagaattgtaaagttatttatagttttaaggtttgtgtaagtttgtgatttattttattatgggtttatgaagtatgtttaagagaaattataggttttttttgtttgaagtaaatttattaaagtgagttatttgtttgttttttagttttttatttttattttagatgattgtatgagattttgtttgtatttgttgtattgggataattggaaggagggtgataaaatgtaa

SEQ ID NO: 2751 - DNA, 231 bp, Artificial Sequence
  chemically treated genomic DNA (Homo sapiens)
ttattgttttgttatggaggaatttaaaggttattattggttatttatttaattttttgaatatgtttttttttgtttagataagtttggtttttttgttttttggatatggtaatatttttattgatttttgttagtaaagttatatgttattagtttttttagggttatatgtgtagtatggtagtttttaggtattatattgattgtaaagaagggtaggaatttttg

SEQ ID NO: 2752 - DNA, 231 bp, Artificial Sequence
  chemically treated genomic DNA (Homo sapiens)
tagagatttttgtttttttttgtaattaatataatgtttaagaattattgtgttgtatgtataattttgggaaggttgataatatgtagttttgttggtaagagttagtgaaaatattattatatttgagaagtagaaaagttaggtttgtttggataaggaagaatgtatttagaaggttggatagatggttagtagtagtttttgggtttttttatggtaagataatga

SEQ ID NO: 2753 - DNA, 334 bp, Artificial Sequence
  chemically treated genomic DNA (Homo sapiens)
aggtatggtttttttaggtgttagggttattttttttttttttagtggttgttttttttgttggtatgtagtatttgttttttagttttaagtttgtggggtagttaggagagttttgtttttggtttttgttggttttatattttttggtgagtggttttgtatggtagtttagttttggggaattttttaagggagagggtttttttttttttttaatttttttatttttatttaattttattttatattggttttttattattgttagttgttgttttgttaggtattgtggaatatttatatttttttttattatagggtttggatatat

SEQ ID NO: 2754 - DNA, 334 bp, Artificial Sequence
  chemically treated genomic DNA (Homo sapiens)
gtgtgtttaagttttgtgatagggaaagatgtaggtgttttatagtatttggtaaggtaataattggtgatggtaaagggttagtatggagtggggttgggtgagggtaggggagttagggagggaaagaagtttttttttttgaaaagttttttagggttgggttgttgtgtaaagttatttgttaggaagtatgggattaatggaggttagaggtaagatttttttggttgttttataggtttagagttgggaggtaggtgttgtgtgttagtaggaagagtagttattagaagagagagaagtagttttggtatttgggggagttatattt

SEQ ID NO: 2755 - DNA, 500 bp, Artificial Sequence
  chemically treated genomic DNA (Homo sapiens)
tatttttttttttgagatttggttaataaattaaatgttgtattttgtatatgaggaattaaagtttatttattggatttagtggttttagtgtaggatatttttgtgtgttgttatagaggtaggtatgtaatttagaaaaaattgaaataggtaatttgttatgttgatagttataagagaaagattttgtgttaatggtatgtttttaattgtgtattttttttatttatagtttgtttattagagttttgagtaggttgtttattaggttgggagtgttgatttagaagatagatgatttttagtatatgtaaattgagtattgtaaaagttattttttatttgtgttagtagtttatagttagtttttagtagttttgtgttttagttgtaaatattttattagattaatgtatttagtataggtagaaaatttgatttattatagttatagtaatgaatttttattatgatgatagttttaattatattatgtt

SEQ ID NO: 2756 - DNA, 500 bp, Artificial Sequence
  chemically treated genomic DNA (Homo sapiens)
gatatgatgtggttgaagttgttattgtaatggaaatttattgttgtagttatggtaaattgagttttttgtttgtgttgaatgtattagtttaatgagatgtttgtagttggagtgtagggttgttggagattaattgtgagttattaatatgggtggaagatagtttttgtaatatttggtttgtatgtgttgaaagttatttgttttttgagttaatatttttgatttggtaaataatttgtttagggttttggtgaataagttgtaggtaagggagatgtataattggaggtgtgttgttgatatgggattttttttttgtaattgttagtatgataggttatttgttttagttttttttgggttgtatgtttatttttatggtaatgtataagagtgttttgtattaaaattattgagtttagtaggtaaattttagttttttatatgtaaagtatagtatttaatttattaattagattttagaggggaaaatg

SEQ ID NO: 2757 - DNA, 442 bp, Artificial Sequence
  chemically treated genomic DNA (Homo sapiens)
agtaataaaattgaatttttagtttgtttggtattagttatgtgttttttagatgttggaagaggagtgaaggaggattagaaatttttttattttaatgatggtttttttttttgtgttttattttatttttttgtttttagttatttttagtttttaatttgggttttatatttattttggttttagagtatagatttttttgtagttgggttggtgtgttgtggtgttgaggagttgtggtgtgttttttttattgtgattgtttatttgttaggtgttatgtgtgggtgatgttattgggttttatgtttttattgttgttatttgtttatgtgagttgttttttttttattgtttttgttttttttattatggagaaaattttgtatgtttttttttgtgaaaagtagagtttttttttttttattattattagttg

SEQ ID NO: 2758 - DNA, 442 bp, Artificial Sequence
  chemically treated genomic DNA (Homo sapiens)
taattggtggtaatgagaaaaagagaattttgttttttataagggaaaatgtgtaagattttttttgtagtaggggaggtgggggtgatgggaggagagtagtttatgtaggtagatagtggtgatgaaagtataaagtttagtgatgttgtttatatgtggtgtttggtaagtgaataattgtggtgagaggggtgtgttgtagttttttaatgttgtaatgtgttggtttaattgtaggaaggtttgtgttttggagttagggtaaatgtaagatttggattggagattagaaatggttagggatggggaggtggggtgaagtataggggagagaattattgttgaggtgagggggtttttgatttttttttgttttttttttggtatttggagggtatatagttaatgttgggtagattgagagtttaattttgttgtt

SEQ ID NO: 2759 - DNA, 386 bp, Artificial Sequence
  chemically treated genomic DNA (Homo sapiens)
tttagagaaagtgtgggaaaatttatatttttgtattgttatttgaatatagaaaatataggaggaaaatgagttgttattttaatttttatgatgttttgttgtttagtataattttatagtgtggttttgggtttattggtttatattttgatagataattaagaaagtagtagttttttttagatggtttttttttatgatttgtattttagttagaggtgattagttataaaaaaaatatgatggaaagatggtaagaagttaattagatggatggatggttgattgatagttttttggtattatgattttagattttagattatatagtttggtagttttttataagaattaatttttttgtaggttggtaaagttgttaa

SEQ ID NO: 2760 - DNA, 386 bp, Artificial Sequence
  chemically treated genomic DNA (Homo sapiens)
ttaatagttttattaatttgtaaaaaagttggtttttgtagaaaattgttaggttatgtagtttgaaatttggagttgtaatattagagagttgttagttagttatttatttatttaattggttttttattatttttttattatgttttttttataattggttgtttttggttaaaatgtaaattatgaggaagagttgtttagaaaaagttgttgtttttttaattatttgttagaatatggattagtggatttagggttgtattgtagagttatgttaagtagtaaggtattatgggaattggagtgatagtttattttttttttgtgttttttgtgtttgaatgataatgtagaaatatgggtttttttatattttttttgaa

SEQ ID NO: 2761 - DNA, 300 bp, Artificial Sequence
  chemically treated genomic DNA (Homo sapiens)
ttgagttgtgaagtgttgaaattgattaagaaatgaaggtagaatgtttgttttttgggagaataattagttagtttatgttgttgttatttttggttgttgattggaatgtagttgttaaggtagttgtttaattgtttgtttaatttgaaaggatattgttaaatggtaaatattttttataataatattttatttttgttaagaataataatagtgtattttattgagttttaatggtgtgttaaatatgatagatttattattaggtaggtttataatttggattgaatatggatg

SEQ ID NO: 2762 - DNA, 300 bp, Artificial Sequence
  chemically treated genomic DNA (Homo sapiens)
tatttatgtttagtttaggttgtgaatttgtttagtaataaatttgttgtgtttggtatgttattggagtttaataaaatgtattgttattgtttttagtaaaagtaaaatgttgttatagaaaatatttgttatttggtagtgtttttttaagttgggtaaatagttaaatagttgttttaatagttgtattttaattggtagttaagagtggtagtaatatagattggttgattatttttttaaaggatggatattttgtttttattttttgattagttttaatattttatagtttag

SEQ ID NO: 2763 - DNA, 441 bp, Artificial Sequence
  chemically treated genomic DNA (Homo sapiens)
agtattttattatttttttatttgtgtttttgttttttaggagggttaattgttgagtttaggtttttagaagggtattgaattgttttagggtttgttttagttgagttatttggtttgagaatttttgttttgaaagggttatttggttgattaggttttttaaatagttttgtgtttggaatatattgtttttttattgtttttagttggtatgtagggtttgtatttttgtgtgtatgagtttatatttattggtagttgtgttttgttttattttgggagttagtgattttattttgttgagatggtttgtattaatttttttggaatttattagtttttgtaatggaatattattatggtaattgaagagtttgtgagttatttggattgtaagtttttaattgtgtatatagggggattttgttttgttaggaa

SEQ ID NO: 2764 - DNA, 441 bp, Artificial Sequence
  chemically treated genomic DNA (Homo sapiens)
tttttggtaggatagggtttttttgtgtatatagttgaaaatttgtagtttaagtgatttataggttttttagttattatggtgatattttattataggagttgatagattttagagagattggtgtaagttgttttagtagagtggagttgttggtttttgaagtgaaatagaatataattgttagtgggtgtgagtttatgtatatggagatgtaggttttgtgtgttgattggaagtagtgggaagatagtgtattttaaatgtagagttgtttggagaatttggttagttagatggtttttttggagtaggaatttttaggttaagtggtttaattggagtaggttttggaatagtttagtgtttttttgaaaatttgggtttagtagttaatttttttggaaggtaagaatatggatgaggagatagtggaatgtt

SEQ ID NO: 2765 - DNA, 311 bp, Artificial Sequence
  chemically treated genomic DNA (Homo sapiens)
aaaagtgttgtttatttttgttagtgggttagtagattttttagtgttgtttgttttttttttgttttttttaggatgtttttgtattgttgttgtagagttgtagttttttgaatataggaatttttgtttataatttttttggtattggttgagaaggtagtgattgtgttgtttagtgattttagggtttggtagagattttaagaagagtgtgagaagaatgtagtgaaagtataggagttaatgaggtttgtatttttttttgatattgattattgtaaaatatttttttttagttataataaata

SEQ ID NO: 2766 - DNA, 311 bp, Artificial Sequence
  chemically treated genomic DNA (Homo sapiens)
tgtttattatgattgagggaaaatattttgtgatgattggtgttaaagaaaaatgtaggttttgttggtttttgtgtttttattgtattttttttgtattttttttaggatttttgttaggttttggagttattgagtagtgtgattattgtttttttagttagtgttaggaaggttgtgaatagagatttttgtgtttaggaggttgtggttttatagtagtaatatgaggatattttaaggagggtgaaggagagatagatggtgttggagaatttgttggtttattggtagaggtgagtagtattttt

SEQ ID NO: 2767 - DNA, 454 bp, Artificial Sequence
  chemically treated genomic DNA (Homo sapiens)
ggaaaagggttgtttttgatagaagggatattttaagagtagtttaggaattggtgtatttgggtggttttggaagaagttggggtttttggaggtggaggtgaggtttgggatttaataagaagggtgtggttagagaggaggggttggttaaaagtttttgaaataaggtttaggtagaattgtggttttagttttttagttttagtttggtttttgggtttgttgtggtgtttttgttttttgtaggattggttgtagtatggatgtttttaggtggtttttgatgtttgtgtaattgatgtagttaaaagtaatgttagtggaggtgtttggttatttttttaagtggtttttttggttttattttgagtttttgaagaatttgaaggtagtttgttttgaggtttggttggtggaaaagatttttggtgagtggattaagaaggggtag

SEQ ID NO: 2768 - DNA, 454 bp, Artificial Sequence
  chemically treated genomic DNA (Homo sapiens)
ttgtttttttttggtttatttattgaagattttttttattagttaaattttaaggtgaattatttttggattttttaggaatttagagtggaattaggagaattgtttagggaggtgattgagtatttttattggtattgtttttggttgtattagttgtatgagtgttggaaattgtttgggagtgtttatgttgtggttggttttgtaggagataaggatattatagtaaatttaaaggttgagttggagttgggagattagaattgtggttttgtttgggttttattttaagggtttttggttagttttttttttttagttgtgttttttttattgggttttaggttttgtttttgtttttaggagttttggttttttttgaggttgtttaagtgtattggtttttgggttgtttttagagtgttttttttgttaggagtagttttttttt

SEQ ID NO: 2769 - DNA, 498 bp, Artificial Sequence
  chemically treated genomic DNA (Homo sapiens)
gaggggtgtagtattgaggtttggggtttgggagggggttttatatgtgggaggaaatggagagagatggtgaggattgtttttggaggtgggtgaggtttagtgtgtgtgtttaggtaagtaggtaagaatgtagtagttgttaggtttaggtgtgggtgtgttttgtttgggtgatttagtttgtgttaggaagtgggagttggtttagttttttagagtttttggatagtagttggattttggttggtttttggggtattaggatagatttttgtggttagtagtttggtttggggggtggaatattttttttttgttttgttttatttttttttgggttgtaattattttagtttattgttgggatgtggttgtgggtgttgagagtgttgttggtgttgtgggggttattttggttttggttttgatggtgttttaggatttgtgatagttgtaagtagtgattatgggggttaggagagtttaagaagtggg

SEQ ID NO: 2770 - DNA, 498 bp, Artificial Sequence
  chemically treated genomic DNA (Homo sapiens)
tttattttttggatttttttagtttttatagttgttatttatggttattgtaggttttggggtgttgttggggttaggattgggatggtttttatggtgttggtagtgtttttggtatttgtggttatgttttagtgatgggttggggtggttgtggtttggaggaaggtggggtgggataagaagagagtgttttgttttttaggttgggttgttagttgtgggggtttgttttagtgttttaggagttggttgggatttggttgttgtttgggagttttggagagttgagttaatttttgttttttggtatgggttgagttatttggatgggatgtgtttgtgtttgggtttggtggttgttgtatttttatttgtttatttgggtgtgtatgttgggttttatttatttttgaaggtaatttttattgtttttttttgtttttttttgtgtatagggtttttttttgaattttagattttagtgttgtatttttt

SEQ ID NO: 2771 - DNA, 417 bp, Artificial Sequence
  chemically treated genomic DNA (Homo sapiens)
tagttggagaggagatttgatgatttttttggtggagggtggttagggaaggagtggaagagagagttggggagaggaaattgtggttataaagaggaagagagaggtagagttggaggtgatattaggggagagagaggagtgggtttggtgatggttatgttgggtgaggtgtggagagtatagttgtgttatttattagttgtttttagtttagataatttttgtgtttattttatttttgtttgtttattgtttttgttgggttggatatttttattattatggttattgttgttatattgttggttgttattttttgttttatttttttttttgtttatgatatggtagaaggtggtaagggaagtagttgttttttgttagtagtttttttgttattgaaggttgaagttg

SEQ ID NO: 2772 - DNA, 417 bp, Artificial Sequence
  chemically treated genomic DNA (Homo sapiens)
tagttttagtttttagtggtagggaggttgttggtggagggtagttgttttttttgttattttttgttatattatgagtaggaaggaagatgaggtaagaaatagtagttgatagtgtggtaatggtgattgtggtggtaagggtgtttaatttggtagaggtgatgggtagataaaaatgagatgggtataggaattgtttgagttggaggtagttgatagatagtatagttgtgttttttatattttgtttagtatggttattgttgaatttattttttttttttttttgatgttatttttagttttgtttttttttttttttttatggttatagttttttttttttagtttttttttttattttttttttggttattttttattagggaggttattaggttttttttttagttg

SEQ ID NO: 2773 - DNA, 464 bp, Artificial Sequence
  chemically treated genomic DNA (Homo sapiens)
tttttgttttttatttaagtaggttttagggtttatggtaagatgatttttttggggagaaagagtttgagatttagaaatttaatttgtataatgaattttggtttttttttttttttagggatttgattttttttttttttttttttttttttttgttataggattttatgttttattttagtgtagtttggttgattgatgttttattttttatatgtattgatatgatgtgtgattgtttaggtatagttggagaagttggagaagatagtattttatttttttttttagaattaattattgattggagggttaatgttttaattttgatgtgatttagtaggttatgtgagggttgtttttaataggagtagtgtttttttttttttgtgtagtttttgatttagtttggtatgttttttggtgatattgttgtttgttatatggtttagtgttgtaaa

SEQ ID NO: 2774 - DNA, 464 bp, Artificial Sequence
  chemically treated genomic DNA (Homo sapiens)
tttgtagtattgggttatgtggtgagtagtagtgttattaggaaatatgttgagttgggttaggaattgtgtaaggaggaggagatattgtttttgttgaaggtagtttttgtatgatttgttgaattatattaaggttgaagtattggttttttaattaatgattagttttgggagaggggatgaggtgttgttttttttaatttttttaattgtgtttgaatagttatatgttatgttagtgtatatagagaatgaagtattagttaattaaattatgttggagtggagtatagagttttgtgatagaagaggaggaggaagagaaagaagaattagatttttaaaggagggaaaaagttaggatttattatataaattaaatttttaagttttaggttttttttttttaaggaaattattttgttatgagttttagggtttgtttgaatggagagtaagaa

SEQ ID NO: 2775 - DNA, 443 bp, Artificial Sequence
  chemically treated genomic DNA (Homo sapiens)
gagtttattttggattttttattgagaataggatgttttgttaaggatgggtaaagaggggtatagtagaaagataaaaggatgtgttagttataaaaattatgtgggttaaggatagggggttgtaatgtaaagattggaatttgtagtatggtaaattagagtgtggtaagattagtgttttagattttagataaggttatttttttttttaggaaagatgatttttttattaatataagtgtttggtgttttttttttttgtttaggtgttttggttggaatgaggaaatttaaaagtgttatgaaagaataaaagtggtttaaattttgaaaatttttaaaattaaaagattgtaatttaaaggaagataaagagtatgatttttaatttttttaagttattttatttatttttagtgttaaaaatttaatgttagttt

SEQ ID NO: 2776 - DNA, 443 bp, Artificial Sequence
  chemically treated genomic DNA (Homo sapiens)
agattggtattgggtttttggtattgaaaatgaatgaagtagtttggagaaattaaaagttatgttttttatttttttttgagttataattttttaattttaagaatttttagaatttgggttatttttgtttttttgtagtatttttgagtttttttgttttagttaggatgtttggatggaaaagggaagtgttaagtgtttgtgttggtgaggagattgttttttttggagagggaagtggttttgtttggagtttgaaatgttaattttgttatgttttagtttgttgtgttgtaagttttagtttttgtattgtagttttttgtttttggtttatgtggtttttgtagttggtatatttttttgtttttttgttgtgtttttttttgtttatttttgataaaatattttgtttttagtgaaagatttaggatgaattt

SEQ ID NO: 2777 - DNA, 189 bp, Artificial Sequence
  chemically treated genomic DNA (Homo sapiens)
ttagtttttaagatggtatttgttggaggtggtaggtagaggttttaagtgtggattttaatttttgtggggattgaatttttgtggttgttgtttgtttaggtatgtttgttttttatgaattttttttatttatagggttttaaattttatgttggtgggaggaggaaggagattgggtataattta

SEQ ID NO: 2778 - DNA, 189 bp, Artificial Sequence
  chemically treated genomic DNA (Homo sapiens)
tgagttatgtttagttttttttttttttttgttggtatgaggtttggggttttgtggatgaaggaagtttatgggaggtaaatgtgtttgggtaagtaatagttgtagagatttagtttttatgggggttagaatttatatttagggtttttgtttattgtttttagtaaatgttattttgaggattag

SEQ ID NO: 2779 - DNA, 367 bp, Artificial Sequence
  chemically treated genomic DNA (Homo sapiens)
ggagaaagaggaatttgtaaggtttaagtggatggtatggatgtatgtaatgaagattgggaagtagattttgggtgggagagttgttttaagtagaaaaatagttaatttaaatttatttttggttgagtttgagtgttagagtaaggtagggaagagtgtttggaatgttgagttagtttaggttgttgtaggttgtattgtatggattttagtattagtaatgtgtgtatagaaaagttggttttttttgttgttattgattgtttattaaagtgaatttgggtagtgttgattttgttgttgaaagtatttgattttttgttgtatggattttttttttagggttaattgtgattgtagattt

SEQ ID NO: 2780 - DNA, 367 bp, Artificial Sequence
  chemically treated genomic DNA (Homo sapiens)
aagtttgtaattatagttggttttagggaaggaatttatgtagtagaaaattagatatttttaatagtagagttgatgttatttagatttattttggtaagtaattggtgataatggaaaggattggtttttttgtgtatatattgttggtgttaaggtttatgtagtgtagtttgtagtagtttgggttggtttagtattttgggtatttttttttgttttgttttgatgtttaggtttagttagaggtagatttgagttggttgtttttttgtttagagtagtttttttatttaggatttgttttttggtttttattatatgtatttatgttatttgtttaggttttatagattttttttttttt

SEQ ID NO: 2781 - DNA, 309 bp, Artificial Sequence
  chemically treated genomic DNA (Homo sapiens)
ttttattttttttttaggagtgtgtttttagttttgtatttgttttttttatttttagtgtatttttgttgtaggtattattttttgatttgttatgttatttgtttttttttttattgtatttatgttttattatttgttttggtttgtataatgttagttttgtaaggggtttttttaaggttttatttttaattgattaatgttgaggatggggagtaatgtgtgtattagagggggttgggtatatgtaggtttgttgttggatggaggagaggtagtattttttgtatgtttgggtggttttta

SEQ ID NO: 2782 - DNA, 309 bp, Artificial Sequence
  chemically treated genomic DNA (Homo sapiens)
tggggattatttaggtatgtaggggatgttgttttttttttatttaataataagtttgtgtgtgtttagttttttttggtatatgtattgttttttatttttggtattgattaattgaaaataagattttggaagaattttttgtaaagttgatattgtatgagttaaggtaggtaataaagtgtagatatagtgagggagggggtggatggtatgataagttagagggtgatgtttgtggtggggatgtattgagaatagagagggtaggtgtggggttggagatatatttttgagagggagatggga

SEQ ID NO: 2783 - DNA, 379 bp, Artificial Sequence
  chemically treated genomic DNA (Homo sapiens)
ggtaaagttgagattttagatggttttgtgggtgagggtggaagaagggaagagttaggggttgtttttatttatggtttttagttattggtttggaattttgtgtttattttgtgttagggttgaatttggggatttgagggttttaggttgttgtggtgattaatgtgtgaaggttgttgttaaaattgggtatggtttggttgtaaaggtgtggatggggtttgttttgtttttttttggatttttattttgattgtttttatagaggaaaggaagtatttttaagggaagaaaggtaaaaagagtttattttggttttttttgggggggggttttagtattttaatgagggtgtggtttttattattagggtaga

SEQ ID NO: 2784 - DNA, 379 bp, Artificial Sequence
  chemically treated genomic DNA (Homo sapiens)
tttgttttggtgatgagggttatatttttgttaaaatgttaaggtttttttttaagaaaagttagaatgagttttttttgtttttttttttttagaaatatttttttttttttgtgaggatagttaggatggaaatttaggaaggagtagaataaattttgtttgtatttttgtagttaggttatgtttgattttggtagtggtttttatatattagttattgtgatagtttgggatttttggatttttggatttggttttggtatggagtgggtgtagggttttagattagtagttagaggttatggatgggggtggtttttaatttttttttttttttgtttttatttgtagggttatttggggttttagttttgtt

SEQ ID NO: 2785 - DNA, 405 bp, Artificial Sequence
  chemically treated genomic DNA (Homo sapiens)
ggagtaattttgatttggagagttatgtatatattttatgttaaggaggtgatgaaagttttattttttatagtgatgatatttggaagaagatataattgttattgtgagttttttaattatttttggagattaagtgtgagatgtagtagtgtaggatgattggattatgtaaaatgagatagatgttatttgtgagttatgtgtaagttgttaagtgttaaaatgaatatttttattaaatgatggagtttttatattatttgtagtttggttagatttgaaagatgagttgattgtttttagatagtgtggtaaataggtagggatttggaattttttttggttgtatgagtaattattgttttatatttaaattagaaatatgggtttttagttaggttt

SEQ ID NO: 2786 - DNA, 405 bp, Artificial Sequence
  chemically treated genomic DNA (Homo sapiens)
agatttaattgaaaatttatgtttttaatttaagtatgagatagtaattatttatatagttagagaggattttaagtttttgtttatttgttgtattatttaaaaataattaatttattttttaaatttgattaaattataaatggtatgagaattttattgtttaataaggatgtttattttggtatttagtagtttatgtgtggtttatagatggtatttgttttgttttgtgtaatttaattattttgtattattgtgttttatatttagtttttaggagtaattgaaaagtttatggtgataattgtgtttttttttagatgttattgttataaggagtggggtttttattatttttttgatgtaggatgtgtatatggttttttaggttagagttgtttt

SEQ ID NO: 2787 - DNA, 393 bp, Artificial Sequence
  chemically treated genomic DNA (Homo sapiens)
ttattatgtagtatttaggtttggattttagttagtagtattagtttttttttatttttgggtagtgatattgttggtgtagattgttttaggtgtgtttttgtttagttttattgtttttagttttagtttgggtttgtttttagtttgttggagttgttggatgtgtttaggtttttaggtattttggtttttttttatttgttttgtgaagattgagggaaagtagatgtgtttttgtggtaatttggagtttgtagtttgtagggattttattgttttaggtgtaggtgtgtatatgttagttgtagaaaatattatattaaattagtttgagggagttaaagtaaattataatattttaggtgttagagatttttttattatagaatt

SEQ ID NO: 2788 - DNA, 393 bp, Artificial Sequence
  chemically treated genomic DNA (Homo sapiens)
aattttgtaataggagagtttttgatgtttgaaatattatagtttgttttgatttttttagattggtttggtgtgatattttttgtaattggtatgtatatgtttgtatttggggtggtggggtttttgtgggttgtaggttttgggttgttgtggagatgtgtttgtttttttttggtttttgtggggtgggtggggggaggttagggtgtttggaggtttgaatatatttaatagttttagtaggttgagggtgagtttaagttggggttgaggatagtagagttgaatgaagatgtatttgagatggtttatattagtggtgttgttgtttgaaagtgagagaaggttgatattgttagttggaatttaggtttgggtgttgtatggtgg

SEQ ID NO: 2789 - DNA, 378 bp, Artificial Sequence
  chemically treated genomic DNA (Homo sapiens)
tgtaaggtattattatagattttttattttttttttttgtttattagaatgttaataagagatataatatttagaaaatagagagtagagatttttttggattaaatagtattttttttttttgtttttgtttttttgtgatttaagggagaaatgattttttttttttaagtgattttatttttttttgttaagaatttgtggatatgttatttggttagagtttagtttgtagttattatgtaggtaatttatttatgttagattataatttatttaatttgtttgtgttttagttaaatgtgtattagagtaaaagtttagatttgattatgggtaagtttaatgattaatataagttatttaggtttttttttt

SEQ ID NO: 2790 - DNA, 378 bp, Artificial Sequence
  chemically treated genomic DNA (Homo sapiens)
gaggaaaaagtttgagtggtttatgttaattattaaatttatttatggttaggtttgaatttttattttggtatatatttggttgggatataaatgagttaggtgagttatagtttaatgtgagtgagttatttgtgtggtggttgtaggttgagttttaattagataatatgtttatggatttttgatagagagaaataagattatttagaaagaaaggattattttttttttgagttataaggagatagaaatagaaaaaaaaggtattgtttgatttagaaaagtttttgttttttgttttttaggtgttgtattttttgttaatgttttggtgaataaaaggaagaaatgggagatttatagtagtgttttgta

SEQ ID NO: 2791 - DNA, 351 bp, Artificial Sequence
  chemically treated genomic DNA (Homo sapiens)
ttttgttttttatagtttttagttttaaatttttaaaatgttattaagtattatatttaattttataataaatttatattttaggtaggatgttgtttataggatttatgttgggtgatgtttgggtgatttaaatagggaaataatatttttttaagttatattagtttttaatggtgttattggttatgtgtagagaggtaaatttatgagtagtattggggagttaatgaatggttggttagatggtgtttgttagaaggtgttgattttttagataattgggattgttttttgggagtaaatgagaggtgtagtagggatggattgtattttaattatatagaaata

SEQ ID NO: 2792 - DNA, 351 bp, Artificial Sequence
  chemically treated genomic DNA (Homo sapiens)
tgtttttgtgtgattgagatgtaatttgtttttgttgtattttttatttatttttaggaaatagttttagttgtttaaaaagttaatattttttgataggtattatttggttagttgtttattaattttttaatgttgtttatgaatttgtttttttatgtgtgattagtgatattgttgagagttaatgtggtttaaaggaatattgtttttttgtttggattatttaggtattatttagtatgagttttatgggtaatattttatttgggatgtaagtttgttataagattaaatgtaatatttgataatattttggaaatttgaagttgagggttgtaaagagtaaaa

SEQ ID NO: 2793 - DNA, 435 bp, Artificial Sequence
  chemically treated genomic DNA (Homo sapiens)
ttggtattttgatttttagttagagttgatgaggattgtatggtaggtaggttaatttagataattgtatatttagtgagtatgattatttaggaaaataaggaaaagttgttggatgattgaaattagattgttatttttttgggttttatttgtatatagattgtagttgtaatgattttttatttgatggttggttgtgttattgttagttgatagttgttttgtatttagagaggattgggagtgatttaggttagggagtttggttttttttttaaattgtgtgttaattgaggagtggggatttgtgttagttttgtgattagttttaaatgtgagttggggagttatatagtattagtgtggtgagttgtttgtataggttttagttagataaattatagtaagtatttttttttttgttttagtttt

SEQ ID NO: 2794 - DNA, 435 bp, Artificial Sequence
  chemically treated genomic DNA (Homo sapiens)
aaggttaggataaaggagaggatgtttgttatggtttgtttggttggggtttgtgtgagtgatttattgtattgatgttgtgtgattttttagtttatatttaaggttggttatggggttggtgtagatttttattttttagttagtgtatggtttaaaggagaaattagattttttgatttaaattatttttagttttttttggatgtgggatagttgttgattagtagtgatataattagttattaagtggagaattgttgtgattgtagtttgtgtgtaggtggagtttgggagaatgatagtttaattttggttatttaatggtttttttttatttttttaaataattgtgtttgttaagtatatagttgtttggattagtttgtttgttatgtagtttttattaattttggttggaaattagggtgttag

SEQ ID NO: 2795 - DNA, 423 bp, Artificial Sequence
  chemically treated genomic DNA (Homo sapiens)
tttagattaatttttttgtagtgattttattgggaggttgtattagtatttagatatttttatatattgaggaaaaatagatagttgtgtttaaggattttagagggtttgttattatttatttataatttttttagaatttatgagttttaggtttttattgtagtggtaagtgttgagtgtttatgggggtgtgtgtgggataggatgtggtttgagttttgtgatttttattttgattttatgtgttgggaatttttgtagttttgtgattggtttgtgggggtttgggttaagtttttgttaagatattaaaagattgtagaggtgggtaaagattttaggtttttagattagtaatttataaatattagttatgattatatagttaagggttgtttatttgttttttttttttttagt

SEQ ID NO: 2796 - DNA, 423 bp, Artificial Sequence
  chemically treated genomic DNA (Homo sapiens)
gttaggagaaggggaagtagatggatgatttttaattgtgtagttatgattagtgtttgtagattgttagtttgggggtttgaggtttttgtttatttttgtagttttttggtattttggtagggatttagtttaagtttttataggttagttatagggttgtaaggatttttgatgtatgaggttggggtgaggattatagaatttaaattatattttgttttatatatatttttgtgagtatttagtgtttattattgtaatgaggatttgggatttataagttttgggaaaattataaatgggtgatagtaagttttttgaggtttttaaatatggttgtttgtttttttttaatgtatggaagtgtttagatgttgatgtaattttttagtaaagttattgtaaaagggttggtttaga

SEQ ID NO: 2797 - DNA, 464 bp, Artificial Sequence
  chemically treated genomic DNA (Homo sapiens)
tagtttgttaatagttgtttaggttttttatgggattgtgttttattgagtatttgaagaaagtatttattggaaatgggtttttttgggagattgtttggattttgagtgtttggtgtttatgtttttatatttggttgttgttttttgtttttttttggttgtaggtgtgagtgtttgtttgtttaaattttgtttagtattgtttggaaaaataaaataatatggttatttgtttgggtattgaatgttttttttgaattttggttttgtttattggtttagaggtggaatgggtggggtaagttttggtgtgagtttgggaagttttgagaagatgttatgggttgggtttgttaggttggggttgtttttggttttaatttttttggaatgttttgagggttaggagtgttgttattgatggttatgggagttgttaggttgtggtttttttttttata

SEQ ID NO: 2798 - DNA, 464 bp, Artificial Sequence
  chemically treated genomic DNA (Homo sapiens)
tgtgagaaagagagttatagtttgataatttttatagttattaatggtaatgtttttgatttttaagatattttaaaaggattaaaattaagagtaattttaatttaatagatttagtttatagtgtttttttgaaattttttaaatttatattgaaatttgttttatttattttgtttttgggttaatgggtaggattaaaatttaggaagaatatttaatgtttagataagtaattatgttgttttgtttttttaagtagtgttgagtgaggtttaaataaataagtatttatatttgtagttaaggaagggtaagaagtagtagttaggtgtgggaatatgaatgttagatatttgggatttagatagttttttaggagagtttatttttagtgaatattttttttaggtgtttagtgaagtgtagttttatggggagtttgggtaattgttggtaagtta

SEQ ID NO: 2799 - DNA, 499 bp, Artificial Sequence
  chemically treated genomic DNA (Homo sapiens)
ttttttttttttttatgattatgttgtgattgtgtttgtggttattatttgatgtatttttatttttatttgaatttaggagttgaatgttagattggggaagtgggtgttgtgtgtgtgggtatagaaatattatgaagattatttttttgattttaagtaatttagtttttaggtgtattgttaaatttttgttttgtttattgtggattggatatttttaaggaattatatatgtattaagatttggtaagattttttattttttttggttgtttggtatttgtttttaggtagttggatgtaaataggtggtttgttttgtttggtggtgggttttgtggattttgatttgtttattgttttgttgttttttggggtttttaaagaattttttgtgtttttatttttttttttttttatttttatttttagttgtgggagggtgaagggagggttaatgtgtggtagtggtttttgtattatttttttatagtag

SEQ ID NO: 2800 - DNA, 499 bp, Artificial Sequence
  chemically treated genomic DNA (Homo sapiens)
ttattgtggggaggtaatgtagagattattattatatattggttttttttttatttttttgtggttaaaaataaaaataaagaagagaagaaatgaaagtataaggagttttttaaaagttttaggagatgatagagtagtgagtagattagaatttatggagtttattgttaggtagagtgaattgtttgtttatatttggttgtttgggagtggatattaggtaattaagagagatggggaattttattaaattttaatatatgtgtggttttttgagaatatttaatttatagtaaatagagtaggagtttaatggtgtgtttgaagattggattatttagaattgggaaaataatttttatggtgtttttgtgtttatatgtatggtatttatttttttgatttagtgtttggtttttgggtttgggtagaaatgaggatgtgttgagtggtgattgtagatatgattatggtatggttatagagagaggaagga

SEQ ID NO: 2801 - DNA, 422 bp, Artificial Sequence
  chemically treated genomic DNA (Homo sapiens)
ttattatttaaggttagttgtttgatttttttttagtgttttgtttatagggtttgaatatttataaatggaaatattagttaattagaaattattgttagggttttttgatagtgttttaggtttttataatttggaatgttttgtaatatttaatatgtaagtatgttgaattattttttagatagaatttgaatttttgtgttttttagttttttttttttttttatttttttttaatatggaatttgaaaagtgtgaaaaaagaagtttattaaataagaatttagaggagaaattgatggtaagatatgagatttagtatatatagatttataatgaaattgatagggtagtagagtaattgttatagattggaaaagttgtgttagttggtttttgtttttatgttttgttggtta

SEQ ID NO: 2802 - DNA, 422 bp, Artificial Sequence
  chemically treated genomic DNA (Homo sapiens)
tgattagtaaaatatggaaatagaggttggttagtataatttttttagtttatgatagttgttttattattttgttaattttattataaatttgtgtgtgttaaattttatgttttattgttagttttttttttaaatttttgtttaataagtttttttttttatgttttttaagttttatattgaaagagaatgagaaagagagaaagattgagagatatagaggtttagattttgtttagaaaatgatttgatgtgtttatatgttagatattgtaggatattttaagttgtgagagtttaggatattattagagagttttagtgataatttttggttagttagtgtttttatttatagatgtttaaattttataaatagagtattgaagagaagttaggtagttggttttagataatga

SEQ ID NO: 2803 - DNA, 368 bp, Artificial Sequence
  chemically treated genomic DNA (Homo sapiens)
agtttttgagttttattgtaggttttagtgttagttttggaggaaattagaaaagggttgaaattattgatatagttatttttttagttttttttaatgtaggtgtatagttttttgtagtgagtagattggggtttatagggatattgtatgtttgtattgggttgttattagttttatggaaatatgtattaattgtgttattgtgtttttttgttatattgttttttttttaggttgttttggtattgtttatttaaattgtgtaattatttggtttaggtgttgtagagattgattagtagtataaggttattataagtataattgttatttggttattttagttattttttttagtattttag

SEQ ID NO: 2804 - DNA, 368 bp, Artificial Sequence
  chemically treated genomic DNA (Homo sapiens)
ttagaatgttggaggaaatagttgggatggttgggtggtggttgtgtttgtggtggttttgtgttattgattaatttttatggtatttgggttagatggttgtatagtttaaataaatggtgttagagtggtttagaaagggggtagtgtgataagaaaatatagtgatataattagtatatatttttatgaaattagtaatagtttagtgtaagtatgtagtgtttttgtaggttttgatttgtttattataggaaattgtatatttgtgttaggaggagttaaagagatggttgtgttagtggttttaatttttttttgattttttttgggattagtattggagtttgtagtgaggtttaagaatt

SEQ ID NO: 2805 - DNA, 500 bp, Artificial Sequence
  chemically treated genomic DNA (Homo sapiens)
tttgtttagtgtttttggtaattagtaagtgttgagttttttgttggtgtttttttaatttattagtgatttggtttgtaaattatttggaaaaggagtttttagagattttggtgtatagtaggttaggaggtagttgttttgggatttagagtaattttggggtaatttttttttttttaaaggttaattttagaagaggtaggtttttttttttttgatgttaatgtttattatgaaatagtaatttttaaatatttaggtgatatggagatgtgtttgttatatgttagtgttttttatatgtaatagttgaagttgtaatttgaatttttttgttaatgtgaggaagttgggatttgaattggggagataaaaggggttttgaatatgtttttggatttaatagatggttggaaattaggggtagtggagttgttaaatgtgttatgtatgtttttttgtagttttttgagtttgttattttttttagtttttag

SEQ ID NO: 2806 - DNA, 500 bp, Artificial Sequence
  chemically treated genomic DNA (Homo sapiens)
ttagaagttgggggaagtggtgagtttaggagattgtgaagaagtgtgtgtgatgtatttaatagttttgttgtttttgatttttgattatttattaaatttaaggatatgtttgggattttttttgtttttttggtttgaattttggtttttttatgttggtaggaaaatttaaattgtagttttggttgttatatgtgaaggatgttgatgtgtagtaggtgtatttttgtgttatttgaatatttaaaaattattgttttataatggatattgatattgaaggaaagaggatttgttttttttagaattagtttttggaggagggagggttgttttgaggttgttttgaattttggggtagttgttttttggtttgttgtgtgttggggtttttggagattttttttttaggtggtttgtgggttaagttattggtgggttggagaagtattaataggaggtttagtatttgttggttgttaaggatattagatagg

SEQ ID NO: 2807 - DNA, 428 bp, Artificial Sequence
  chemically treated genomic DNA (Homo sapiens)
aagtgtttttgtagtattgagaatatgatttatgggttggtttttttttttgtttttgtttgggtgttattgattttgggattttttttgaataataggttgtggagattttttataggttgttgtgtgaattttaggaaaattttttttagaggttatagttgttgttttttttatgtttttggttagattattttgagtttattggtggttttagtgatgtggttttttgtggttttgtttaatggaattttttatgaatgtgttatgagtgggatgagaagtttaggatttttggaattgatttgtaagggtaagtttaaagagtgttgggaagaattttataaagtattttgtggtaaaattagtatgttatttattgttaatgaagaattgaaattttttttttaggtttagttttaggtaag

SEQ ID NO: 2808 - DNA, 428 bp, Artificial Sequence
  chemically treated genomic DNA (Homo sapiens)
tttatttgagattgggtttgaagggagagttttagttttttattgatggtaggtagtatgttagttttgttataagatattttgtgaagttttttttagtattttttgggtttatttttgtaaattagttttaggagttttgaattttttgttttgtttatggtatatttatagaaagttttattgagtagagttatagaaagttatattattggagttattaatgagtttagagtgatttggttgaggatgtagaagaaatggtagttgtggtttttgggaaagatttttttgggatttatatagtagtttgtgaagagtttttatgatttattgtttagaaagaattttaggattagtaatatttaggtaggagtaaagaggaaaattagtttataggttatatttttagtgttgtaggggtattt

SEQ ID NO: 2809 - DNA, 443 bp, Artificial Sequence
  chemically treated genomic DNA (Homo sapiens)
gggtggttttgttgattttagagatttagggtgggggtagggagtggggagtgttaggttaggatttttttgtttgggaaggttggagaaagtgtgagaagatgttagaaggtgtgaatttgagtggtttaggtagagttggtggttgtttagatatttagggggattataggatggaaggatttgtgaggggtttttagaattgttgatagaatattttgataggttgaggagaattagatttgttttttttgttttgttagtgttttggaagttttttttttatagatttataatttttgttgtgttatttaggatgttggttatgtttggggttttgaggttggagggaattaattttgatttagaatgttgaggtttaagggaattgggaggaagtttagagaggagagtttaggtgttatatttgttagtttttatag

SEQ ID NO: 2810 - DNA, 443 bp, Artificial Sequence
  chemically treated genomic DNA (Homo sapiens)
ttgtagaaattgataggtgtggtgtttgagtttttttttttgggtttttttttagtttttttgggttttggtattttgggttaaggttggttttttttggttttagggttttgggtatggttggtattttggatggtatggtgaaggttgtggatttgtagaaagagggtttttaagatgttaataagataggagagatgagtttgattttttttagtttgttgaggtgttttgttaatagttttggggattttttatgagtttttttgttttgtaatttttttaggtgtttgagtgattgttggttttgtttgaattgtttaggtttgtattttttggtatttttttgtattttttttagtttttttgggtagggggattttggtttgatgttttttgttttttgtttttgttttgggtttttggggttagtagagttattt

SEQ ID NO: 2811 - DNA, 489 bp, Artificial Sequence
  chemically treated genomic DNA (Homo sapiens)
gagtttggttggttttagaagtaagttttttttattttatgtttgttgttggttgtttttgtgtttatttgtgtgggtattgtttttttgggttttatatttgattattattgttagagttttggggtggttgagttgagttagtgttgtggttggagttttgtggaggagttgaattatatagtgttaggtttggggtttgtgggtgaggttttttttggttagtgtaggtgttatgaagtggattggaattagagtgtttttagttgtgtagattttttggttagtttggttattaataggagttatttgttgttgggtttttgttaggatggttgggtgtatgatatgtttggtttttttattgttattgaggtaaaaaagtttttgtaatatgggagtttttgggatagggagaaatataaagtaaattttatgaagtttagttttatattaggaaagaggtagggggttatgtttattgtgtag

SEQ ID NO: 2812 - DNA, 489 bp, Artificial Sequence
  chemically treated genomic DNA (Homo sapiens)
ttgtataataaatatagttttttattttttttttgatatggaattgaattttataggatttgttttatatttttttttgttttaggaatttttatgttatagaggtttttttattttagtgatgatggaagagttgggtgtgttatatatttagttattttggtagggatttagtggtaggtggtttttgttggtggttaggttagttagggggtttatatagttgagggtgttttggttttagtttattttatagtgtttgtattggttaaggaaggttttgtttgtgggttttaggtttggtattgtatagtttagtttttttgtagggttttagttatagtgttggtttagtttagttattttaggattttggtagtggtggttaggtgtgaaatttaggaagatgatgtttatatagatgggtgtaaaggtagttgatagtaggtataagatgaggaaggtttgtttttggaattagttagattt

SEQ ID NO: 2813 - DNA, 388 bp, Artificial Sequence
  chemically treated genomic DNA (Homo sapiens)
tttttataggatatgagggttgataattattttattgtatggttttggggattgatgaataaaggttaatatgtggaaaagggtaattaaagaaagaagagttatttttaggttaattagtataagtttttttgttggtatgttttaatatattaaaatagtagtaaaaataatttgtatattggtattgaaggtatagataaatttgttgaggatttttattatggtagagggatgttttatatgagtttttagtagattaattaagtttttgttagttttatttggaaatgatgttgtttttttggggttatgtagagaagtttatgttgatgaaatgagttgttttagaatggtagtttttgggtagtagagtttgggtttaagg

SEQ ID NO: 2814 - DNA, 388 bp, Artificial Sequence
  chemically treated genomic DNA (Homo sapiens)
ttttgagtttaggttttgttgtttgggaattgttattttaggatagtttattttattaatatgaatttttttgtatagttttaagaggatagtattatttttaaatggaattagtaagaatttaattaatttattaaggatttatataaagtatttttttgttgtggtaagggtttttggtaagtttatttgtgtttttgatgttaatgtgtagattgtttttattgttgttttagtgtattagggtatattagtgaggagatttgtattaattaatttggaggtggtttttttttttttagttgtttttttttatatgttagtttttgtttattagtttttaggattatgtaatgaggtgattattagtttttatgttttgtaaaga

SEQ ID NO: 2815 - DNA, 433 bp, Artificial Sequence
  chemically treated genomic DNA (Homo sapiens)
gggaggaggtgttttgtattttataaaatgaaggttttgtgattggtttagagttgtgtggtttttagtgggtttttaagttttggggtattttaggttggtattatattattaaaaagaagtgtaaattttatttttgaagtttagttgaaggtaggtgttggtagggagagttaagaggttgtttagagagtttgggttgggagtgggagtgggataaggtgggagttaatttagttggagtagatgttagaagaagttttgtttagttgaggtgttttgttttaattttaggtttttggggattttaagaagggagttatttggtgtttttttgagtggtttttatagttttggagattttgttgttgtttaggggtgtagttgttggagtttttgggtttgttggggtttagtaggggtagtgggagtt

SEQ ID NO: 2816 - DNA, 433 bp, Artificial Sequence
  chemically treated genomic DNA (Homo sapiens)
ggtttttattatttttgttgagttttagtaggtttgagggttttgatgattatatttttgggtagtagtagagtttttaaagttgtaaggattgtttggagaagtattgggtagttttttttttggggtttttgagagtttgggattggggtggggtattttagttgaatggaattttttttggtgtttattttagttaagttagtttttgttttgttttatttttatttttggtttaaattttttaggtggttttttagttttttttgttggtgtttgtttttggttaagttttagaaatgggatttgtgtttttttttaatgatgtaatattggtttagggtattttggagtttggagatttattagggattatatagttttaaattggttgtaaagtttttattttgtaaaatgtaaaatattttttttt

SEQ ID NO: 2817 - DNA, 281 bp, Artificial Sequence
  chemically treated genomic DNA (Homo sapiens)
taggtaatttttgtttatggtgttaagttgtaaattatttgtttttagtttttagtgaatgttattgggaagtattaggataaaagttgttatttaaaaattttaattttagtttttttttggtttgggtttaaagttagaggtgattttttataggtggtatgttagtgttatttgattgttgatatattttgtgtggtggttgagaaaattggagaagaaagagttagggtagttaaaggattgtttgttaattttaagatgtgtaggatgaagaggag

SEQ ID NO: 2818 - DNA, 281 bp, Artificial Sequence
  chemically treated genomic DNA (Homo sapiens)
tttttttttattttgtatattttaaaattaatgagtagttttttgattattttggtttttttttttttagtttttttaattattatatagaatatgttagtagttagatggtattggtatgttatttatggagaattgtttttggttttaagtttagattaagagaaaattagaattggaatttttggatgatgatttttgttttgatgttttttaatagtatttgttaaagattagagatagatagtttgtaatttagtattatgagtaaaagttgtttg

SEQ ID NO: 2819 - DNA, 313 bp, Artificial Sequence
  chemically treated genomic DNA (Homo sapiens)
tagaattttttttaatattgtatgtttgttataatgtgggtagggagaggttgttggttttgtagtagttatttgatggttgtttaaaggattgtgaatttagttattattagtattttttttatttttttagatttgggtgtagttggtttagttttttatttttagttttgggaaagttttttttttagatttttgtttttttttaataagtttgtatgttgtgttaaggagtaattgtttttgttgttatgaatttatttgtttttgtgaatttatgtgttttttatttttgttttatttagaatagaga

SEQ ID NO: 2820 - DNA, 313 bp, Artificial Sequence
  chemically treated genomic DNA (Homo sapiens)
tttttgttttggatgaggtaaggatgaagggtatgtgaatttataagggtaagtgaatttgtagtagtagaagtgattgttttttggtataatatgtaagtttgttgaggaggagtggaaatttgggagagagatttttttgaggttggggatggaggattgagttaattgtatttagatttgaaagagtagggaaaatgttggtgataattgagtttatggttttttaagtagttattaggtggttattgtagagttaatagtttttttttatttatattatggtaggtatgtagtgttgagaaggattttg

SEQ ID NO: 2821 - DNA, 339 bp, Artificial Sequence
  chemically treated genomic DNA (Homo sapiens)
tttttatagtgtttttaaagtttgttggtatataaatatgaatgaatgaataatgtagaatttatttaagaaattttaaggagagagaggaggagatttatattatatagtaaataatttaataaatttgttaaatgttatgtatgtgaataggtgtttttttttttttgattttttttttttatatagaatttagtgttttttttttgttttttgttatagtatttattgtttttttttttttatgttggggagtagttgaggtttgtgttttttagtggatttgttaaattattttttttagtatgttgtttttttttttttatagattatttgtta

SEQ ID NO: 2822 - DNA, 339 bp, Artificial Sequence
  chemically treated genomic DNA (Homo sapiens)
taatagatgatttgtggaagggagagagtagtatgttggaggggatgatttggtaagtttgttgaagaatataagttttgattgttttttggtgtggaagaaggaaggtgataaatattgtaatggaggatgaggaaggagtattgagttttatgtggaaagaaagggttaaaaagaggaaaatgtttatttatatgtatggtgtttaatagatttattaggttgtttgttgtgtgatgtaaatttttttttttttttttttgaaattttttgagtgaattttatattgtttatttatttatgtttatgtgttagtaagttttgggagtattgtaaaaa

SEQ ID NO: 2823 - DNA, 463 bp, Artificial Sequence
  chemically treated genomic DNA (Homo sapiens)
ttttttttttgggagtggggttagttaattggtaggtggtaggtggtagggttgagtgggtagggttgatggggagtggaatggaggtatgttttgtggagatggtgttgggtatggttattgttgtttttgtttatttttttatttttttttgtttttaaggtttatatttttgttggaatttagggtattgtttttttttatttggaaggttttagggtttttttatttgtgttgtgttttgtttttgtttttgtgatttgaggtgtagtgtgtgtggtgattttggtttatggggatttttttgtttgttttttgttaagatggtggttttattagggaggttttaggggttatggttgggtagagttagtttgagttgttggggagaagggtattttatagggtttttagggtaggggagttttagatagatgtaaggttttggtgttatattttttta

SEQ ID NO: 2824 - DNA, 463 bp, Artificial Sequence
  chemically treated genomic DNA (Homo sapiens)
tgagaaggtgtggtattaggattttgtatttatttgaggtttttttgttttagggattttatggggtatttttttttttagtagtttaagttggttttgtttagttgtggtttttggggtttttttgatgaggttgttattttggtgaggagtaagtggggaagtttttatgggttgggattattatgtatgttgtgttttgagttatgggggtgggagtgaggtgtggtgtggatgaaagggttttggggttttttaaataggagggaatagtgttttggattttggtgggggtatggattttaggaatggggaaggatggaagaatgggtagaagtagtagtaattgtgtttaatgttatttttatggggtgtgtttttattttgttttttgttagttttatttatttagttttgttgtttgttgtttgttagttggttgattttatttttaagggaagag

SEQ ID NO: 2825 - DNA, 456 bp, Artificial Sequence
  chemically treated genomic DNA (Homo sapiens)
tttaatttttaagtgtattttttttggttttttttagatggtggaaatagggtggtgattaattttttagagtggaagatatgtatgaagggtgtatttgtagttttttgggatttaggtgggggttgttgtgtttttttaaaagtgagtggtggttttagtttgttattgttttgttttgttagtttggaggaaattttggttggaggtgattttgggtttagttggatgggttgggttgagtttaggaggggttggtagatgtgttttagggttagggtggggtgtagggagtgttgtttttatttttagtatttttggggtgggggatttgagtgtgtggagagtgggaggtagagttgagagtggggttaagtgtgaagttaaggtgttgtatagggttgggtgggaatggatagggtgagttggaagtgaagtattttagttaggttttag

SEQ ID NO: 2826 - DNA, 456 bp, Artificial Sequence
  chemically treated genomic DNA (Homo sapiens)
ttaaggtttggttggggtgttttgtttttagtttattttgtttatttttatttaattttatgtggtgttttagttttgtgtttaattttgtttttagttttgttttttgttttttgtatgtttaggttttttattttaaaagtattgagggtggagatggtgttttttatgttttattttggttttgggatatgtttgttagttttttttaggtttggtttggtttgtttggttgggtttgaggttgtttttagttagagttttttttgagttggtgaggtgaagtggtggtaggttgaaattgttgtttatttttaagagagtatagtgatttttgtttgaattttggagagttgtaggtgtgttttttgtgtgtgttttttattttgaaaagttagttattgttttatttttattgtttggaaaaagttagggaagatgtatttaggagttaaa

SEQ ID NO: 2827 - DNA, 394 bp, Artificial Sequence
  chemically treated genomic DNA (Homo sapiens)
gggggtagtagattgtttagttttatgtttgttggggttaagtgtggttgtgtggttttagttttgtgtttggggttttgtgtgttatgttttaggtgatttgagttttagggtgtttttgttatagttgtgttttttaggtttttttagaaattaagggtgagtgatttgtggagtttttatgtgtgtttttttggttatttagttggatggtagtgtgagggtagtttttgtggatttatagtttttagttatttggttgttagttttgagagtttgagagtttttattttttggggtttatgtttagattaattaggttattaggtaggtaaaatttttttttggtaatgagtgaggtgagtgtattgtaaagagattttggtatttaggt

SEQ ID NO: 2828 - DNA, 394 bp, Artificial Sequence
  chemically treated genomic DNA (Homo sapiens)
gtttgaatattagaatttttttgtaatgtatttgttttgtttattattagaaggaggttttatttgtttagtgatttggttggtttgggtatgaattttgagaggtggaaatttttagatttttaggattgatagttgagtggttggggattataaatttgtgagaattgtttttgtgttgttatttagttgggtagttgggggagtgtgtgtgggggttttgtgagttgtttgtttttggtttttggggaagtttgggggatgtggttgtggtggaggtgttttgggatttaggttgtttggagtgtggtatgtagagttttaggtgtggagttgaggttgtgtggttgtgtttggttttagtgggtgtgggattgagtagtttgttgttttt

SEQ ID NO: 2829 - DNA, 242 bp, Artificial Sequence
  chemically treated genomic DNA (Homo sapiens)
ggtggtatagtggtgaattttgtggtggttgtgtgttgtttatgttgtttttttagttgttgttatttttgtgggttttttttatttaaggggaatggagttgttattttttgttgtttttatagtaattgtagttttgtgtggggagtgagttagtgaattaggtttggtttgtgtttggttttttgggatatgttggttgtgtggggtagaggtggaagaataggggtttggaggaagag

SEQ ID NO: 2830 - DNA, 242 bp, Artificial Sequence
  chemically treated genomic DNA (Homo sapiens)
ttttttttttaaatttttgtttttttgtttttgttttatgtagttagtatattttaaggagttaggtgtaagttaggtttggtttattgatttgttttttgtgtgaggttgtggttgttatggaaatagtgggaaataataattttgttttttttgggtgagagaggtttgtagaggtaatagtagttggaggaatagtgtgagtggtgtgtagttgttgtagagtttattattgtgttatt

SEQ ID NO: 2831 - DNA, 371 bp, Artificial Sequence
  chemically treated genomic DNA (Homo sapiens)
ttttaaattttataatttaggaaatagtttattattttataaaattataaaagtgaattatttgagtttttttattatttgtttttttttttttaagttggttttgtataaatatgatgtatgtttattgggtgataagtttgttgtaagtgaaatgtttataggtattataggaatgatttggtgttttgtttattttattagaattttaattggggtgtgtaggagaggattttataaatggtaaggtaatttttggtagtttgtttgttagtattgtttgtgttatttttagaggagtttgagaagaggtagaggaaggtgaaatatggttggtgagtgtatggtattttttttattaggtttttgtt

SEQ ID NO: 2832 - DNA, 371 bp, Artificial Sequence
  chemically treated genomic DNA (Homo sapiens)
ggtaaggatttgatggagaagatgttatgtatttattagttatgttttgtttttttttgtttttttttaggtttttttgggaatggtatggatagtgttgatagataggttgttaaggattgttttattatttatagaatttttttttatatattttaattagaattttaatgaagtgggtgaggtattaggttatttttgtagtgtttgtaaatgttttatttatgatagatttgttatttaatggatgtgtattatgtttgtataagattagtttggggagaagggggtagataataaagaaatttaaatagtttgtttttataattttataaaatgatggattattttttggattgtagggtttagga

SEQ ID NO: 2833 - DNA, 419 bp, Artificial Sequence
  chemically treated genomic DNA (Homo sapiens)
agggatggagatttggtttaagttttttggtttatttggagttgtgatagttatttttagggaatagttatgttgttttattaagtttatttttagtggtttggattttttaggtagaggttgtgggattttgttttttttaatattttagtttatttttaaaagggtttgagttggataggggttaaataggtttttttgatttggtgggttggttagatgtgatagtaatgttaaggaggttaagtttttttgtttattttttattttttttttttttatttttggattttttggtgtttttagtatatagaggtttttgagtagtttggttgtaggttttttatttatttagagtttttttttttatgtgtttatttttaattttgtagtgtttgtggattaaaggggaagggagt

SEQ ID NO: 2834 - DNA, 419 bp, Artificial Sequence
  chemically treated genomic DNA (Homo sapiens)
gttttttttttttttggtttgtagatattgtagggttggggataggtatgtgagggggagaattttgagtagatagggaatttgtagttgggttgtttaagggtttttgtgtattgggggtgttaggaggtttagggatggaaaagggggaggtgagaaatggataaagaaatttggtttttttggtattgttgttatgtttggttggtttgttaagttgaaggggtttgtttagtttttgtttggtttaaatttttttgggaataagttgggatgttagaaaaaataaaattttataatttttgtttggggaatttaggttgttggaggtgggtttggtagggtagtgtgattgttttttgggagtggttgttatagttttgggtgaattgaggagtttgggttaagtttttattttt

SEQ ID NO: 2835 - DNA, 480 bp, Artificial Sequence
  chemically treated genomic DNA (Homo sapiens)
aaagtttagatatttgtgggttgtattgtaaatttttgtatagatgtgtgtgaggttgagttttagttatatgtttgtaatagtattaggaaatattttgttatgttatttttttgggtgattttttatgattaaaagaaaaaaaaagttatatttttgttttgtgaaattgagtttgaattttgggtagtttagtagtaattagtatatgtttgaattatagttgtgtgggatggtttgtattatatattaatggtaattattgttttaaatatggaaattaaatattttaggtttaggttgattttaatttgtgggtaggaaatgtttgatttattttaagataagtttaaaagtgtgtggagttttttttggggttataaattttgtttatatttatatgtattttttttgagatagttttttgaggttttttggtagttatttttttgaatgtgggaagagattgggatttttagg

SEQ ID NO: 2836 - DNA, 480 bp, Artificial Sequence
  chemically treated genomic DNA (Homo sapiens)
tttagggattttaatttttttttatgtttaagaaggtggttgttaagagattttaagggattgttttaaaagaaatatatatgaatgtgaataggatttgtagttttagagaaaattttatatatttttaaatttattttgggatagattagatgttttttatttgtagattggaattagtttgaatttaaagtatttaatttttatatttaaagtagtagttgttattggtatataatataaattattttgtgtagttgtgatttaggtatatattgattattattaaattatttagaatttgagtttaattttataagatagaaatatgatttttttttttttttggttatagaagattatttaaggaagtagtatgataaaatgttttttgatgttgttataggtgtatggttgaaatttaattttatatatatttgtatagaaatttatagtgtaatttataaatatttgagtttt

SEQ ID NO: 2837 - DNA, 464 bp, Artificial Sequence
  chemically treated genomic DNA (Homo sapiens)
attagttttttttttgtatagttttagttattgtttttattgttttattttttgttttttttttttaggatgtttgtgggtattgaagttttttttttagattggatatgagttagtattttagtattttgtgagttgagtgttaggataaggtgtgatttgatttttttagaaattttttttgttttagagatagttttttgggttagggatttttaaggattaaagtttaatttttattattttttattatattgggaattttagaatgtgtgagttttatgttttttggtgttgatagattagaggaggattagatgtgataatatggttgttgttggaggggttgagaggtgattgattagtttaagtttgtatagtttgtggaggaagtattttgtttttgtttttttaagtgataaagtttatgttggaatatagagttttttgttttgagtatttaa

SEQ ID NO: 2838 - DNA, 464 bp, Artificial Sequence
  chemically treated genomic DNA (Homo sapiens)
ttaggtgtttagagtagggagttttgtattttagtatagattttattatttgagaaggtaggaatgaggtgttttttttatgggttgtgtaggtttaagttaattagttattttttagtttttttagtagtagttatgttgttgtgtttggtttttttttgatttgttagtattgggaaatgtggaatttatatattttgaagtttttagtgtaatggggagtggtgggaattgaattttggtttttaagagtttttggtttaggaggttatttttaaaataagaaagatttttgggagaattaagttgtattttgttttgatatttaatttataaagtgttgggatgttggtttatatttagtttgaagagaaaattttagtgtttatagatattttaaagggaggaggtaagagatgggatagtgagggtgatgattgaaattgtataagagaaagattggt

SEQ ID NO: 2839 - DNA, 482 bp, Artificial Sequence
  chemically treated genomic DNA (Homo sapiens)
tttttgtttaaattttttgggtttaggattgtaggtaggtaaggtagagtattttgaatgtttttttgaggattaggaatttatttttttgattatatagtgatgtgttttatagattttttttattgtgaggtaattattttatttatttaagttttataaagtttttattattttggttagtttatatttttgaagttaagttattagtttgatgtgtttgttgtaaaatgtggtttaatagtttgttagtatatttattttttttttaatggaatttaaaggtattttatgtttgagtagtagtggatttaagagttgatgaaaagttttgtgagttgggtgtagttagtataaaataatgtggggaatattgtggagttttatgtagagttatttttagtagtggtgtgtgggttttttgaattttaagttatgttttttgtttttttttttttttgatagtgttttataaataattt

SEQ ID NO: 2840 - DNA, 482 bp, Artificial Sequence
  chemically treated genomic DNA (Homo sapiens)
gggttatttatgagatattgttagggaaaaagaaaagtaaaaaatgtaatttaaagtttaagaaatttgtatgttattgttgggggtagttttgtgtaggattttataatgttttttgtattgttttgtgttgattgtgtttagtttgtggggttttttattggtttttaaatttattgttgtttaagtatgaaatatttttggattttattaaaaaaaaaataaatgtgttaataagttgttaaattatattttataataaatgtattaaattgatgatttagttttaaaaatatgaattaattgaaataataaaggttttgtagaatttggataaatgaagtgattgttttatagtgagggagatttgtggggtatattattgtgtaattaaaaaaataagtttttggtttttagagaaatatttaaaatgttttgttttgtttatttatagttttgagtttaaagggtttgaatagggg

SEQ ID NO: 2841 - DNA, 345 bp, Artificial Sequence
  chemically treated genomic DNA (Homo sapiens)
tagttaagtaggttatgattaagggagataatgaagtatggaattgttttttttagagaaattataggtatggaataagaattttttgaggaggttttttttgttttttttttattaagttgtgatattatttttatatttagagaattttagagtaatattgagttttgttgagtgggtttagagttttatatggtagttgttttagtttttggtatgaggttaaaggatgatagtttttatttttttttatgtttttttgtttaattttagggaatatttttttattttgtgattgtttatatttgaaaattttatttatattttataattttttattagttt

SEQ ID NO: 2842 - DNA, 345 bp, Artificial Sequence
  chemically treated genomic DNA (Homo sapiens)
gggttgatggaagattgtagagtgtgagtaagatttttagatatgagtaattatagggtaaagaaatattttttaaggttgggtaaaagaatatgaaagaagataagaattgttattttttggttttgtgttaggaattgagatagttgttatatggaattttgaatttatttagtgaaatttggtgttgttttgaagttttttgaatatgaaaataatgttgtagtttgatgaagaaaggatagaaaaggtttttttagggaatttttattttatgtttgtggtttttttggaaaagataattttatgttttattattttttttagttatggtttatttgattg

SEQ ID NO: 2843 - DNA, 435 bp, Artificial Sequence
  chemically treated genomic DNA (Homo sapiens)
gaaggggtaaaataagttagggagtttagttaatatgtgagatggaaatttaaggatagggatagagtatgtataaagtttagggatatagttttttgttggatattttgtttgtattaattggtaaattagattgtataataggaaagaagtttgtgatagtaaaaggggttgaaaatgggaaggatatttagagggtaggaattatgatggggttttgtggttttgtgggtagtagggagagtgtatttttggtttgtgggttttgtgagttggaagaaattaggaaagggaagttgagtatttaattttatatagattataggttaattgtgtttatttagtgtttgaaagtgagaagttgttaaggttttgtgatagttttgaaattgtaggtattagaggatagaaattttgagtttagagggaggtagg

SEQ ID NO: 2844 - DNA, 435 bp, Artificial Sequence
  chemically treated genomic DNA (Homo sapiens)
tttgtttttttttgggtttaggatttttattttttaatgtttgtggttttaaggttgttataaagttttgataattttttatttttaaatattaaatgggtatgattagtttgtgatttatgtaggattaaatgtttagttttttttttttgattttttttagtttatgagatttgtaggttaaaaatatattttttttgttgtttataaggttgtagagttttgttatagtttttgttttttgagtgttttttttgtttttgattttttttgttattataagttttttttttgttgtgtagtttaatttattagttagtataggtaaaatgtttagtaaaaagttgtgtttttgggttttgtgtgtgttttgtttttatttttaagtttttattttatatgttaattggattttttgatttattttgttttttt

SEQ ID NO: 2845 - DNA, 450 bp, Artificial Sequence
  chemically treated genomic DNA (Homo sapiens)
ttatttgtattgttggtagatgatttataaatgttgtatagatatgggttgattattggtttatagaagaagtattaaatgaatgatgagatatttgttggtaaatatatagtaaataaaaaatgtaatttagagttaaatatgtgtatagtgtgggttttatttttgtttataaattaagtaatgtgttttgttaattattagtagagttattgattttagatgtgtattatatagttataattttgttagagagtagattatataagttgttttttttttggttgttttattttgttttattttaagagtttgtaaattgatgattgggataaaaattataattgatattatttgtgggaaatattttataaaataataggtttagatgtaggattaaagttatgtggtagtaaaatattttattgaaaaggggttaggttttatgat

SEQ ID NO: 2846 - DNA, 450 bp, Artificial Sequence
  chemically treated genomic DNA (Homo sapiens)
attatggaatttggtttttttttagtggggtattttattattatatggttttaattttatatttgggtttgttgttttatgaaatattttttatagatgatgttaattataatttttgttttggttgttaatttatggatttttggaataagataaaatgaaataattagaaaaagaataatttatgtggtttattttttgataaaattatagttgtgtgatatatatttaaaattaataattttgttaatgattagtagaatatattgtttggtttatgagtagagatggggtttatattgtgtatatgtttggttttgagttgtattttttgtttgttgtgtatttattagtagatgttttgttgtttatttaatgttttttttatgagttagtagttagtttgtgtttgtgtgatatttataagttatttgttaataatataggtgg

SEQ ID NO: 2847 - DNA, 493 bp, Artificial Sequence
  chemically treated genomic DNA (Homo sapiens)
ttttagttaattttttttttgttttttagtttttgtttatatagaaaatttggttttagagaatagtatttaaatagtttttaattaaaatgtattatgtgtggtaatgtaaaaaattattagaatagtttttttttatttaaaatatgatttttgtttattgttttggtttttttgtttttgtgttttaggttaaatattatttagatttttgtgaggttaggtgtttttttattaattatttgaaaggtttagagaatggtatttatattaaagttagttttaatgataaaggatatttggttatggtaaatataagtattttttagttttttgttttatttggtaaaaagttatttttattttagttataatataataaaggattaattgatgggagtattttttttattttttaaaaaataaattgagttaattttatgagtttatttagaggaattaattagggaataggaaatttttaaagttattt

SEQ ID NO: 2848 - DNA, 493 bp, Artificial Sequence
  chemically treated genomic DNA (Homo sapiens)
ggatggttttggagattttttattttttaattaatttttttagatgagtttgtggggttggtttaatttattttttgaaagatggaaaaaatgtttttattaattagttttttgttatgttgtgattgagatggaaatagttttttgttaaatggagtgaggagttgagagatgtttgtgtttgttgtggttaggtgttttttgttattaggattggttttgatgtaagtattattttttgggttttttagataattggtgagaaagtatttggttttgtagaaatttgagtaatatttagtttgaagtataaagatagggaaattaaagtagtgaataggagttatattttaaatagaaaaaaattgttttaataattttttgtattattatatgtaatgtattttagttggaggttgtttgagtattgttttttagaattagattttttgtgtggataaggattagggggtagggaaagggttaattgagg

SEQ ID NO: 2849 - DNA, 438 bp, Artificial Sequence
  chemically treated genomic DNA (Homo sapiens)
ggaaataaaaatgtgagtatgaagttttggtaaaataaatttttttgaaaaatattaatattttataattatttttttattaaaataaaatagtgttaagtatatagttttttttaagtaataaatttttaaaattaaagtgaaattttgaaattatttttttaaatagtatttgtttggtagatagatggtatgttttattttattttttgtttttatttggtggagtttatggggtattttgagaattaatgggtaattaagaattgggtgttaatttaggtatttgatttggaaattgagtttttgaaaattattaattttaaatatagtgtaagttttttttattatgttattttagaaattggtaataagaatattttaaaaatatttagaaatgtaggagttagattttttgggttgtaggtggaggatata

SEQ ID NO: 2850 - DNA, 438 bp, Artificial Sequence
  chemically treated genomic DNA (Homo sapiens)
tgtgttttttatttgtagtttagaaaatttggtttttgtatttttaaatatttttagagtgtttttattattagtttttgggatagtataataaggagggtttgtgttatatttggaattgatggtttttaaagatttaatttttaaattaaatatttaaattggtatttaatttttaattatttattgatttttaaaatattttatgaattttattaagtagaaatgggaaatgaaataaaatatgttatttgtttattggatggatgttatttgaaggagtggttttaaaattttattttggttttaaagatttgttatttggaagaagttatgtatttggtattattttattttgatggaaaaataattgtagagtattagtgttttttaagagagtttattttattgaagttttatgtttatatttttgttttt

SEQ ID NO: 2851 - DNA, 449 bp, Artificial Sequence
  chemically treated genomic DNA (Homo sapiens)
ttttttttagttttgttttgtgtggtgtttgttttgtaatttttttatgtttgttttaataggaaaaaaagtaaagagattgatatatagttattttgaggttagattgttattgaaatagatttttttaaataaaaataagggttgtttttgtttgtaaggttttgtaatgaaatagagttaataaaaattgtatgggaaatttatattgtagttataaaaatattaaaaaatagaatttttagttaaagttagtagtgattgttggtttgaggtagaaattagggagtaaaatattttgaaatatttattgaaagtgaagagagggaagaattattattttttatttatttggttaattttttagaagtaaagttagagttatatttgtttagtaagtgattaagtattgggtttttaagtgtaggatagattatttttttttgtgg

SEQ ID NO: 2852 - DNA, 449 bp, Artificial Sequence
  chemically treated genomic DNA (Homo sapiens)
ttataggagaaaatggtttgttttatgtttaaaaatttagtatttaattatttgttaagtaagtgtgattttagttttatttttgaagggttaattaaatggataaagggtaataatttttttttttttttatttttaatgagtgttttagaatgttttattttttaatttttattttgagttaataattattgttgattttagttaagaattttattttttaatatttttatagttgtaatgtgagttttttatgtagtttttattaattttgttttattgtaaggttttgtaagtaaaaatggtttttatttttatttggagaaatttattttggtgataatttagttttggggtagttatatgttaatttttttgtttttttttttgttgaaataagtatgggaaagttgtaagataaatgttatatagggtagggttgaaggaag

SEQ ID NO: 2853 - DNA, 482 bp, Artificial Sequence
  chemically treated genomic DNA (Homo sapiens)
gggtatgagtaagaatttggggaaagatttggagttaggaggaggtgggtgtttggtaggtggtgagattttaataggtagaggtagaagtgaagggtaaagggaaattttgggttatatggggaaattagatttgtttgtttgtttaatattgtggtttttagtgggatttaaagttgatgttttaatgtaggatggttatgttagtgttgattagaataatgtattttttagggttatattaaaaaattatgtttagtgttttatttgtatttttaaaatatgtatatatatgtgtgggttagaaaaggttgtgtttaggatatgtatttttatgtgaattgtaggtaattgtataagtaaataggaagttgtgtaggtatgtaggtagttgtttgttgagaggtgtgtgtgggtatgggtaggtgtgggttttgtttgtttgagtataattttaaaggttttttttgatggaagggagg

SEQ ID NO: 2854 - DNA, 482 bp, Artificial Sequence
  chemically treated genomic DNA (Homo sapiens)
ttttttttttattaggagaagtttttaaaattgtatttaaatagataaggtttatgtttgtttatgtttatatgtattttttaataggtagttgtttgtatatttatgtaattttttgtttgtttgtgtaattatttatggtttatataagaatgtatgttttgagtgtagttttttttggtttatatatgtatgtgtatattttgaaggtgtaaatgaggtattgagtatagttttttaatgtagttttaaggggtatattattttgattagtattaatatagttgttttatattaaggtattgattttaggttttattggaggttatagtgttaaataagtaaataaatttagtttttttgtgtggtttaaagtttttttttgttttttatttttatttttgtttattaaagttttattgtttgttaagtatttatttttttttaattttaagtttttttttagatttttgtttatattt

SEQ ID NO: 2855 - DNA, 492 bp, Artificial Sequence
  chemically treated genomic DNA (Homo sapiens)
gttttttgaggttttagaatgataaaatggagaggtagggttaggggaagagggtttggtgagatttgttttggtttttgttggttttttgttaatgtttgtagatggtgggggtttatggttgggatgtttgtttaggttttggtagttttatgtgttttagtatttttttaaaagttgattatttggtttgttttttttgtgagttggtttattattattttattgtgtggtggtaatttttatttgtattatgaatattgattttatgtttgtttttttatttgaattataggtgggtaggttggtggtttgtattgtttgtttagttttagtttttttggtagttatttgaatagttttaaagaaaagttgtttgtttgagtatttagggataatagagagtggttataggttgttatagtgatttattaaaagataggaaaatgagagaaaagatttttattttttgtattagttgtttgttttttt

SEQ ID NO: 2856 - DNA, 492 bp, Artificial Sequence
  chemically treated genomic DNA (Homo sapiens)
aagagagtaggtagttggtgtaagaagtaagggtttttttttttatttttttgttttttaataaattattgtagtggtttgtgattgttttttgttatttttaaatgtttaagtaaatagtttttttttgagattatttaagtggttgttagggaggttggagttgagtaagtaatgtgagttgttggtttgtttgtttgtaatttaggtagaaaagtaagtataaagttaatatttatggtgtgggtaagaattgttattatataatgaaatggtaatgagttggtttataaaggagataagttggataattagtttttaaggaggtgttggggtatatgaggttgttagggtttgagtgggtgttttggttatgggtttttattatttgtgggtattggtagaaggttggtgggagttagggtgggttttattaggttttttttttttggttttgtttttttattttgttattttggggttttaaggagt

SEQ ID NO: 2857 - DNA, 491 bp, Artificial Sequence
  chemically treated genomic DNA (Homo sapiens)
agtgaatggaggggttgtttttagtttatttggtgttgtggtgaattgttttagggtttggtatattgttattattttaagatagatgggaaataaatattattagtatgttgataagtgtttgtttttttttagtattagggttaagaaaaataaagtggggagggtattaagttttggagtaagtttttaaaaggtttttttttttgaattttttatggttgtttatttataatagttataattataatagagaggaaaagattttaattatttttgggatatattttgttaaaattatatttaagtattttttatttgtaagtgagaagtattattttttattatgtttttaaagtagtgtggggaagttgtgtgtataaattaaggtgttgttgtggtttgttgttttttgtgaatttttggaaaggattattaagaaggatgttttgataattgtttgttaggtaatttgtataagaggaaagagg

SEQ ID NO: 2858 - DNA, 491 bp, Artificial Sequence
  chemically treated genomic DNA (Homo sapiens)
tttttttttttttatgtaaattgtttggtagatagttattagagtattttttttggtgattttttttagaagtttataaaagataataggttatagtaatattttggtttatgtatataatttttttatgttgttttaaaggtataataaaagataatgttttttgtttataaataaaaagtgtttaaatgtaattttgataaaatgtgttttaggggtgattgaagtttttttttttttgttgtgattgtaattgttataaatagataattgtaagagatttaaaaggggaaattttttaaaggtttattttagggtttgatattttttttattttattttttttagttttaatgttgaaggaaaataaatatttattgatatattaatggtgtttattttttatttgttttggaatggtggtaatgtgttaagttttgagatagtttattatagtgttaagtgagttgaaggtagtttttttatttatt

SEQ ID NO: 2859 - DNA, 463 bp, Artificial Sequence
  chemically treated genomic DNA (Homo sapiens)
tgtaggtaagaagttgtttattattgatagagataaaatattttaatgagtgatggaatttttattttttatttaaatattatgttaatatttaatataaaatattattgttttgttttatatagaaattgtaagtttattttgtttgaaatatggggaaataaatttttgttttgattttttttttgttgttttagttgtgtgttattgatattggtgtgatttgttatgggaaggtgtaatgaggtaagattgggattgtaataattattaatttataaatatgttatggtaaagttaaggtaagttagagtgatatttttaaatattttaggaaatagtatttatgtttgaattatttattttattagtttgttttgatgaatatgggagaaattaataattttttaatataaagagtaatttaatgttattaattgggtattttatatgggttgataga

SEQ ID NO: 2860 - DNA, 463 bp, Artificial Sequence
  chemically treated genomic DNA (Homo sapiens)
tttattagtttatgtgaaatgtttaattaatgatattaggttattttttatattaaaaagttattaattttttttatatttattaaaatgaattaataaaatgagtaatttaaatatgagtattattttttgagatatttagaagtgttattttggtttgttttgattttgttatagtgtatttgtaggttaataattgttataattttagttttgttttattatatttttttatggtaagttatgttagtgttaatgatatatagttagaataataaagagaaggttaaaatgggagtttatttttttatgttttaaataaaataaatttgtagtttttatatgaaataggataataatgttttgtgttagatattaatgtgatatttagatggagagtaaaaattttattatttattagaatgttttgtttttgttaataatgaataattttttatttata

SEQ ID NO: 2861 - DNA, 485 bp, Artificial Sequence
  chemically treated genomic DNA (Homo sapiens)
tttggaagtagtaggggagggggtaggaaggggaggtttttgtttatttatggaaaatggatgtgtgttttatggtagttgtagtttaagtaaatataaattttgaattagagattatatttgttatttttttagtattagtaatattaaattaaaatatagttttatttggttaattttaaagtaggatgtgggtgttagttttgaaaattatatgattgggtttttagtagatattattagggttatgtttttgttttaagtaagaaagttataaaggtaatattttttgtagtattattattatgtttagtaaatagatgtaattataataatagttaattttagagataatagtttattatagaaaaaggttaagagggttttttattttttatgtgtagaatttgagttattttatattataattttattgagagaagaggtattaaaagagagataatgagaatttagggtataggttt

SEQ ID NO: 2862 - DNA, 485 bp, Artificial Sequence
  chemically treated genomic DNA (Homo sapiens)
gagtttatgttttaggtttttattgttttttttttaatgtttttttttttaatagagttgtaatatgggatagtttagattttatgtatgaagagtaaaagatttttttgatttttttttgtagtgaattgttgtttttgaagttaattgttgttatggttgtatttgtttgttaaatataatgatggtattataaggagtattgtttttgtgatttttttgtttaagataaaagtatagttttggtggtgtttgttggaaatttgattatgtggtttttaaggttggtatttatattttattttggggttagttaaataaaattatattttggtttggtattgttagtgttgaggaaatggtgggtatgatttttggtttagagtttatgtttatttaaattgtggttattatgagatatatgtttattttttatgagtgaataaaagttttttttttttgtttttttttttattgtttttaaa

SEQ ID NO: 2863 - DNA, 485 bp, Artificial Sequence
  chemically treated genomic DNA (Homo sapiens)
ttatttatttattggaaattttgggttgttaaataatatttaagtttattttgtaattagattaaagttttgggttttgtgggggttggagattggaattttattttaaaaagaaatgtgtaaggtattttgttttttattaagaagtgtaatgagtaggttttatttatgatttttagttttaaatgattgaattggtattagtgttaaaaaaattgaaaatgttttaatatgtattaattgtttaatggatgtgttgtttgtttgaaaagggtggggtggtatttaggttgtttaatgattttatatttttttatggtaaaatatttgtgatttgattatgttgtaattaaagagttatataaataatatttttggaaaggaataaatgggtttttttgaaagagggattttggttagttttagttggtattttaggtttttttatgaggagaaaatttttatttttaggtaaattttttttt

SEQ ID NO: 2864 - DNA, 485 bp, Artificial Sequence
  chemically treated genomic DNA (Homo sapiens)
agagaggagtttatttgggggtgagagttttttttttatgaaggggtttgagatattagttggagttgattaaaattttttttttaaggaagtttgtttgtttttttttaaagatattgtttatgtaattttttaattatagtataattaaattataagtattttgttatgggaaaatgtaaagttattaagtaatttaaatattattttgttttttttaggtagataatatatttattaagtgattaatgtatgttaagatatttttaatttttttggtattaatgttagtttaattatttgggattggggattataggtgaaatttatttattatattttttgatgggaagtagagtgttttatatgtttttttttaaaatagaattttaatttttggtttttataaggtttagagttttaatttgattgtaaaataagtttggatattgtttgatagtttagaatttttagtaggtggatga

SEQ ID NO: 2865 - DNA, 432 bp, Artificial Sequence
  chemically treated genomic DNA (Homo sapiens)
ggaaagggggaagttttttgtaagtatatgtgataaaagaaagataaagtttagtttgttaaaagggattagagttataaatatgtttataaaaattttgttttgttatttatatttgatttataatgattatttgggaaatttgtttttttgttggggtagggatttgattgattatgtaaaggggaaatagatgtatttagtttgtggttttatatatttgttggatgagtaatgattataatttgttaggaggagataataaaaaaatttatataaaattttttattgtgtaagtgatattggttattgtagttggtaattagaaagttattttgaggatagaatttttttgtttattaatgtagagaaaatggttagtttgttttttatgttttagaatataatattggagatgttaggatttatttt

SEQ ID NO: 2866 - DNA, 432 bp, Artificial Sequence
  chemically treated genomic DNA (Homo sapiens)
ggaatgaattttagtatttttagtgttatattttgagatgtgggaagtaggttagttattttttttatattaataggtagaaaagttttgtttttggggtaattttttgattgttgattataataattagtgttatttatataataaaaagttttatgtgaatttttttattgtttttttttggtaaattatagttgttgtttatttagtagatgtgtgaggttgtaggttgagtgtatttgttttttttttatatggttagttaggtttttattttagtaaagaggtaaattttttaagtggttattgtaaattaagtataggtaataggatagagtttttgtaaatatatttgtgattttggttttttttgataaattgaattttgttttttttttgttatgtatgtttgtagaggattttttttttttt

SEQ ID NO: 2867 - DNA, 411 bp, Artificial Sequence
  chemically treated genomic DNA (Homo sapiens)
attaggttatttagttagttttttggagttatatatgtgggttggtttttttaagttttttttgtttaaaaagttagatagagtttgtttttttagtagggtgtatattgtaggtttgggtgggttgtttgtttttgtgtttgttttgatttttagttatttttaggatgttttttttatggaggagaatgatttagttttgtttgttatgtgtattaagatgagttataagagagtattgtttttttgtaatgtaagaaatgtaatgtagttagaggttttgaaatttggtggggatagtggtagtagagattgtgatagttttgggatataggaggttattttggtttttagttttaggtgtttggagttattagatagttaaagttgtataaggtataggtatgattt

SEQ ID NO: 2868 - DNA, 411 bp, Artificial Sequence
  chemically treated genomic DNA (Homo sapiens)
aggttatgtttgtgttttgtgtaattttggttgtttggtagttttaggtatttaagattgaagattaaggtggttttttgtgttttgaggttgttatagtttttgttgttgttgtttttattagattttagagtttttgattatattgtattttttgtattataagaaagtaatgtttttttgtagtttattttaatatatatggtagatagaattgagttgtttttttttatgaaagaaatattttggaaatagttaaaagttaaaataaatataaaaataaataatttatttaggtttgtgatatgtgttttgttggaaaaataaattttgtttggttttttgggtggagaagatttgggaaggttagtttatatgtgtggttttagaaaattggttgagtagtttaat

SEQ ID NO: 2869 - DNA, 457 bp, Artificial Sequence
  chemically treated genomic DNA (Homo sapiens)
agttgaggggtggttagttttggtgagttttggtgttttattatggtttttttatggttgtttttattttttttttagaaaagttattgagaaatggaattttttgatattatttttagttaaagttgttgaaaatagtttagaggagtgaattttatagagttttatgttttgtttagatttttggggttttttgttttatggagtttgtagagttgtgtttagattttttattttggattgttatttggtattggttttttttatgtagtttttttgtttttattgtaatttgattttttgttaaattattttttttttggttttaaatttttgttgggaaagagatgaaattagtatttggagagttggaaagggaaaaatagttgttttttataaaatgggttagggagggggaagtggagtagtatagttggattttggtgggaaagttaga

SEQ ID NO: 2870 - DNA, 457 bp, Artificial Sequence
  chemically treated genomic DNA (Homo sapiens)
tttggtttttttattaagatttagttgtgttgttttgtttttttttttttagtttattttgtgaaaagtagttgtttttttttttttagttttttaagtgttgattttattttttttttgataaaagtttgaagttaggagggaaatggtttggtagaaagttagattgtagtgggagtaagaagattatgtggaggaggttgatgttgggtagtggtttaggatgaggggtttggatgtggttttgtagattttatgagataagaagttttaggaatttaggtggggtatagggttttgtggaatttatttttttgagttgtttttagtaattttagttaggggtgatgttaaagagttttattttttaatagtttttttggaagaggggtggagatagttatggggaaattatgatgagatattagggtttattggggttgattattttttaatt

SEQ ID NO: 2871 - DNA, 446 bp, Artificial Sequence
  chemically treated genomic DNA (Homo sapiens)
tgattggttgtgtgaatgggtatgattagtagtaaagaaagaaatggaagtttgtgtgttggttgggttttggtatatgtgttgtttttatagtgtgtttagattatgttggggtatgtgtatagttaatagatttgatataggaaaaagtattttttagttgtttttattattttgttatttgttattttatttatttgttgtttttatgaaatgtttatttatgttagttaaaatggtatattgggtttggaattggttggggaaatgttaggttgatagaataggggggataattgaaatagtaattgtgtggatggtggtggtgatataaatttgtttttttgtgtagaaggtaggatttttagagtttaggaggttttttgtggaggaattggtatgtggtgaaggttgtagggagggggttttgggatttaggggtagtt

SEQ ID NO: 2872 - DNA, 446 bp, Artificial Sequence
  chemically treated genomic DNA (Homo sapiens)
agttgtttttgagttttagggttttttttttgtagtttttgttatatattaatttttttgtaagaggttttttgagttttgggagttttgttttttatgtaaaggggtagatttgtgttattattattgtttatatagttgttattttagttgttttttttgttttgttagtttgatatttttttagttgattttaagtttagtgtattattttagttgatgtgggtgagtgttttgtggggatagtagatggatggaatgataaatagtaggatggtggggatagttgagaagtgtttttttttgtgttggatttgttggttgtgtatgtgttttgatgtagtttagatatattgtgggggtagtgtatgtgttagggtttagttggtgtgtgggtttttatttttttttttgttgttaattgtgtttatttatatagttaatta

SEQ ID NO: 2873 - DNA, 476 bp, Artificial Sequence
  chemically treated genomic DNA (Homo sapiens)
agtggtagaggtgggaggtgggttggtgaggtggggtagtttaggaattgtgttggtggggataggaaattgggttgaagggagatgtaaggttttggtgggaaataaatggtattgtgttgttgatggaaaaagattttggtaggattgttgttgtgagtgttttgtggtttagaaaggaattttttataggttggattaattattaaaaatgtttttatttttaggagtttttggtgtgtagtggagttttgttgggggaaatgatagtttggattatgggtgtttgtggtttggataagtgaggaagtttttttaaggtaaaaggaagttttgattgggattttaatttgttggtttgttgtttgagtttgggagttgtggtgttttatggagttgttgagggaagtttgttttttgagttagtattggttaagggagtttgtttgagtttagttgttgattgttattagggt

SEQ ID NO: 2874 - DNA, 476 bp, Artificial Sequence
  chemically treated genomic DNA (Homo sapiens)
gttttggtaataattagtagttgggtttgggtaagtttttttagttggtgttggtttagagagtagattttttttagtagttttatggagtattgtagtttttaggtttaggtagtaagttgatgagttgagattttaattaaggtttttttttattttaaagaaatttttttgtttgtttagattgtgggtgtttatggtttaagttgttattttttttagtgaggttttattgtatgttggggatttttgaaggtagagatatttttaatggttagtttagtttgtaggaaatttttttttaagttatagaatatttataataatagttttgttaagatttttttttgttaataatatagtgttatttattttttattaaggttttatatttttttttagtttaattttttgtttttattagtgtagtttttagattgttttattttgttagtttattttttatttttgttatt

SEQ ID NO: 2875 - DNA, 463 bp, Artificial Sequence
  chemically treated genomic DNA (Homo sapiens)
gaaaatatgagtttagaagggtttttaatttattagtgggagagatttgtaaagattagaatgagaattgaatgggttgtttgtttttgatatttataatggattaaaagatgatagtttaatttatatggttgtttttttaattttttaaattaagattattatgttttgttgatttaaagtaggttatagtttttggatgtgaggtagttttgtagtttttggtgggatgagagtgggtttagaagaggaaaaggtagtgtgggtagaaagtaatattataagatggtttttggttttgttattgggtaatgtttttttgttaaaattataatataatatgtgtttttatttttttttttatgtaggtattttttattttttaaattgttaggaaatagatttgggtgaaggttggagggaataagaggagagtaaaaatatatatgttgggtggaggaag

SEQ ID NO: 2876 - DNA, 463 bp, Artificial Sequence
  chemically treated genomic DNA (Homo sapiens)
ttttttttatttagtatgtatatttttattttttttttattttttttaatttttatttaagtttgttttttggtaatttgagaagtgagaaatgtttgtgtgggggaaaaagtggaggtatatgttgtgttgtaattttaatggggaaatattgtttaatgataaaattagggattgttttgtgatgttgttttttgtttatgttattttttttttttttgagtttgtttttgttttattgaaggttgtaaggttgttttgtatttagaggttgtgatttgttttaaattaataaagtatgatgattttagtttgaagagttgggaggataattatatggattgagttgttattttttggtttgttgtaaatattaaaagtaggtagtttatttaatttttattttgatttttatggattttttttattgatgagttagaaatttttttaaatttatgttttt

SEQ ID NO: 2877 - DNA, 483 bp, Artificial Sequence
  chemically treated genomic DNA (Homo sapiens)
gttaagagggtttttagaatggattattttattgttttttttttatttaagaattttattttttgatatagatggatgtagggatgggagttggggtagtttgggagatggaatttggtggtttaggtgttgaagggttgagatagatttaggatggttaatgataggaaatttatttggttgtttaaatatggtgttaggtaattagtagttatttaggtaattgatggggttggggaagtttagtaagaggtgatagtgggttttgatgataggattgatttgtttttggaggtaggttatggaagtaggtattatttagagatgtaggtaggtggttggttttggggatgtttgttagttgtagggatgggatgttaggttttgggaagagtaagagtaagatagtattttaggattagggtaattggagtttgtggatgttgttaagaaggaggtgggtattggggaaagagatgtagg

SEQ ID NO: 2878 - DNA, 483 bp, Artificial Sequence
  chemically treated genomic DNA (Homo sapiens)
tttgtatttttttttttagtgtttattttttttttgataatatttatgggttttagttgttttggttttggaatgttgttttgtttttgttttttttaaggtttggtgttttatttttgtagttgatagatgtttttaaggttagttatttgtttgtgtttttgaatagtgtttgtttttatggtttgtttttgagggtaagttagttttgttattaggatttgttgttattttttgttggatttttttagttttattggttgtttgggtgattgttagttgtttagtattgtatttaaatagttagatgggttttttgttattggttattttgggtttattttgattttttaatatttggattgttaggttttattttttaggttattttggtttttatttttgtatttatttgtgttaggagataaaatttttagataaaaaaaaaatagtaagataatttattttaagaatttttttggt

SEQ ID NO: 2879 - DNA, 493 bp, Artificial Sequence
  chemically treated genomic DNA (Homo sapiens)
tgttttatttaatttgaggggtagttggagtattgggagaggtagttttggttttggaatatggaatttggtggttttgggtgttgtaggaaagggaagtaaatattttgttttaatagaaaataattgttttgttttttttttttagaaggtggttttaggattgtatgtttttaaattggttattttgtattttatttatatgaatttattaatagttattgtttttttattgttattattttattattttttgaagtgaattaaattttttttgtggttaataagtattgagttaggttttttatttttttttttatttttaaaatatttggggttttttgaatggtattttttgtttggttaaggaaaataagagatgaaaaatgttgttttattgtagggaaaaatataagtattttattttattattattagttattttaggtttgtgtttattagataattgtttttaggtggttgttaagggtgg

SEQ ID NO: 2880 - DNA, 493 bp, Artificial Sequence
  chemically treated genomic DNA (Homo sapiens)
ttatttttaatagttatttaaggatagttatttagtgaatatagatttggggtaattggtaatagtaaagtgaaatgtttatgtttttttttgtagtagggtaatattttttattttttattttttttggttagatggaagatgttatttagggaattttaggtgttttgaagatgaaaaggaaggtagggggtttggtttagtgtttattaattatagagagaatttggtttattttaagaaatagtaaaataatggtaatggagagataatgattgttaatgaatttatgtgagtaaagtgtgaggtgattagtttggggatatgtagttttaaggttgttttttgaagaaggaaagtaaaatgattgttttttattagaatagagtatttattttttttttttgtagtatttagggttattggattttatattttgaggttagggttgttttttttagtgttttggttgttttttaagttaaataaggta

SEQ ID NO: 2881 - DNA, 443 bp, Artificial Sequence
  chemically treated genomic DNA (Homo sapiens)
tgtagttttttttatgttagataggaggtaatatttattggaagttgttggtgttgtagtgtgttggtttgggttgagatggtgtgaaaattttgtttgttttgttgttttttaatttttttaggtagtgatagttttttggtttgttttattggtaatgtttgttgtggggttttattaatttattatatttttaatgtgtagttgttgtaggtagtgtgattttttggtgttttgttgggttgttatatttggaattgatttgggatttaaaaaggttgtggattgaggaaattttaaagtgttgtttttttttatttttggttatttatttttgagttgaggtagtgggatttggttaagttgagttaaagtgaaattgttgaaattaagaaagatagtagttaatgtgatggtagtgggtggtgagaattttttttttt

SEQ ID NO: 2882 - DNA, 443 bp, Artificial Sequence
  chemically treated genomic DNA (Homo sapiens)
ggaggaggggatttttattatttattgttgttatgttggttattattttttttgattttagtagttttattttggtttaatttggttagattttattattttagtttagaaataggtggttagaaatagaagggaataatgttttagagtttttttgatttatagtttttttgagttttaaattaattttaaatgtggtagtttagtgaagtgttaagagattgtattgtttgtagtaattgtatattggagatatgatgaattggtggaattttatggtaggtgttgttagtggagtaggttaagaggttgttattgtttgggagagttaggaaatagtgggatgggtagggtttttatattattttagtttaggttagtatgttgtggtattaatagtttttaatgggtgttgttttttgtttggtatgggagaagttgta

SEQ ID NO: 2883 - DNA, 469 bp, Artificial Sequence
  chemically treated genomic DNA (Homo sapiens)
attgaagtttgggtggaatttagttgtataattaagaagttgaatttgttttattttatttttttataatataaagagtgtgaaaaggttattttaatgtttagagagtggttttttttggaaaatatttttgaatatattatggagtagtgttaattgtagtataaaatgttttagaaattttgtaatttatgagtttaatggtatatttgaggattatgaggttttttttgtttatttataatagtttggtgattgatttagtagagaggaagtaaaatgaataattttgattattttttaatattttttttgttttgttgattttagagttttaggggtatagtatttgtaggaattgtatgtttttttggtaatattttaaaattaaatttaaaagatgaagaagaaaaatggttattagatagttataaatatgttattatttgtaaatggtattgttttgtgg

SEQ ID NO: 2884 - DNA, 469 bp, Artificial Sequence
  chemically treated genomic DNA (Homo sapiens)
ttataaagtaatattatttgtaaataatgatatatttataattatttaataattattttttttttttattttttgagtttgattttaaagtattgttaaaaagatatataatttttgtaaatgttgtatttttaaagttttgaagttagtaagataggaaaaatgttaaaaggtgattaagattgtttattttgttttttttttgttaaattagttattgggttattatgagtggatggaaaaaattttgtaatttttaggtgtgttattaaatttataaattgtaagatttttaggatattttatattatagttgatattgttttatggtatgtttggggatattttttaagagaagttattttttgaatattaaaatgatttttttatattttttatgttatagaaaaataaaataaaatagatttagttttttaattatgtagttaagttttatttaagttttagt

SEQ ID NO: 2885 - DNA, 442 bp, Artificial Sequence
  chemically treated genomic DNA (Homo sapiens)
aattatagagattgtgaggggagtagttggtttgtaaagttgtttggggtaaatttgttagagtttatgagtaaatataatttgaaaatagaggttgtttgtggggaaattagttgtttttttaataaaataaaaggaagagttttgtttagggtaatgtgatgatgatgtgtaattgttttgtattaattataatttttttttttgtttttttattgtttagtttttttttattttatagtaagaaattgaggttgtatattgtatattgggaatatttaaattggaaataattaaaatatatattttatttatagtgggttttatgtgaggagaagtaaagattgttatagttttttgagtatatgagttaatgatgtgttttgtatttttttgattttttatattttaattgtttttgttttttatttgggggtaggga

SEQ ID NO: 2886 - DNA, 442 bp, Artificial Sequence
  chemically treated genomic DNA (Homo sapiens)
tttttatttttaaatgaggaatagaggtagttaaaatgtggaaaattaagaaaatgtagaatatattattaatttatatatttaggaagttgtggtaatttttatttttttttatataagatttattataaatgaaatatatattttaattatttttagtttagatatttttagtgtgtaatatataattttaattttttgttgtagaataaaggggaattgggtaatgagaaagtaaaaaaaaaagttgtagttaatgtagaatagttgtatgttattgttatattgttttgagtaaaatttttttttttattttgttgaaaaagtaattgatttttttatgagtagtttttgtttttagattgtgtttatttatgagttttgataggtttattttaagtaattttgtaaattagttgttttttttataatttttgtggtt

SEQ ID NO: 2887 - DNA, 396 bp, Artificial Sequence
  chemically treated genomic DNA (Homo sapiens)
gtataatgggatgaaggggttttttttgttggggaatagatagttgatatgttggatggggttagggtttaaataaaggtttttgttgagtgggagtaggtataagatagatggtttgttaaatattgttagtatgtttgtgtagtgttgtgtggtggttagagtttggataatggttattagggtattgtgtagtagtgtattggttaattttagtttagttaaagttattgtttatttttgttggttttgtaaagattaaggtagtttttttgttttgaatgtattatagttgtttagtaaagtatttttgaagttttgtttgaatttttattgttaagaggggttaagtaaaaggtggtttgtgtaaggatttgttttaagtttatatgtgaa

SEQ ID NO: 2888 - DNA, 396 bp, Artificial Sequence
  chemically treated genomic DNA (Homo sapiens)
tttatatatgagtttaaaataagtttttgtatgagttattttttgtttggttttttttagtagtgggaatttagataaaattttaggaatgttttgttgggtagttgtggtgtatttaaagtagagaaattgttttaatttttgtaaaattaataaagataagtaatagttttagttgggttgaaattagttaatgtgttgttatataatgttttggtgattattatttaggttttgattgttgtatggtattgtgtaagtatgttggtaatgtttaataaattatttgttttgtatttgtttttatttaataggggtttttgtttgaattttggttttatttagtatgttagttatttattttttaataggggaagtttttttattttattgtat

SEQ ID NO: 2889 - DNA, 417 bp, Artificial Sequence
  chemically treated genomic DNA (Homo sapiens)
ggaagttttttattgttgagagtagtagttaaaaaagttgttagttatgtggttgggtttttatttttgtagaggtaggttgagttatagtttggtggtgtggatttaggtaggaattggttaatattttgaattttgagttgttatttgttttgtagtttgttgggatgtttagtttagataatatataaagttttttggatatgggataaatttaggtttatggaaagagtaggaaggttaaagtgtgtggtattttgggtaatgatgaaggtgtaattagggagttgatatgtttgttttaaagttaagaattttaggataatttgttatttagttgaagttagtgtagttgttataaaaaagtttggggataaaagtatgttttttatttgtttttttgtttttttgtatatt

SEQ ID NO: 2890 - DNA, 417 bp, Artificial Sequence
  chemically treated genomic DNA (Homo sapiens)
ggtgtgtaagaagatagggaaataagtaaaaagtatgtttttgtttttaggtttttttgtagtaattatattggttttagttggataataaattgttttggaatttttggttttggagtaaatatgttagttttttggttatgtttttgttattgtttaaagtattatatattttaatttttttgttttttttataggtttgggtttgttttgtatttaggaaattttatatgttgtttaaattgagtattttagtaggttatgaggtagatggtagtttaggatttagaatgttgattaatttttatttggatttatattattaagttgtaatttagtttgtttttgtagaaataggagtttagttatgtggttaatagtttttttaattgttgtttttagtaatgaggaattttt

SEQ ID NO: 2891 - DNA, 449 bp, Artificial Sequence
  chemically treated genomic DNA (Homo sapiens)
ttttatttttaatatatttttttagagttaggtgagtttggaagtttaggtttttggaaggtagagttatatagggtaagaggtttaaggagttgtgaattttggttggagaaattttttttttggttttgttaaatttaataggtataattgtattttgttgattttaatttttttggtgggtttaattggttttggtattgttttattttttgttttgtttttgtagaggtaaagagggtgtttgtatagttggtgtagggtggggaagtttttttttgagggtgggtaggggttttggtagtttttaggtgggtggaggaagtttttttgtgttttatttttgtgtttttaagggagtgttgagaagtttggggatttttagggagtagttggttggagtaggtagttttgtagatttggaattaggttagatttttattttagtg

SEQ ID NO: 2892 - DNA, 449 bp, Artificial Sequence
  chemically treated genomic DNA (Homo sapiens)
tattgggatgagagtttggtttggttttgaatttatgggattgtttgttttagttagttgttttttgggagtttttaagttttttagtatttttttggaggtataggggtggggtatggggaaattttttttatttatttaggggttgttagagtttttgtttatttttaagaaggggtttttttgttttgtattagttgtgtagatattttttttgtttttataggggtaggataggaagtggggtaatgttaagattaattaaatttgttaggggaattaaggttagtaggatgtaattatgtttgttggatttaataaggttagagggaaggtttttttagttagagtttatggttttttaggttttttgttttgtgtagttttgttttttaggagtttaggtttttaggtttatttagttttggaagaatgtgttgggggtgaag

SEQ ID NO: 2893 - DNA, 340 bp, Artificial Sequence
  chemically treated genomic DNA (Homo sapiens)
gagggttaaggttaggttgtttttaattttattgttttttgtttttgttttttttattttttagtagtagagttgtttaaatttggttttaggagggaatgggggaggtagtggtaggtgggtgttgttagaggttagggtgttgtttttgtttagttggttggtatttttgttgtttggaggagggtaggggggtttggtagtttttttttggaaagggagatgtttgtattttttgatatatattgagtaatgtgtaaatgatatgtaaattgagttttaaattagtattttagttagggaatagtttgagagttgtttttgggatgagagtagaagg

SEQ ID NO: 2894 - DNA, 340 bp, Artificial Sequence
  chemically treated genomic DNA (Homo sapiens)
ttttttgtttttattttaaaagtagtttttaagttgttttttggttgagatgttgatttgaagtttggtttgtatgttgtttgtatattatttagtgtatgttagaaggtatgaatatttttttttttgggagagggttgttgggtttttttgtttttttttagatagtaaaaatgttagttggttagatgggagtgatgttttggtttttgatggtatttgtttgttgttgttttttttatttttttttggagttaaatttaggtagttttgttattgagagatggggagagtggaggtaggaaatggtgaggttggaggtagtttggttttggttttt

SEQ ID NO: 2895 - DNA, 438 bp, Artificial Sequence
  chemically treated genomic DNA (Homo sapiens)
ggtagtgtggatatgagttaagttttagttattttggatggtggtgggggtggtggggttgatgggttgtttgaagttggttgttaggagtttgtttggttatagttgttagtaggagagattagttggtggtgtagggtttattggtttgggtttggaatttgagttgtttttagaggtttagtttttttttgggtttttataaattggtttttgtttttgggttggttaagatttagtagtttgggttttttgtttgtttgtggtatttgtgttgagttggtggggtaaatgggttagttttttttttgtttatgtttaggatgttgttttaggattaaatggagatgtaattttttatataaatttatgataatttagatggagtgattgtaattggttttttaatgggggttttgtttagagttggtggttaga

SEQ ID NO: 2896 - DNA, 438 bp, Artificial Sequence
  chemically treated genomic DNA (Homo sapiens)
tttagttattagttttggataaaatttttattgaaaagttaattataattattttatttaaattgttatggatttgtatagaaaattatatttttatttagttttaaagtgatgttttgggtatggatagaggggaggttggtttatttattttgttagtttagtgtgggtgttgtgggtagatagaaagtttaagttgttgggttttggttggtttaggaataaaggttagtttgtgggggtttagagagaagttgggtttttgagggtagtttagattttaggtttgggttgatggattttgtattgttagttggttttttttgttggtggttgtggttagatgagtttttgatagttggttttaggtggtttattagttttgttatttttattattatttaaggtggttggagtttggtttatgtttatattatt

SEQ ID NO: 2897 - DNA, 364 bp, Artificial Sequence
  chemically treated genomic DNA (Homo sapiens)
tggggtgagtgaggtattatttttttagttagaaagtgtagttttgttaggagttttttggttagtgttatttttttttgtatattgtgttgttttaggttgtgtagaagttgtagtttttgtttagttaaaaggttttgggagggtaaaaagatagtatgagtggaaggttttagttaggtgtttttgagtttttttttgaggttgtattaggttgtgtattaggagttttttttggtattgatttagggtattgggttgggttattgttttgtgtttggtattgtggtaaaattgtttgtagtgagtagggatgtgtatagtagataggaattaaaggaaaggagaaggatagtgattttgg

SEQ ID NO: 2898 - DNA, 364 bp, Artificial Sequence
  chemically treated genomic DNA (Homo sapiens)
ttaaggttattgtttttttttttttttttgatttttgtttgttgtgtatatttttgtttattgtagatagttttgttatggtgttgagtgtaggatgatgatttggtttaatgttttggattgatgttgagggaaatttttggtgtatagtttggtatggttttgggaagggatttaggggtgtttagttggggttttttgtttatgttgtttttttgtttttttagaattttttggttaagtaaggattgtgatttttatgtggtttgagatggtgtaatgtgtaaaagaaggtggtattggttaagaagtttttggtaaaattgtgttttttggttgaggaggtaatgttttatttatttta

SEQ ID NO: 2899 - DNA, 386 bp, Artificial Sequence
  chemically treated genomic DNA (Homo sapiens)
aggtttttattattttttaggttgttttttgtttagagattaatttgtttatttttttgtttggagatgaattgagggaattaattgtttattagtgtaggtttttttaattttgtattgttttgttttaaatgtttattttttggtaaaatatgtttttgttgttgataaggttgtttggaaaatgttaattttatttttgaattaaaatttgtttttttatttttgttttaataaaaatgaagtatttggaaatattgttatggtgtagaagagaaagatttgatataatttttaaaatgtttttaattatgttgatttttgaatggtttgttttttaattttgattttttttttattttttaattttttgaggtagtatttat

SEQ ID NO: 2900 - DNA, 386 bp, Artificial Sequence
  chemically treated genomic DNA (Homo sapiens)
gtaaatgttgttttagggggttgggagatggggagggggttagggttagaggatagattgtttagaagttagtgtgattgaaggtattttaaaaattatgttagattttttttttttgtattgtggtaatgtttttggatgttttatttttattaaaatgagggtaagggaataaattttaatttgaggataaaattagtattttttaagtagttttgttagtggtaaggatatattttgttagaaaatggatatttggggtggggtggtgtgaggttgggggagtttgtgttgatggatgattagtttttttggtttatttttaggtaagggagtaaataaattaatttttgagtagagagtagtttggaagatgatggaagttt

SEQ ID NO: 2901 - DNA, 460 bp, Artificial Sequence
  chemically treated genomic DNA (Homo sapiens)
ttaaagggggagaaatggggatattttgtgttttttgttttttgttataatgagtgaaatatattaggttgtaaaaggaaatgttgtttgagatgtagttttgatgttttattgttaagttttatttattgatgtaaatgtaattgttggaaattggagtttttattaatatatatatttttatatatttggggttttttttgtttttttttttttttttgggtttgtttatttattttttagggttagttttgttgttttttgggtatgtttatgttaagtttggagttttgtattggttttatatttttttatggtagataagattttaatagaattttattgttttttagagtttagtaatgtattttggaaattaggtggttatatattaaagttattgtttttttttataaatgggtttttttaaagttagtgattatgggggttttgataagtt

SEQ ID NO: 2902 - DNA, 460 bp, Artificial Sequence
  chemically treated genomic DNA (Homo sapiens)
agtttattagagtttttatggttattggttttgagagagtttatttataagggggaataatggttttagtatgtagttgtttaatttttagaatgtattattgagttttgaggagtaatggaattttattaaagttttatttgttatgggagggtatgaaattggtgtggaattttaggtttggtatagatatgtttagaaagtagtagggttgattttaggaggtgggtgaataagtttagagggagaggggggagtaggaggggttttggatgtgtgaaaatatgtgtgttaataagagttttggtttttagtgattatgtttatattagtgaataaaatttggtaataaaatattggagttgtgttttagatagtatttttttttatagtttggtgtattttatttattataataggaggtagggagtgtgaggtgtttttatttttttttttttaa

SEQ ID NO: 2903 - DNA, 441 bp, Artificial Sequence
  chemically treated genomic DNA (Homo sapiens)
gttaatttttttttgatgttgtatttttttttaaaaattagagtttaggtaggtaatgtttatagtattttattttaataatattggaaattggtatagttagggttattatagtggtggggtgggagttttgatggtgattaggggagttgtaagttttttgttttatttaaattttgggtagtaatttagaaaatttaattaaagggggagaaatggggatattttgtgttttttgttttttgttataatgagtgaaatatattaggttgtaaaaggaaatgttgtttgagatgtagttttgatgttttattgttaagttttatttattgatgtaaatgtaattgttggaaattggagtttttattaatatatatatttttatatatttggggttttttttgtttttttttttttttttgggtttgtttatttattttt

SEQ ID NO: 2904 - DNA, 441 bp, Artificial Sequence
  chemically treated genomic DNA (Homo sapiens)
ggaggtgggtgaataagtttagagggagaggggggagtaggaggggttttggatgtgtgaaaatatgtgtgttaataagagttttggtttttagtgattatgtttatattagtgaataaaatttggtaataaaatattggagttgtgttttagatagtatttttttttatagtttggtgtattttatttattataataggaggtagggagtgtgaggtgtttttatttttttttttttaattaaattttttaaattattgtttaagatttggataaagtgaaagatttatagtttttttaattgttattgaggtttttgttttattattgtggtggttttgattgtattggtttttaatattattaaagtgaaatattgtgggtattgtttgtttgggttttggtttttaaaaagagatgtagtattaggaagaaattggt

SEQ ID NO: 2905 - DNA, 473 bp, Artificial Sequence
  chemically treated genomic DNA (Homo sapiens)
aatgttgaagttggggatattttttaagttaatttttgtgtttgtggtgtggttatggttttggttattatttttggttatagtgttttggagatgttgatgttgatttggattagaggtgttagtttgggtattgttagtttttatagttattgattagagttttagggtataggtagttagtaatttatttgggtgttttagggattgttattggtaaagtgatggttttatagggattaaatgtgaagttaaagtaggatatgtaggttggagataaggttaagaatagattttttttagtgtttaagtgttgtttgttagaaattgatagttttatggttttggttggtgataggtatagggtgataataatattatatgattagtattattggaggataggttgttattggtttttagagataaggaaataatgggtgatttttttgtttagggaaaggtttgtatgg

SEQ ID NO: 2906 - DNA, 473 bp, Artificial Sequence
  chemically treated genomic DNA (Homo sapiens)
ttatgtaggtttttttttaggtagaggggttgtttattgtttttttatttttgggagttagtgatagtttgttttttaatgatgttgattatatggtattgttattattttgtgtttgttattggttagggttgtggggttgttaatttttgataaatagtatttgagtgttaaagggaatttgtttttggttttatttttgatttgtgtattttgttttagttttatatttggtttttgtggggttattattttgttaatagtagtttttggggtatttagataagttgttagttgtttgtgttttggggttttagttaatggttgtggggattggtagtgtttaggttggtatttttggtttaggttagtattagtatttttggggtattgtggttagagataatggttagagttgtggttatattataggtatagagattagtttggggaatgtttttagttttaatatt

SEQ ID NO: 2907 - DNA, 500 bp, Artificial Sequence
  chemically treated genomic DNA (Homo sapiens)
tgaaagggaggtatagttaatgattttgtatgtattttagaaattgatttttttagattttaatagaagttatttaagtgtatagatgtttgttggttttatatggaggttttgttggttatgaaaaaatatttttttttaattttttgtttaatttgttttaagttggtaatgaaatttgtgaatttgtgttttttttttataggaaaaatagaattttgattttttttaaaaattagaatgtaataggataatggagaaattagttttaatagtatattttttgtttgttttagagtggtgatgtaaatatgatgatgttatgtttttggggtttttgaggtttttgttaaaagtatagtagtttaggtggatttgtgtttattgtatgtttttttggtggatttttgttgataaattgtatgtttgtttttttgaaatagtattatgaagttgttaatgtttttgtataaagattattttattttgtttgttttggg

SEQ ID NO: 2908 - DNA, 500 bp, Artificial Sequence
  chemically treated genomic DNA (Homo sapiens)
tttagggtaaatagaatggggtggtttttatgtaaagatattaataattttatgatgttattttagaagagtagatatataatttgttgatagaaatttattaaagaagtatgtggtaggtatgaatttatttaagttgttatgtttttggtagaaattttaaagattttaaaagtatagtattattgtgtttatattattgttttgaaatgaataagaaatgtgttattgagattgatttttttattattttgttgtgttttgatttttaaaagagattaaaattttattttttttgtagaaagggaatatagatttatagattttattattaatttaaaataaattgagtaaaaaattagaggggaatgtttttttatagttagtaaggtttttatgtaaaattagtaaatatttgtgtatttgagtagtttttgttaaggtttaaggaagttagtttttggaatatgtgtgagattattgattgtgtttttttttta

SEQ ID NO: 2909 - DNA, 333 bp, Artificial Sequence
  chemically treated genomic DNA (Homo sapiens)
ggagaaatgagaaggaatatagtaattgaataagatgatgtttgtttatgatatttatgatgttttttaaggtttgagatatattgttttttgtttaattagttattgtgattatatttttatggagattattatgtttgtatttataatagatatgtgtgtatttattaaaggaatatagttgttaaatgtatgttttgggtttagggtggagtggttttttatagtatagttattggagttgttgtaaaaagtgttagaaaataagtaaggagttgtttttatttatgaagagaggttttttttggtattaggttttgggtttaggggagt

SEQ ID NO: 2910 - DNA, 333 bp, Artificial Sequence
  chemically treated genomic DNA (Homo sapiens)
atttttttagatttagggtttgatattagagagagtttttttttatgaataaggatagttttttgtttgttttttgatattttttgtagtagttttgatgattgtgttgtaaaaagttattttattttgggtttagagtgtatgtttggtaattgtgtttttttaatggatgtatatgtgtttattgtgagtataaatataatggtttttatggagatatggttataatgattaattagataaaagatagtgtattttaagttttgaaagatattatggatgttataaatgaatattgttttatttggttgttgtatttttttttattttttt

SEQ ID NO: 2911 - DNA, 492 bp, Artificial Sequence
  chemically treated genomic DNA (Homo sapiens)
tagttttgttaggttttttaggatggtttttattttgagttatatttttaggaatattttgttattttttattttttttttgggtttatattatgaaagttttatgtagagtttgttattttagagggatatatattatttaaatttgataagataatttaattttattttgtgtttgttattggtgataaaattaggagatttttatgatttagtatttttagtaagattgttaggaatttattatataaggtttaattggatttttttttgtagatggttgggagttatgggttggaatgtaatttggtaatatatttggggaaataaatgtaaaatgtttgttttagagatttagataaggtagtaggtttttaagttttttaagaattggatttgttttttttgggttttgaagggtgatttggggaggatttatgttgttggaggaggagggaatggtgggttttttttttttttattttttgattt

SEQ ID NO: 2912 - DNA, 492 bp, Artificial Sequence
  chemically treated genomic DNA (Homo sapiens)
gagttaagggatgaggggagaaagagtttgttattttttttttttttgatagtgtaaattttttttaaattgttttttagggtttaggaaaagtagatttgatttttggggagtttggaggtttgttgttttatttaagtttttggaataagtattttgtatttatttttttaaatgtgttgttgaattgtgttttagtttatggtttttagttatttgtagagagaaatttagttagattttgtataataagtttttgataattttgttgaggatgttgggttataaaagttttttggttttattgttggtaatagatatggagtgaaattgagttgttttattaaatttagataatatatatttttttagagtagtaggttttgtatggggtttttatggtatgagtttaggagggggatagggagtggtagagtgtttttggggatgtggtttagggtgggggttgttttggaaagtttggtaggattg

SEQ ID NO: 2913 - DNA, 301 bp, Artificial Sequence
  chemically treated genomic DNA (Homo sapiens)
tttagttttggaaataatagtaggtaagatgtggtttgagtttgggtttatttagttgggtttggttttgttttgagggtttgttgtttgttgtgattatagtaggattagtgttttagattttgtttaaagtttggtggttattgtttgttttgtagtttattttttgtagttttttgaggttttagtgattatgttattgaaaattttgtttttattttgttaattttgtagtaaattataggtttggggaggtgtgggttttttttttaaataagatttaattttatttagttgtttt

SEQ ID NO: 2914 - DNA, 301 bp, Artificial Sequence
  chemically treated genomic DNA (Homo sapiens)
ggggtagttaagtggaattgaattttgtttaaggaggaggtttatgtttttttaggtttgtaatttattgtgaggttgataagatgaaagtggaatttttagtggtataattgttgggattttggggagttgtgggagatgagttgtgaggtaggtggtggttgttaggttttaagtaagatttggggtattgattttgttgtgattatagtaagtgatagatttttggagtggggttaggtttagttggataagtttaggtttaggttatgttttgtttgttattgtttttagggttgag

SEQ ID NO: 2915 - DNA, 351 bp, Artificial Sequence
  chemically treated genomic DNA (Homo sapiens)
ttttttttatttttattggagtttaaattataaatagttttagttggaatttgattgtagatttttttagtaaagttagtatttttaggattttttattttggatggggattgggagtgtttttttattaattatagttttttaattaatagttttgagtttggaataaaaggtgtttattgggagaatgttagtgggttttgaattttggttgtttgtttttatttggaggatttggtgttttggggagtaggtatggtatggtttagtgttgagtttggtaggggatggggtttggagggtgagtagttggtaggttggttgtttgtttttattttggatatttttata

SEQ ID NO: 2916 - DNA, 351 bp, Artificial Sequence
  chemically treated genomic DNA (Homo sapiens)
tgtggagatgtttaaggtggagataggtagttggtttgttagttgtttgttttttaaattttattttttgttaggtttagtattgagttatgttatgtttgttttttaaggtgttaggttttttaaataaaaataggtggttagagtttagggtttgttggtgtttttttggtaagtattttttgttttaggtttagagttgttaattaaagagttgtgattaatgaggaagtatttttggtttttatttaggatgagaggttttggggatgttgattttgttggaggaatttgtagttagattttaattggagttatttatagtttgagttttagtaggggtgggagaaa

SEQ ID NO: 2917 - DNA, 440 bp, Artificial Sequence
  chemically treated genomic DNA (Homo sapiens)
tagtgttagttgaggaggtttttttttgtttttgtttgttttttttgattgttatgtaatgtttggtagtaggaggtaaatttttttttaatttttaggtttgttatagtgtatgaattttattgtggggagttatagtgattgagtttagtagttaggttttatgttgagtgttataaattaggtttattattagttttttttggtagatgttatagttaagaatttgtttattgtttgtgagatttagttgtttttgtatattgttaaattagggttgatagatttattggggatttaggggatttttatgatattttggttgggtgttgttaggaattttattttgagagagtaggaggtgatatagtttttggtaaggtattttagatttgagattttatagtttgatgtatggggagtagaattagggtatgatt

SEQ ID NO: 2918 - DNA, 440 bp, Artificial Sequence
  chemically treated genomic DNA (Homo sapiens)
gattatgttttgattttgttttttgtatattaggttgtgagattttaggtttgagatgttttgttaagggttgtgttattttttgtttttttagaataagatttttggtaatatttagttagagtgttatgaagattttttaaatttttggtggatttgttagttttggtttaatagtatgtagaggtggttgggttttgtaagtagtgggtaggtttttggttatggtatttgttaggagaagttggtaataggtttgatttatgatatttagtatgggatttggttgttgagtttaattattgtggttttttatggtggggtttatgtgttgtaatgggtttggaaattggagaggaatttattttttgttgttgaatattatataataattaagggaaataagtagaggtaggagggggtttttttagttggtattg

SEQ ID NO: 2919 - DNA, 476 bp, Artificial Sequence
  chemically treated genomic DNA (Homo sapiens)
ggggaagaggtatttggattaattattggttgtttttaaatgtttaaagttggtatttatatatttgattttttttatagttttttttttttagatttaatgtttaggtttttttgattttaaaattgggttatttgaatgttaaatttttgataattttttaatagaggtgtttattaatttgtgttaaattagagtttagtgtttttggaaatatatgtgatatttatatgaatattaaatgtttttattaggtatagtatttatatgatgaatattaaatgtagagtttaatgtagggatatagattttgttttgaggatttgttaatatatttttgtgtttttttagtggtattggttagttttgtttgttgtttatttttaggtgatgagatgtggtaattgtggtattggttgaaataaataaatggtattttaattattaagtttagagatggagtagtaaaggaggtt

SEQ ID NO: 2920 - DNA, 476 bp, Artificial Sequence
  chemically treated genomic DNA (Homo sapiens)
agttttttttgttgttttatttttgaatttggtgattaggatgttatttatttattttagttaatgttataattgttatattttattatttggaaataaatagtaaatagggttgattggtattgttgaggaaatgtaaagatgtgttggtaagtttttgaagtgaaatttgtgtttttgtgttgggttttgtatttggtatttattatgtaagtgttgtgtttaatgaaggtatttggtatttatgtgggtgttatatgtatttttagggatgttgggttttaatttagtataggttaatggatatttttattaaagggttattgaaagtttgatatttaaataatttagttttaaaattagagaaatttagatgttaaatttgaaggagagaaattgtgagagaagttaagtatataaatgttaattttagatatttgagagtaattaatggttgatttaagtgtttttttttt

SEQ ID NO: 2921 - DNA, 497 bp, Artificial Sequence
  chemically treated genomic DNA (Homo sapiens)
attttttgggtggttaattttttttttttatattttagtgttattttaagggaaaagaaatgtaggatatggaataaatagagggaaatttgtttgatttgttgttaatgtgttagtgttttgttttgtgggtttaatttgtagaaggtaggtttttgttttgttattttttggtatttaatagggtttgtttttagtgatttagttgggtttttttagatagaaaatagttatttagtgttttttatattattaagaaaatgagattattttttgaggagattagtagtttttggttgttgttgaaagggtgttttgtttgtttgtttggttgaaaggtattatgtagtttaggtttgtttaaaattagtttttttataaattatttgtataatgaagtgtttgtttttgttttttgatatatttgtgtttttgtttatttttaatgatgatatggttttttttgtttttatttggttttttattttttatatttt

SEQ ID NO: 2922 - DNA, 497 bp, Artificial Sequence
  chemically treated genomic DNA (Homo sapiens)
ggagtgtggagagtaaagagttaaatggaaatagaaaaagttatgttattattaaaaataaatagagatataaatatgttagagggtagaggtagatattttattgtgtaagtgatttatgaggaagttaattttaaataagtttgggttgtgtggtgttttttagttaaataaataggtaaagtgtttttttgatagtagttgagagttgttgatttttttaaggaataattttatttttttggtggtgtaaaaggtattaagtggttgttttttgtttaaggaaatttggttgagttattgaaggtaggttttgttaaatgttagagagtaataagataaagatttgttttttataagttaaatttataaaataaaatattgatatattaataataaattaagtaggtttttttttgtttattttatgttttatatttttttttttttaaaatggtattaggatatgagagagagggattggttatttaggaaat

SEQ ID NO: 2923 - DNA, 396 bp, Artificial Sequence
  chemically treated genomic DNA (Homo sapiens)
atttgtatttaagtaagattgtagtagtttttaattaattaatatgtttattagtatgaagtaattgtgttttgtttgtgattggtattttatttttatttattaaatatttattgggtattagtgatgtgttaagttttgtgttggaatttgagatgatatagatgattgatgtggtttttgtttttgggaagtatgtagtttaggaaagttatagaatgtagtttttaagaagaagttattggagtaagtagatgaaggttgggaaattatgtaagtttagggtagattagttaaattgtaatgggaatgtagttagttatttattttgaggttttaaagtggaataaaagggattgtaatagtttagattttttttttttttttttagggata

SEQ ID NO: 2924 - DNA, 396 bp, Artificial Sequence
  chemically treated genomic DNA (Homo sapiens)
tgtttttgaggagggaaaggggaaatttaagttgttgtagttttttttattttgttttagggttttagagtgagtagttagttgtatttttattgtagtttggttggtttgttttaggtttgtatgattttttaatttttatttgtttgttttagtggtttttttttgggagttgtattttatgatttttttggattgtatgttttttaagggtggggattatgttagttatttgtgttattttgagttttagtatagggtttggtatattattggtatttaataaatatttgatgaataaaaatgaggtgttgattataggtaagatataattgttttatgttaatagatatgttgattggttaagaattgttatagttttgtttgggtgtagat

SEQ ID NO: 2925 - DNA, 391 bp, Artificial Sequence
  chemically treated genomic DNA (Homo sapiens)
aatagttttgtttttatgggtttgtttgttatagattagttagtgggtagattgttttggttggaaatggagatttagataatgttagagtggataatggtgtttgaatgttgttaggtgttaattaggatttggtaatgattttgttgtgtagattgaagtgtgagtatttggagttattatttaaggtttgtttttgtaattagatgattgtataattttaatatgattaattttgttggatgtgaattgtgtagttgtaattataaaataaggtggtatttttgtttttttgttgaatataaatattatatatgtgtaagttataattttataatggttgtttttggtaagaaagagttttgttagttagaagatgtagttgagggga

SEQ ID NO: 2926 - DNA, 391 bp, Artificial Sequence
  chemically treated genomic DNA (Homo sapiens)
tttttttaattgtattttttgattgataaagtttttttttgttaaaagtgattgttataaaattatgatttgtgtatatataatgtttgtgtttaataagaaaatagaaatgttattttattttgtggttatagttgtataatttatatttggtaagattgattatattaaggttatgtaattatttaattgtagagataagttttgagtaataattttaaatgtttgtattttaatttgtatagtagagttattgttgagttttgattagtgtttgatagtgtttgggtattattatttattttggtattgtttaaatttttatttttagttgaagtaatttatttattaattgatttatgataaataggtttataagagtaaagttgtt

SEQ ID NO: 2927 - DNA, 470 bp, Artificial Sequence
  chemically treated genomic DNA (Homo sapiens)
gtaaaggtttggtggggtggggtaggggttataagagattttttatggaatttttatttggaatagttagattgagtattaatatatattgaatagttaaattatatattattgatttgttaaatgtatttgtatataaataagtatgattatttatggaggtttgagtagtggtatttttttttagtgttatgattatagatggatggttttagttagatatgaattagggatgttgttatttttgttgtaaagttagtggttgatttaaaattatatttattggagtatgtaagtgtgatagtttagtggtgagtttgggataattagtttaaaagataagataaatgatttttaaaattggtattgtgatgaagattttattttatttttttgttatagttagtttagttttgatgttaaaaatatagttgaagataattaattaggaaatgttaataggtaggatt

SEQ ID NO: 2928 - DNA, 470 bp, Artificial Sequence
  chemically treated genomic DNA (Homo sapiens)
aattttgtttgttaatattttttagttaattatttttggttgtatttttggtattagggttgagttggttgtggtgggggggtagggtgggatttttgttataatattagttttaggagttgtttattttgttttttagattaattattttaaatttattattaggttgttatatttatatgttttaataaatgtagttttaaattagttgttgattttgtggtaggggtagtagtgtttttggtttgtgtttaattagggttatttatttgtaattatggtattgaggggaggtgttattgtttgggtttttatgaatgattatgtttatttatatgtaaatatgtttgataaattaataatgtatgatttagttgtttagtgtgtgttagtatttggtttggttattttaggtgggggttttatggagggttttttgtggtttttgttttattttattaggtttttgt

SEQ ID NO: 2929 - DNA, 493 bp, Artificial Sequence
  chemically treated genomic DNA (Homo sapiens)
gtaattttgatattatttttttaaggtagtaatagaagggttttttttatttattttttatgtgtttttgatattattttgtgtttttggatttttttattgtatgttttttagaaataaattaagtttgaataagttgttttagttaatgaagtgtgtttttggttttttttttgtggtttagaattatttggtaaaatattaattgttttaggatgtatttttttttagttttgaaatattgtaatattaagttattataaataaagagtattgagataataatatataagaatgtgtataaatggaaattattgtaatttttttttaaattaaggatgtgtggatgttttatgaataaatatttaggatatttggataaatatatattatgtgtttatatagataaaaatagaaaggagtatttttttttattttatttttttattttaagttatataagttttttgtagggtataagtttagggtaatt

SEQ ID NO: 2930 - DNA, 493 bp, Artificial Sequence
  chemically treated genomic DNA (Homo sapiens)
gattgttttgggtttgtgttttgtgagaaatttatgtgatttggggtgggggagtgaggtaggaaggaatgtttttttttgtttttatttatgtgaatatatagtatatatttatttagatattttaaatgtttatttatgaggtgtttatatgtttttaatttaaaaaaggattatagtagtttttatttatatatgtttttgtgtgttgttattttaatgttttttatttgtggtaatttagtattgtaatattttaaaattaagagaaaatgtattttaaaataattggtattttgttggataattttgaattatggagaaggagttaaaagtgtattttattagttggaataatttatttgagtttaatttgtttttaagagatatatagtggaaaaatttagaagtgtaaaatagtattaaagatatatagaaaatgaatgaaaagggtttttttgttgttgttttggaaagatggtattaaagttgt

SEQ ID NO: 2931 - DNA, 385 bp, Artificial Sequence
  chemically treated genomic DNA (Homo sapiens)
ggagatagtgaagttgtttgtgtgggttgggggagtttgtttttgtttttgttttagtttatttttggtttggtttgagtattttgagaagtgggtttaggagaggtttttggatttttgggtttttggatagttagggtgagggtgttttgttatatttttaggagagagtatatttaaaataatttttttttttaaaaatttagtgttaatggattttagatgtttgtttgttatataatggggtttgttttaatagtgttaatttttagatgtgtagtttggaattaagaagtttattggttttttgaggatattgtgagttaagttgagagttgtttgggggagagatatggatgtgtagaattagggatgggagaggagt

SEQ ID NO: 2932 - DNA, 385 bp, Artificial Sequence
  chemically treated genomic DNA (Homo sapiens)
gttttttttttatttttggttttgtatgtttatgttttttttttgggtagtttttagtttggtttatagtgtttttagggggttaatgggttttttgattttaggttgtatatttggaagttgatgttattaaaataaattttattatataataaatggatatttggaatttgttagtattgagtttttagaaaaagaaattgttttggatgtgtttttttttaagaatgtggtaaagtgtttttattttggttgtttaggaatttagggatttaggggttttttttgggtttattttttaaggtatttaggttaggttagaggtgggttggggtagagatagagatagatttttttggtttgtataggtaattttattgttttt

SEQ ID NO: 2933 - DNA, 440 bp, Artificial Sequence
  chemically treated genomic DNA (Homo sapiens)
gaaaagaagattttgagtggttaagtgaatggagtagtttttatttgtgttttttgttgtttagtttggttttttggtatttttggtttttaatgggtttttttttaaggtttagtgtatttgggagttttttagttttggggattttgtagtgttttggatagatttttgtgaaattaggtgttgagttatggtgtatttatttttgggtttgttgtttttattatttttgtagtatttttaaggatagggtttagtgtttggtagagatttaattaattgttatatttttgaatttatttgttagtaggtaatttttgagtgtttattaaattttagatattgatataaaatgggatattgtggttaataagataaagtttttgtttttatggaataggtgaaagattaaatataaggggtaggtagtgataaatgtt

SEQ ID NO: 2934 - DNA, 440 bp, Artificial Sequence
  chemically treated genomic DNA (Homo sapiens)
agtatttattattatttattttttgtatttagttttttgtttattttatgaaagtaagggttttgttttgttgattgtaatattttgttttatattaatgtttggaatttagtgggtatttaaagattatttgttaatgaatgaatttgagagtgtaataattagttgaatttttgttaaatattgggttttgtttttgaggatgttataaggatggtaggggtgataggtttgaaaataaatgtattatagtttgatatttgattttatggagatttatttaaggtgttgtagggtttttggggttggaaaatttttgggtgtgttgggttttgggaagaagtttgttgggagttaggagtattagggagttgggttgagtggtagaagatgtgggtggaggttgttttgtttgtttggttatttaggatttttttttt

SEQ ID NO: 2935 - DNA, 422 bp, Artificial Sequence
  chemically treated genomic DNA (Homo sapiens)
ttgtattagaaggaattagtggtttattgttattggtaaagttgaggtagtgggaggattattttttttttgggtttagtaatttttttagtggttagtagatagtagtataatggttagttagtgtgaaattgtgtaaattgttttataaataatttgtaatgtataggtaatagggagaggttatagtttatggataaatgattttttgttattttggggtattaaattagggataatttggattttattatggggatttattaattattatgggttttttgtatgtaagtttgttgggatttaggtttgtttggtgttttttgtggtattatgatgggggtaaaatatttttaagtagggttatgagaaagagaatgtaagtatttttaataaattagttaggggtgaattttgtagga

SEQ ID NO: 2936 - DNA, 422 bp, Artificial Sequence
  chemically treated genomic DNA (Homo sapiens)
ttttatagggtttatttttggttggtttgttaaaggtatttatatttttttttttatggttttgtttggaagtgttttgtttttattatgatgttataagaagtattaagtaggtttgagttttagtaggtttgtgtgtgggaaatttatagtagttaatgaatttttatggtgaggtttggattatttttggtttaatattttgaaatggtagggagttatttatttatgagttatggtttttttttgttgtttgtgtattatgagttatttatgaggtaatttgtatagttttatattggttggttattatgttgttgtttgttaattattaggagggttgttgaatttagagaaaaaatggtttttttattgttttggttttgttagtgataatgagttattgattttttttagtgtag

SEQ ID NO: 2937 - DNA, 186 bp, Artificial Sequence
  chemically treated genomic DNA (Homo sapiens)
tttttagttttggattgggttaatgaaagtttgaaaaagaaaaaaaaaaaaaattaaattttaatgtagttggagtgtaaaggttgtttggttttgttttttggtgggggaatgtgttgtgttggaggtgtgaataggagttgtagatggtgagttttattgttgtaaatgttagggtagtgaagt

SEQ ID NO: 2938 - DNA, 186 bp, Artificial Sequence
  chemically treated genomic DNA (Homo sapiens)
gttttattgttttggtatttgtagtggtgaggtttattgtttgtggtttttgtttgtgtttttaatatagtgtatttttttgttgggaaataaagttgagtggtttttgtattttggttatattgagatttaatttttttttttttttttttttgggtttttattggtttagtttaaggttgggga

SEQ ID NO: 2939 - DNA, 420 bp, Artificial Sequence
  chemically treated genomic DNA (Homo sapiens)
tagattttttggtagtttttttgtgtagaatagttatttggttttattttttttgtaaggttggagttgttgttttatttttttgatttatatataataataaaaaaaattatttttgttatgtgtttttttatttttattaagtggttgaaatttaatttgattgtttgagtatttttggttggatttgggttggagttgatgggattttatgagggttgtaaaagttaagtttttaatatgttttaaataaattggtgtgtaaaggagaaatgttagaagaaggaatatggttgtagatgggaggtttgggaatgttagttgtagtattggggtataggtggttttaataatgtatataagtttggttgtaagttgtttttataagagtagaagaggttgtagaattatttttaggag

SEQ ID NO: 2940 - DNA, 420 bp, Artificial Sequence
  chemically treated genomic DNA (Homo sapiens)
tttttgagagtggttttgtagttttttttgtttttgtagaagtaatttatagttaaatttgtgtgtattattaaagttatttgtgttttagtattatggttagtatttttaagttttttgtttgtagttatgtttttttttttaatgttttttttttatatgttaatttgtttgagatatgttaaaagtttgatttttataatttttataaaattttattgattttaatttaaatttagttagaagtgtttggataattagattgagttttaattatttgatggagataaagaaatatatagtaagaatgattttttttattgttatatatgagttaagggaataaaatagtaattttggttttgtaagggagatagaattggatggttgttttgtataaaagggttgttaaagaatttg

SEQ ID NO: 2941 - DNA, 437 bp, Artificial Sequence
  chemically treated genomic DNA (Homo sapiens)
tagtttggttttttatttttgttggtgttttgtgtttttggttttggagtaggtttgagttggaatgttttgtaagaaagggggttttttagagttttttagagtggttttggttttgggtagttaggggtgtggggttttggggaggggggttttggttgattgatgagaattttaaatgttttttagttttggttgttaattatttttagattggttgggttagggttagggttgttgttgtttggttttataaatagtttgttgttttagatggtggttggttttagtttggtgagtaggtttatgggggattggggggtggtagtaggtggaggatttttattttattagttgttttagttgttatatttttatattgttttgagttggggattttgggttagaaggggtggtagaaattgaatttattgttt

SEQ ID NO: 2942 - DNA, 437 bp, Artificial Sequence
  chemically treated genomic DNA (Homo sapiens)
gagtaatgggtttagtttttgttattttttttggtttagggtttttaatttagggtggtgtggaggtgtggtagttgaggtggttagtgaggtgggggttttttatttgttgttattttttagttttttatgaatttgtttgttaggttggagttagttgttatttggagtgatgggttgtttatggagttaggtggtggtggttttggttttgatttggttaatttggaagtgattagtagttggggttggggagtatttggagtttttattagttagttgggatttttttttttaaagttttatatttttggttgtttagagttagggttattttgagggattttgaggagtttttttttttgtagggtattttagtttggatttgttttaaggttaggagtgtagaatattagtagaggtgggagattagattg

SEQ ID NO: 2943 - DNA, 383 bp, Artificial Sequence
  chemically treated genomic DNA (Homo sapiens)
tttttttttttattttggttttatttttttagaattagtttgtttttgttttttgtttttatggttttataaatgagttatgggtttgatttgatttaattttgttgtaattgttatttttttaagtttgtttttttttatttggttatttatgagattataaaaatttaaataggatggggttttttttagtttggttttttggttttttgggattttgggttagggttagtagtttttggagattgaggtggggtttgtggagtttttgtggggagggatttggtgtttttagtaggattgggtattttgagttttgggttgtagttttgttgttggatagttttgagagaattgtttgagttttttgatttttttagtat

SEQ ID NO: 2944 - DNA, 383 bp, Artificial Sequence
  chemically treated genomic DNA (Homo sapiens)
atgttggggaaattagaaagtttgaataatttttttaaggttgtttagtaatagagttgtagtttgggatttgggatatttagttttgttggggatattaagtttttttttatagaagttttatagattttattttagtttttaggagttgttgattttggtttggagttttgggggattaggaggttgggttggggaaggttttgttttgtttaggtttttgtggttttgtgagtaattgagtggaaaaaaataagtttgaaaagataataattataatgaaattaaattaaattagatttgtgatttatttatggagttgtaaaaatagaaaataaaaataagttggttttggagaagtgaggttagggtgaggaagggag

SEQ ID NO: 2945 - DNA, 495 bp, Artificial Sequence
  chemically treated genomic DNA (Homo sapiens)
tttaataagtttgatttttagaatagaatttgtagagaaaaagaaagtaagtaaggaaaaaaaaaaaaaaatttttttttattggaaaaaatatatatatatatagattaaaataatatttggtatttatgttgtatttttaaaattttttaaatgttttataaatattagttaattaattaagttgtttaaatttggttgtagttggtggagagagtttgagaggagttaaaaaaaaaatgggggagttagtgttatataattttagattttattgttgtttgtttggggtgtgattataggtttttggttgtattataagaatagttttgttttaatatgttgtatgtttgattttgtagttttttttgtgttttttgtttttttattaattgttgatttatagttttttgtggtgttattgataaggataataataattgtaagttaggttgagttttgggttttgggtttgtatttttttttggatatgtt

SEQ ID NO: 2946 - DNA, 495 bp, Artificial Sequence
  chemically treated genomic DNA (Homo sapiens)
ggtatatttaggggagggtgtaggtttggagtttgggatttagtttggtttgtagttattattatttttattaataatattataaggggttgtgagttagtagttggtgagggagtaggaggtgtaggagaggttgtggagttaggtgtgtagtatgttggagtagggttatttttgtggtgtagttggaggtttgtaattatattttaggtaggtgataataaaatttggagttgtgtagtgttggtttttttattttttttttagttttttttgagttttttttattgattgtagttagatttaggtggtttaattaattagttagtgtttataaagtgtttgaagaattttaaaagtgtgatgtaagtgttaaatattattttaatttgtgtatgtgtatgttttttttagtagagaggggtttttttttttttttttttgtttgttttttttttttttgtaggttttgttttgagaattaggtttgttaaa

SEQ ID NO: 2947 - DNA, 491 bp, Artificial Sequence
  chemically treated genomic DNA (Homo sapiens)
ttagatttttgagtttattgattatattgttttaggtttttttttaagtttttttttaaatgtaattagaattgtttgaagaatgtggggaattttagagatatgtgttgtttttaggtgggtttggagagagggtttttttttgtaattttatttttttttgatggaggggaggggagggggaagggaaggttgtgattttgttattttgggaaaggtttttaaggtagatttttgtttagttttgtgtttttttagtttggttggtgtttgttgggggtggggtagtttttttttaatttgtgttggttgttaagggaggttttattagagttttatttaagaagatgttaattgtgatatttttatatgattaatgatttaggtaatttgtatagtgtgaagtggagagtagttgtttttagtatatttttaagttgtatattttttttagtgtagggtgggggaagaaggtagttttagtttttttt

SEQ ID NO: 2948 - DNA, 491 bp, Artificial Sequence
  chemically treated genomic DNA (Homo sapiens)
ggagaaaattggggttgttttttttttttgttttgtattgagaggggtgtgtagtttggggatgtgttaagggtagttgttttttgttttatgttatgtaaattgtttgggttgttaattatgtaaaaatgttataattagtatttttttaagtgggattttaatgaagttttttttggtagttagtataagttgagaaggagttgttttatttttagtaggtattaattaggttggggaggtatagggttgggtagagatttgttttggaggttttttttagggtggtagggttatagtttttttttttttttttttttttttttattaggaaagggtggggttgtaaggggaaattttttttttagatttatttggaagtggtgtatgtttttgggattttttgtattttttaggtagttttggttgtatttgaggaagaatttgaggaagaatttgaaatagtgtggttggtgggtttaagggtttgg

SEQ ID NO: 2949 - DNA, 395 bp, Artificial Sequence
  chemically treated genomic DNA (Homo sapiens)
gtagagtgaatagttttagaaatggattattttgttttattttgtttttatatatgtgggatttagtatgaggttatttagaaataatagaattaggttgaggttagttaatatagttggtagttgttattgaatgtttattgggtggttgtaggtttttggttgattatgtttttaagagttggttaatggagtttttgttatagttttggttaagttagtatatttaatagtttgtagtgtaaatgaaaaatatataggtttgattagggagtattttttttttttgtttttttttgtaaagagaggaaagtgattgttttggaagtttttgatattaatagttatgttggtatgtggttgtaagataatttgagttaagatggtgatatgtt

SEQ ID NO: 2950 - DNA, 395 bp, Artificial Sequence
  chemically treated genomic DNA (Homo sapiens)
ggtatattattattttaatttaggttgttttatagttatatgttaatatggttattaatgttagaaatttttagagtaattatttttttttttttatggaaaaagatagaaagggaaaatgttttttagttagatttatgtattttttatttgtattgtgggttgttaaatgtgttagtttaattaagattgtaatgaggattttattaattagtttttagaaatgtggttagttaggagtttgtagttatttagtgggtatttaataatagttattgattgtattgattggttttgatttgattttgttgtttttgaatagttttatgttgggttttatatatgtaaagataggatgagatagaatggtttatttttgaagttgtttattttgt

SEQ ID NO: 2951 - DNA, 469 bp, Artificial Sequence
  chemically treated genomic DNA (Homo sapiens)
ggaggaaggttatgttaaatggttgtgatttattgtttatagggaagagtatgtaatatatatttaggagggtttaggtagttggaattgtggtggttttatatttttaaagtgaattttaaatttgatttatttatgttgtttttatagtaataggaaaattgttttgatttatagttatggaagattttgtaaaagaaattgtaggaggaaaaaaagataatgttaggaaaaaaaaaaatttaatgaagtattatttttttatttatttagttaattgagaataatagtttgtgtatttggtaattaaatgggaagtggtattttgtgttgtaatatgaatttgtttatattaagtgatttatttttttgtttagatatattgtattgagaattttttttaagtagaaagttattaaaaatgtgagaataagtagtttttattaatttgaagtatttggggatttag

SEQ ID NO: 2952 - DNA, 469 bp, Artificial Sequence
  chemically treated genomic DNA (Homo sapiens)
ttaagtttttaaatgttttaggttagtgaggattgtttgtttttatatttttaatagttttttatttgaagaaagtttttagtatagtgtgtttaaataaaaaaataaattatttaatgtgagtaggtttatgttgtaatatgaaatgttattttttatttgattgttaaatgtataaattgttatttttagttgattgaataagtgaaagaatggtattttattaaattttttttttttttggtattatttttttttttttttatagttttttttatagagttttttgtggttataggttggaatagtttttttgttgttatgagaatggtataaataagttaagtttaaaatttattttgggggtatggagttgttatagttttggttatttaagtttttttgggtgtgtgttgtgtatttttttttataggtagtggattatagttatttaatatggttttttttt

SEQ ID NO: 2953 - DNA, 485 bp, Artificial Sequence
  chemically treated genomic DNA (Homo sapiens)
gaaagttatttttttgattatgtgtttagattttataaaattatagtttgggtttattggttgggtaatattatttgaagtgagtagaataatttaaatttttttatttgtaatataaaaggaaggggttatttgttttagggatgggtatgttttggtgtaatttggtagagtattttagtaattttattagatgttaggttagggtaaaagtggaaatgtgtttgtttagtatattttgggttgattatttggagtgtatgtttttgatttatttgtatataatttatttagggggtgttgtaagagttatgtgatggttaaaggaatttaatgtgttttttattatgttttttaaataagtttttttatgttgattgttttttggaattaagaagttttatttttttagttttgtgatagattttaaaatgagatttttataaatttgagaataagttttagttttggttttaggattattt

SEQ ID NO: 2954 - DNA, 485 bp, Artificial Sequence
  chemically treated genomic DNA (Homo sapiens)
agatagttttggagttaaagttagaatttgtttttagatttatgaaagttttattttgaagtttgttatggggttggaagaatgaagttttttggttttaagagataattaatgtagagagatttgtttaaaaaatataataaaagatgtattgggtttttttggttattgtatagtttttgtaatattttttggatgagttatgtgtaaatgaattagaaatatgtattttaagtaattaatttaagatgtattgggtagatgtatttttatttttgttttaatttgatatttgatagagttgttgagatgttttgttaaattgtattagggtgtgtttatttttgagataaataattttttttttttgtgttatgaatggggaggtttgaattattttgtttattttaaatgatgttgtttagttaatgggtttgggttgtggttttgtggagtttggatatatggttaagagggtgattttt

SEQ ID NO: 2955 - DNA, 500 bp, Artificial Sequence
  chemically treated genomic DNA (Homo sapiens)
ttgagaaggtaatgggagagttaagtttaggatattgttgtttagtttggttttatatgaatttaatattttatatttgtggaattttatgaggggttaagttaggttgtatggtgaattttggtttagttgtgagaattttgggagaaaatgaagtataatagaaatttttatagaaagttgtgggggtattgtagttagagtagagagtttggaatttgttggtttgaattaggatttagttaagtttattttattaaaatttatgaagttaatagttttttttatttggtttttgaaggaatatttttattgtgtaattatttttgtggaaattgtaatattgtgtttgttattatatagtattaatattaaatggttaggtgataaaagttaaggatattaagttaaaagtttatgttgtatttttattgtatattataggttataaattgagagtgtgttttttattattttaaagtttttggggttggattttt

SEQ ID NO: 2956 - DNA, 500 bp, Artificial Sequence
  chemically treated genomic DNA (Homo sapiens)
aaagatttagttttaggaattttaaagtagtggagggtatatttttaatttgtagtttgtagtgtgtaataagaatgtagtatgagtttttagtttgatgtttttggtttttgttatttggttatttagtattaatattgtataatagtagatatagtattgtagtttttatggaagtgattatataatgggagtgtttttttagaagttaagtaaagggggttgttagttttatgagttttgatgaaatagatttagttaagttttaatttaggttgatggattttgggttttttgttttgattgtgatatttttgtagttttttatgggaatttttgttgtgttttatttttttttagggtttttatggttaagttaggatttattgtgtagtttgatttggttttttgtaaaattttataagtgtgaaatattaaatttatgtgggattagattggataatagtgttttgaatttggtttttttattgtttttttag

SEQ ID NO: 2957 - DNA, 419 bp, Artificial Sequence
  chemically treated genomic DNA (Homo sapiens)
tttaagagtatggattgttttgtattttttaggagtattattgtaaagttgatttattattttttttatttgttttgtattattgtgttggggtttattaatgttttgttattgggtgttttgtgtgtaagtagaagtgtgttaagaattaattgttttgatttttattttttgttggtgttttgttatttgtgggttgtttggtttgatatatgaattattttttagttgtttggtgttggggaggtatagttattagtttttaaatattttagatatatgttaattgtaattttaatatatattttttttttattgttattttggaattgttttattggtaatgtatgaaatatgaataagaggaaataattgataaggtattattgttgattaaggggttaatttttgaggaagat

SEQ ID NO: 2958 - DNA, 419 bp, Artificial Sequence
  chemically treated genomic DNA (Homo sapiens)
attttttttaaaggttagttttttagttaatagtggtgttttgttaattatttttttttgtttatattttatgtattgttaatggaatagttttagggtgatggtagaaaaaaaatgtgtgttgaaattgtaattggtatatgtttgaaatatttgggggttggtgattgtgtttttttagtattaggtagttggagagtaatttatatgttaagttaagtagtttatgaatgataaaatattaatagggaataaaggttagagtgattgatttttaatatatttttatttatgtatagagtatttgatgatagggtgttaatgagttttagtatggtgatgtggaataaatgaaaaaagtaatgaattgattttgtaatagtgtttttggaagatatagaataatttatgtttttaga

SEQ ID NO: 2959 - DNA, 353 bp, Artificial Sequence
  chemically treated genomic DNA (Homo sapiens)
ttggtaattttaggagtatggaagaaagattttaaataagtttttgattatgtatttttttttaaatttttttgaatgttgaagaaatgttaaattttattaagttttatagttagatttaatatagatataaatttttttaatgtttgttttagttaaaagtgagtggaatattattgttaaattagtgtatgtgggagaattatttgaggaaaattaaaataggtatagttgggaatattaagttgtggttatattagatgtaagtaggtgtaatagtaaaattttttaggttttaatggattgggttattttgttttttagtttttatatagatgagttttgttttgggg

SEQ ID NO: 2960 - DNA, 353 bp, Artificial Sequence
  chemically treated genomic DNA (Homo sapiens)
ttttagaataaagtttatttgtatggaaattgagaagtaaaatagtttagtttattagagtttaaagaattttgttattgtgtttatttgtgtttaatatggttatggtttaatgtttttaattgtgtttattttgattttttttaagtaatttttttatatgtattggtttaatgataatgttttgtttatttttgattgaaatgaatattaaagggatttatgtttatattaaatttggttgtaaaatttaatgaaatttaatatttttttagtatttaaaaaaatttagaaaaagatatatagttagaaatttgtttgaaattttttttttatatttttaaggttgttag

SEQ ID NO: 2961 - DNA, 486 bp, Artificial Sequence
  chemically treated genomic DNA (Homo sapiens)
ttaagtaggttataataaggtggtaattgattttgttttttgaggatgtttgtttgggttttgttagaagttaagggttttttgatgtggggttttggttttatattgtggtattttgaataattttttatgggttggtaaaaggtgttttatattttagataggttttaggaggatgatttgttttttttaaggagaattgagaatttttagatgattggaaggttttgtatttttattttagtatttttgatagatttttttatatgtggtaaatatagttatagttggaggtttattgttggttgttaataggtagtgaattgttgttgaattagatagtttatgtatagggtatttttattattatagaaagttttgttggttagagtatttaaagtatatttggtttttttttttagttattttgtttattttttgtttgtatttttttttggtatttgtgttgttgttattttagtttta

SEQ ID NO: 2962 - DNA, 486 bp, Artificial Sequence
  chemically treated genomic DNA (Homo sapiens)
tggaattggggtggtagtagtataaatattaaggaggaatgtaagtaagagataaatagggtggttagggggagaggttgaatatgttttagatgttttgattaatagaattttttgtgatgatggaaatgttttatatgtggattgtttgatttagtaatagtttattgtttgttaataattgataatggatttttagttatgattgtgtttgttatatgtgggagaatttattggaggtgttaaaatgagagtatagaattttttaattatttgagaatttttagttttttttgaagaaagtaaattatttttttggggtttatttgaagtgtgaaatgttttttgttagtttataaagaattgtttagagtgttatagtgtgaaattgaaattttatattagggagtttttggtttttagtagaatttgaatagatatttttggggagtaaggttaattgttattttgttgtgatttgtttgg

SEQ ID NO: 2963 - DNA, 457 bp, Artificial Sequence
  chemically treated genomic DNA (Homo sapiens)
attggaaagggagttaggtttgagttatttttttttgtagttagtgtgtagtggaagtggtttgtgggtgttttatatttggattggagagtaaagtataattttagtgttaagggaagttttttatgtttttggaatagtgttttatatttttttgaaaaggtaataaaatatgtgtatttgttgattaggaataaatgttaaagtgtttattatgatggaagtgtttgatttttatggttttgataagttgttataggattttatgaatttttaatggttggtttatatttaggggtttttagtttttgagggtggtaaaaggtttatagagatgttatttttttagtatattggtttttgttaagattggtgtttatttaaagtattttttgttttttgaatgtatagagattttgttgataataagaaatttttttgggtttgaaattagatg

SEQ ID NO: 2964 - DNA, 457 bp, Artificial Sequence
  chemically treated genomic DNA (Homo sapiens)
tatttaattttaggtttaagaaagttttttgttgttagtagaatttttgtatatttgaaagatgagaggtgttttaaatagatattggttttggtagaagttagtgtgttaggagaatagtatttttgtggattttttattatttttagaaattgaaagtttttaaatataggttagttattaaagatttatgagattttgtggtgatttattagagttatggaaattggatatttttattatggtggatgttttgatatttgtttttaattagtgaatgtatatattttattatttttttagggaagtatggggtattattttagaagtataagaggttttttttagtgttgggattatgttttgttttttaatttaaatatggaatatttatgagttatttttattgtatattggttgtaaaaagaggtggtttagatttgattttttttttagt

SEQ ID NO: 2965 - DNA, 431 bp, Artificial Sequence
  chemically treated genomic DNA (Homo sapiens)
ttttttttgttatatgaatagagtagtagttgttgatttaagagtgttgggaaaagggtgattgttttttatttggtatagatatttttgaggataagattattgagttaataattgattttatttttttgtaggtttttttgtagtttatttgtgagggtaggaggaagggtgggtgttttggatttatttatagtttttgtttttttaaataattgtgagtaaggaggatagaaggtggtaaatggagttagtgagatagtttaaatgttgtttgggtgttgtattatttagatataaaatattaattttaaatgttaggttgttttgtgtttgtggatgttttgaaattttttttttattttgtgttgatttagtttgaatattgatttagtttttaatttgtgttttttttttttttgtagtttttg

SEQ ID NO: 2966 - DNA, 431 bp, Artificial Sequence
  chemically treated genomic DNA (Homo sapiens)
taggggttgtagaagaagagagaatatggattaaaggttgagttagtatttgggttaggttagtatagggtggaaagagggttttggggtatttatagatatagaatagtttggtatttagggttgatattttatgtttaagtgatgtaatatttaggtggtatttgagttgttttattgattttgtttgttgttttttgttttttttatttataattatttaaggaaatagggattgtaaatgagtttagagtatttgtttttttttttgtttttatgaatgagttgtgggagagtttgtaggggagtgaaattgattattaatttagtagttttgtttttaggggtgtttatgttaagtgaaagataattattttttttttggtgtttttgagttagtagttgttgttttatttatgtgataggaggga

SEQ ID NO: 2967 - DNA, 402 bp, Artificial Sequence
  chemically treated genomic DNA (Homo sapiens)
tgatgggaatataataggttgtagaattggagaatgttaaatttttgtttttaatggtaaaatatgttttttttatttttattagaatgtgtgatttatgttatttgaaattaaattttaaatataatgagttattagtgtaatagtttattattaatagtggttttataaataatatatttttattatatatatgtagtttgttgtgaagttagtaaaaggtattttaggttattgaagttttgttgtgttagtgtggttgtagattagaaggatatttttatgtgaattaagatggatgttaattttttttgttgagagttaggttggttgtttttttttgtatatatggtagatggattggttaattagtgtttgttgagttttgggtttgaaattata

SEQ ID NO: 2968 - DNA, 402 bp, Artificial Sequence
  chemically treated genomic DNA (Homo sapiens)
tgtaattttaggtttaagatttagtagatgttgattaattaatttatttattatatgtgtagaaagagatggttagtttgatttttggtagggaaaattggtatttattttggtttatatggagatgtttttttaatttatagttgtgttggtgtaataaaattttgatggtttgaaatattttttgttggttttatagtgagttgtatgtgtatgataagaatgtattatttataagattgttgttagtaatgagttattatattaatggtttattgtgtttggaatttgattttaaatggtatggattatatattttgatgaaaatgagaaaaatatgttttgttattaggaataaagatttaatgttttttaattttataatttgttatatttttatta

SEQ ID NO: 2969 - DNA, 471 bp, Artificial Sequence
  chemically treated genomic DNA (Homo sapiens)
gtaatttttagtttttttaggagaataatttgaaatgaaaatgaagattatatatattattaagttgaaaaatataatgttattttttttgagggatggtttaatatgttaatgtttaatttaagaattttaaaaatgtttttttattagtaattttaaaataaaaataagttgttatataaagtatggttaaaatattattaaaggtatgataaggattgaaattgtagttaatttagtatatagtatatagattattggattgttttagttttttttatgattaatattaattgatatggttgaattgattttgtagtaaggtgttttaattgttgaaatttattatgtgggttgtgttttagagttttggtttttttgtggatatgtttgtaattttgtaggattgattttattagtatagttagaggtttggtaagtgtttgatattaggtaaggttggattttata

SEQ ID NO: 2970 - DNA, 471 bp, Artificial Sequence
  chemically treated genomic DNA (Homo sapiens)
tatggaatttagttttgtttggtgttgggtatttgttaagtttttgattgtgttaatggggttaattttgtagaattgtaggtatgtttatgaagaggttgggattttggagtatggtttatgtgatgagttttaataattggagtattttgttgtagaattaatttagttatgttaattggtattgattatgggaagagttggaataatttaatgatttgtgtgttgtgtattaaattggttgtagttttgatttttgttatatttttagtggtattttagttatgttttatgtagtgatttgtttttgttttagaattattaatagaagggtgtttttaaagtttttaaattaaatattagtatattaagttattttttaagaggaatgatattgtgttttttagtttgatagtatgtataatttttatttttattttaagttgtttttttgaaggagttgaaagttat

SEQ ID NO: 2971 - DNA, 499 bp, Artificial Sequence
  chemically treated genomic DNA (Homo sapiens)
gataagtgaaaaaggaaggaaggaagaaaaaaaaatatgaattatgttttttttaggttaatgtttaagtttgttttaattatgttttttgatatattttaaggtttatattagttaaggtaaatattttaagggattgagtagatggatgttgtagtttagaaagtgtgtggtaaatttaggatttaagagtggaataaaagatttattttttttataattaagtttttgattaatgttttaggttttttagtatatatttgtaattatttatagaggtatttattgtgttgggatttgttttggaatattaggtattaagttatttggtagtagatggaagtatatttttgttgatatatgttgtaatgaaaggatttgtgtaaatttggttagtaaggtagtagaatgttatgtatttgaagattaataatgtaaataattatgatgttaattttgttatgtttgtgttaattttatttgttgagatgtggaatta

SEQ ID NO: 2972 - DNA, 499 bp, Artificial Sequence
  chemically treated genomic DNA (Homo sapiens)
tagttttatattttaatagatggaattaatataagtataataaagttaatattatggttgtttgtattattaatttttaaatgtatggtattttgttattttgttagttaggtttgtatgaatttttttattgtaatatatgttaatagaaatgtgtttttatttgttgttggatagtttgatgtttgatattttgagataagttttagtataatgagtatttttgtgagtaattataggtgtgtgttgaggagtttagggtattaattagaggtttaattatgaaaaaggtggattttttgttttatttttggattttgagtttattatatattttttaaattgtagtatttatttgtttggttttttagaatgtttgttttgattgatatggattttaaagtgtattaaaggatgtgattaaagtaggtttaaatattaatttggaagaagtatggtttatgttttttttttttttttttttttttttttatttatt

SEQ ID NO: 2973 - DNA, 400 bp, Artificial Sequence
  chemically treated genomic DNA (Homo sapiens)
ggtttttttattttttggattttagttaattattttaatggaatttgttattatgagtaagaaggttggaaagagagggtaaaataatagatggttagtttattttattttgttatttatgtaagatagtgttttgaggagatatagtgtttgtgtgaagttgttaaagatagtattgggggagggtaaatgggggggttaaagagggaattatatgattagttagttaaattatggttatatgtttgtttttgttgtttttttatattgaagtggaataatttgaagattgtatttttgtgataatattttaaaattaggaataattatgtggtatttaaagaagagttgttgtatatttttaatagtgggatatttataaaatgttttatttattttt

SEQ ID NO: 2974 - DNA, 400 bp, Artificial Sequence
  chemically treated genomic DNA (Homo sapiens)
agaaatgagtggggtattttgtggatgttttattattgagaatatgtagtggtttttttttgagtattatgtggttatttttaattttaaaatgttattataaagatatagtttttgagttgttttattttagtgtggagaagtaatggaagtaggtatatggttataatttggttgattggttatatagttttttttttaatttttttatttatttttttttagtgttgtttttggtgattttatataggtgttgtgtttttttagggtgttgttttatgtgggtggtagggtagggtaggttagttatttgttattttgttttttttttttaatttttttgtttatagtagtaggttttgttgaagtgattggttgaggtttagggggtgagggagtt

SEQ ID NO: 2975 - DNA, 490 bp, Artificial Sequence
  chemically treated genomic DNA (Homo sapiens)
ggaagaggatgggagttattatattgatttttaaaaggggataagagatttatatttatatttttaagtttattatagattattaattatgatgtaatttgttataatagggggattttttttgaagagatggtgttaaaatttgattatgaggtttttttatgtgaagagagaaaagggggtgtttggggattatttatgagaatttggggagggttttaattgtataaattagttgtgggttatagaatgtttgtttagtttattagtatttgttgtttatagtgattatttatttaatagattggttgtgaataagatgatgggattagtgggtttatgttttagagagttttgtttattattaatatgagttatgttttgtttaggaattattttttttgttgaagaaatattgtgatgtaatatgataaatatgtttttattatgagtgtagatttgtttagaaagatttgtattaaggtggttg

SEQ ID NO: 2976 - DNA, 490 bp, Artificial Sequence
  chemically treated genomic DNA (Homo sapiens)
tagttattttaatgtagatttttttagataaatttatatttgtgatggggatgtgtttattatattatattgtagtgtttttttaataagaggaatggtttttgaataggatgtagtttatgttaatgatgagtaaagttttttggggtatgaatttgttgattttattattttgtttatggttagtttgttggatgaatggttattgtaagtagtaggtgttaatgagttgagtaagtattttgtggtttatagttagtttgtgtagttggagttttttttagatttttgtggataatttttagatatttttttttttttttttatatggaaaagttttatgattaaattttggtattatttttttaaagggaatttttttgttgtagtaggttgtattgtggttggtaatttgtggtaagtttgggagtatgaatgtgggttttttgtttttttttgagagttagtgtggtaatttttattttttttt

SEQ ID NO: 2977 - DNA, 475 bp, Artificial Sequence
  chemically treated genomic DNA (Homo sapiens)
tggggtaatttataggagagtgaaggtgttttagtttttaaggatttttgagaggttatgtagtttatgtttttgttttttaatatttaatagaggggaattatattttttttatttttttttagatatgaagagattttttgttttttttagattttttgttttttataatttttggttgtggggaattttttttaaggtatagattggattttttttgttgtagtttttgatttggttttttttattttgttttttgtggttagagaaagtttttttttgggtgattatagtggttttttaggattttttttttaatatttttttattgttagttggttttttttagaaggtaagtttaattttttttattgtagtttttagtattttttttgttgttgtattttatgtttttaaggtagaaatgtatttttttttttattaaataattaatagagataagggagaagaaggg

SEQ ID NO: 2978 - DNA, 475 bp, Artificial Sequence
  chemically treated genomic DNA (Homo sapiens)
tttttttttttttttgtttttgttaattatttggtgaggaagggggtgtatttttgttttggaggtgtaggatgtgataatggagaggatgttagggattgtagtagaagggattgggtttattttttgggaagaattaattaatgatgaaggaatgttgaaggggagattttaaggaattgttgtgattatttagaagagggttttttttagttatagaggataggataggagaaattaagttagagattgtagtaagagggatttaatttgtgttttaagagaagttttttatagttagggattgtgagaagtagagggtttgggagaagtggagaatttttttatgtttagggaggggtaaagagaatatgatttttttttgttgggtgttgggagatggaggtatggattgtatgattttttaaaagtttttggggattagaatgtttttatttttttgtggattatttta

SEQ ID NO: 2979 - DNA, 498 bp, Artificial Sequence
  chemically treated genomic DNA (Homo sapiens)
tttttaagtttggggtgaaagagaagtgtaagaaggtagtattgttttagatggtgttttagttgtataaggtaaggttttatttgggagatagatttttttttttggtagtttttagttttgttttttattttttgttttgttttttgtgttttgggtgggtggttgttaagatttgtagtgatgtttaatttttttttatgtgaatattatagtaagtttgtgttgttttttgtttttatgttgtttgggtagggtttgtggggaaggggtgggagttttggggttttgggagggatggggatttggtagggaagtgaagattttggtggtggtgatgggagatagtgaagggttttttattattagaatgagagtgaaagagtaaaagtgtagggtatttagggttttgtttttgttttggttttgattattgtggtatttaattttggttttttgttttttttgtgttttttttttatttttttttattgttag

SEQ ID NO: 2980 - DNA, 498 bp, Artificial Sequence
  chemically treated genomic DNA (Homo sapiens)
ttggtagtggggaagagtgagggaaaggtataaagggggtagagaattagaattggatgttgtagtggttaggattgagatgggagtagggttttaagtgttttgtatttttgtttttttatttttattttggtgatgggagattttttgttgttttttattattattattaaagtttttatttttttgttaaatttttgttttttttagagttttagggtttttattttttttttataaattttgtttaggtagtgtagggatgggaagtagtatagatttgttgtgatgtttatgtggagaggagttaaatattattgtaagttttaatagttgtttgtttaaggtataggggatagggtagggggtgaaggatggggttggaggttgttaagagggagggtttgttttttagatggggttttattttgtgtagttgggatattgtttggaatgatgttgtttttttatgttttttttttattttagatttggggg

SEQ ID NO: 2981 - DNA, 282 bp, Artificial Sequence
  chemically treated genomic DNA (Homo sapiens)
ggggaaggaaagagtgttaaggaaaggtttgagaaaatgatatttatgaaatgtttgggaattatttgggggttgtaatgatgatttttttttttatgtttaatatatgggataaatttgaggtttatagaggttaaaataaatatgatagggttttttagatgtgtagatgtggtgtaaagaagggaggatttagaaattgggtttagggtttgtatatgttattagtgtttatagtagtttagttttgtttggtttttgataagggatattaagttagtt

SEQ ID NO: 2982 - DNA, 282 bp, Artificial Sequence
  chemically treated genomic DNA (Homo sapiens)
agttggtttgatgttttttgttaggggttgagtggggttgggttgttgtggatattgatggtgtgtatgaattttgggtttagtttttggatttttttttttttgtgttatgtttatatgtttgggggattttgttgtgtttgttttagtttttgtgggttttgagtttattttgtgtattgggtgtgggggagggggttattattgtagtttttaaatggtttttgagtattttataaatgttatttttttaggtttttttttgatatttttttttttttt

SEQ ID NO: 2983 - DNA, 452 bp, Artificial Sequence
  chemically treated genomic DNA (Homo sapiens)
ttgttttttattgtaggtttttttaggtatatagaggagtttgataaattttataaatttttgtattggtatattggggatatagagattggtattataatttttttgtttttaagttgtttataggtttttatgagagtttgatttatgtttagagaattattgaagttaatggttattttaggtagggagataaaagttatagagggtttagttggtgaggggagtttggtaggagttgtttaagtagaaggttgtgtttatatatatagatgatttttttgtttagtttggtttagtgtggggagatgggaatatttaggtgttattgtttggttgttttgtgaagttgtggattaattagtgatgtagtggttggtttagttgtttggtttttgtagatggatggatgaagagaggattgaaaagatagtagagtagtgttagttttt

SEQ ID NO: 2984 - DNA, 452 bp, Artificial Sequence
  chemically treated genomic DNA (Homo sapiens)
agaagttggtattgttttgttgtttttttagttttttttttatttatttatttgtagggattagatggttagattagttgttgtattattggttaatttgtaattttataaggtagttaggtagtgatgtttgaatgtttttatttttttatattaggttaggttgggtagagaagttgtttgtgtatgtaaatatagttttttgtttaggtagtttttgttggattttttttgttaattgggttttttgtggtttttatttttttgtttaaaataattattggttttagtggttttttgggtatgaattagatttttgtagaagtttgtgagtagtttgaggatagggaagttatggtattgatttttgtatttttagtgtgttagtataaaggtttgtgggatttgttgaatttttttgtgtatttggagggatttatagtaggaagtaa

SEQ ID NO: 2985 - DNA, 498 bp, Artificial Sequence
  chemically treated genomic DNA (Homo sapiens)
ggtagttgttttttttttattgtgaatatggaaaggtattggttatgaggggttaatggggttgttgtgtgtataaggtttgttttagggagggtaaaagatattgttttgggatttaggaagttgtttttgaattggtttttttatgatattattttttaggttgtgggattgttaggttgggtggaagtggattttagttaaggggatgtttttagatgttatgtttttaaattggatttgtttagaaaggtaggtagagataggtttgtgtttgggaaagttttgggtaatgatttaggatggtatttaggttttttttgggtaggggatggttataggtttttttggtggtggtgtttattaattttgttttaagaaggagagtttgggtgtggaggttttgggtagttgaaggtagagatttattttttttttggttatttatttttattttagtaatgttttttagaatgttttaaagtttttttaagtttt

SEQ ID NO: 2986 - DNA, 498 bp, Artificial Sequence
  chemically treated genomic DNA (Homo sapiens)
gggatttgagaaagttttggagtgttttgggaggtgttgttgaggtgggggtgggtagttagggaagggatggatttttgtttttagttgtttagaatttttatgtttaggtttttttttttgggatgggattgatagatattgttgttagggaaatttgtggttattttttgtttaggaaaggtttgaatgttattttgagttgttatttagggtttttttgggtgtaggtttgtttttgtttgtttttttgggtgggtttagtttgaaagtatgatatttgggaatatttttttggttggagtttatttttgtttagtttaatggttttatagtttggaggatgatgttgtgggagaattggtttagaggtagttttttaaattttaggatagtgttttttgttttttttggggtagattttgtgtatataatagttttattggttttttgtggttagtgtttttttatgtttgtagtgagaggagggtaattgtt

SEQ ID NO: 2987 - DNA, 500 bp, Artificial Sequence
  chemically treated genomic DNA (Homo sapiens)
gagtttatattttttttttattttgttgtagtttataggtagttttgtttaatttttaatgtatgtttttatggtttttaggtaaattataggagatggtattggtttttttaggagtgatttagtaatgtttaggttttaaggtagatttgtttatgttgttaggttgggttagtttggaggttgttttggtatgagtatgtaggtagatagatgttgatgttgttttaaagaattgtttttttaggtgttgagggtggtttttttgatgtttattttgtgttattgtttatttttataaggtgtttagttgttgtggtgatgatatttatattaataagtgttttatttatttgttggttttagggaatgtttgttagttgtgtatggtagttaattttagggtatttttgagtttgatgtttttgtatttagagaattagtttttaaattttgtattaatatttgggtttgaaagattttttatttatttaggattt

SEQ ID NO: 2988 - DNA, 500 bp, Artificial Sequence
  chemically treated genomic DNA (Homo sapiens)
gggttttgggtgaatgaagaattttttaggtttagatgttggtatagagtttgagaattgattttttaaatgtaaaaatattaggtttagaagtattttgaggttggttgttatatgtagttggtaagtattttttgaaattggtagatgaatagagtatttattgatataaatattattattgtagtagttgggtgttttatgaaaataaataatgatataggatgagtattagaaaagttgtttttagtatttggaggggtggttttttgaagtggtgttagtatttgtttgtttgtgtgtttatgttaaggtagtttttaagttagtttagtttggtaatatggataggtttgttttaggatttgagtattgttaggttatttttgagaggattgatgttattttttgtggtttgtttgggaattataagagtgtatgttggggattgggtagggttatttgtaagttgtagtaaaataagaagagggtgtaagttt

SEQ ID NO: 2989 - DNA, 477 bp, Artificial Sequence
  chemically treated genomic DNA (Homo sapiens)
ttttttagttaggtattaaagtgttgtgaggataaggatgttaggagttatttatgagatttgggtagtagtggttttgagtttttaaggtttttttttaatatgtagatggtgaagtgatttttttttgtaattttgttatatttttaggtattaatttttagaataattttgttttttttttttttgttgtgagtatttgtaatagtttgattttttagaaatttttatagagagtaaaagtgttttaaatagttggagatggagttgtgtgtatgtattgtttgttttagatagaaattaaatgttttgagaaaaattaaatgttattaagatgtgaagtgagttttgatatgattaaggtgagtgtaatttagtttttaatattttatattatatgttttattttatttgattatttttttaattgtattttttatttattgattttttaggtttgtgggaatgtttttattt

SEQ ID NO: 2990 - DNA, 477 bp, Artificial Sequence
  chemically treated genomic DNA (Homo sapiens)
gggtggaggtatttttatagatttggagggttagtgaatagaaaatgtagttaaaagggtgattaggtggggtgagatgtgtggtgtaaagtgttggaggttaggttatatttattttaattatattaaggtttattttatgttttagtaatgtttggttttttttaaaatgtttgatttttatttagagtagatagtatatgtgtatagttttatttttagttatttgaaatatttttattttttgtaggaatttttagggagttaaattgttataagtgtttatagtagggaaaagaaagatagaattgttttggagattgatgtttgaggatgtggtagaattataggaaggggttattttattatttatatgttgaaggagagttttggaagtttagggttgttgttgtttaggttttatggatggtttttggtatttttgtttttgtagtgttttgatgtttggttggaagg

SEQ ID NO: 2991 - DNA, 439 bp, Artificial Sequence
  chemically treated genomic DNA (Homo sapiens)
gttggtatgaattatgaagttgttttatattaattatttttattgtttttattttttgttgttttttttgatataggttttgggttttttgttgggaaaaggtaggttgaattggagttggttggggagtttattagtattttgttagagttgagggttgtttgttttttaggaggtattttgaattttttttttagttatttttttgtaattaatatgttgtttttgtagttgttttatttattgtttttgtagttattggaggttataggtttttaagaagaattgttggggtttattaatatatatatttttattttataggaagtagtattttatggtttgtatattggttttttgggtttataatatagtagggtttagatttggggagaagtaggtatgagggatgtattgggagtagggaggaaggttttgg

SEQ ID NO: 2992 - DNA, 439 bp, Artificial Sequence
  chemically treated genomic DNA (Homo sapiens)
ttaaggtttttttttttatttttagtatattttttgtgtttgtttttttttagatttggattttgttgtgttatgagtttagaggattaatgtgtaaattatggaatgttgttttttgtgaagtgaagatgtgtatgttgataaattttaatagttttttttagaagtttgtagtttttgatggttgtaagggtagtggatggagtaattgtaaaagtagtatattgattgtaaggaagtaattgaagggagagtttaaaatgttttttggaaggtaggtagtttttggttttggtgaggtgttaatgagttttttagttagttttagtttgatttgtttttttttagtaaaagatttagggtttatgttgagaagggtagtaggaagtgggggtgatggagatgattaatgtagagtagttttatggtttatattagt

SEQ ID NO: 2993 - DNA, 500 bp, Artificial Sequence
  chemically treated genomic DNA (Homo sapiens)
tatttttatttatattttttagtgtatatttttttttttttgtttatttttttaatttttttgtaagtattattttgttttgtttgttggttgttagtttttttttttgagtttttgtggagttgttagatttttgattatttttttatttttagtttataattgtttttttttggagtttagtgattgttaagtggtttttgtgaaattttattaggataatttttttgtttgtgtttttttttagttgggttgtttttagaaattttagttgtttttttatttataattggtaaattataggttggtttttgagttatttaatattgtatttatttataaatatgtttagatgagttttgaatttgttgaattttgtagtttataagtaagagttaaatttattggagatttaatttatatgtttttttttgtagaaggtgttttttgtttatgtgggatttttattttttttataattttaggaatgatatttgttt

SEQ ID NO: 2994 - DNA, 500 bp, Artificial Sequence
  chemically treated genomic DNA (Homo sapiens)
gggtaggtgttatttttgggattgtagagggaataggggttttgtataaataggagatattttttgtaggagaagatatatgagttgaatttttagtgaatttaatttttgtttgtgggttataagatttgataggtttagagtttatttaagtatgtttgtgaataagtatgatgttggatgatttaggagttagtttatgatttgttgattgtgagtaggaagatagttgaggtttttagaggtagtttagttgagaggagatatagatagggagattattttaataggattttataaagattatttagtagttgttgagttttagggaaaaatagttatgagttgagggtggggaaatagttaagaatttggtaattttgtagaagtttggagagaaaagttgatagttgatagatagaataagatgatgtttgtaaaaaggttaaaagaatagataagagagaaaaaatgtatgttgagagatatggatggaaatg

SEQ ID NO: 2995 - DNA, 473 bp, Artificial Sequence
  chemically treated genomic DNA (Homo sapiens)
tttgatttgttttagtgggatttttttgtgtttttgttttagttgtagaggatttattaggtatttagagagaaatgagtggtgttgtgaatatttgattgtgtttatgtggaatttatatatatagtttgtttgaaaatgattgataggatggaaattgataagttattatttgttttgggtattagtgatgattggttaatatgaatattgtgttgatttttgttagatagaagaagatgttatttgttgttaatggggtgttatatgtatatttgtttaaaggaaaatgtttttttggtgattgtttttaatttttattttattttatagttataaaaaagaaaagatttagtagaaaggatgaatttatttaggggtaggatggaaaggtattttttttatttatttttttttttttttattagaataattaaaatttagtgaaaatgttggtgtaagttagaagaggg

SEQ ID NO: 2996 - DNA, 473 bp, Artificial Sequence
  chemically treated genomic DNA (Homo sapiens)
tttttttttgatttgtattagtatttttattgggttttggttgttttggtaaagaaagaaggaaataaatgagaagaatgtttttttattttatttttaggtggatttattttttttgttgaatttttttttttttatggttataaaatgaggtgaaaattgagaataattattaaaagagtatttttttttaggtaagtgtatgtgtgatattttattaatgataagtgatatttttttttatttagtggaaattaatataatatttatgttaattagttattgttggtgtttgaagtggatgatgatttgttagtttttattttattagttatttttaggtaaattgtgtgtgtggattttatatggatatagttgaatgtttataatattatttatttttttttaagtgtttgatgggttttttataattagagtagagatgtaggagggttttattggggtagattaga

SEQ ID NO: 2997 - DNA, 408 bp, Artificial Sequence
  chemically treated genomic DNA (Homo sapiens)
ttttttttattgggtttttggggagaggtaggtggaatttgatttttatgtatttttttttatttttatagagggagaatgttggatttttggaagggagtggggttaggttataaggaaggtagtggttaggaattatttttttttggggagtggggagaatgttgaatgtttggtatttgtgggggtggaaagttagagaggttaagtgttgtttagagatgattttatgatttgggaattaggagttgttgggttgttggtgttggaatttaagtttttgtatatagtttgtgtttgtggttttggtttggtagagtaggaggaaggttttttatggttgtttaagtgtttatatttaagggtagggtttttgtgtttttatttttattttttgtggtaaatttt

SEQ ID NO: 2998 - DNA, 408 bp, Artificial Sequence
  chemically treated genomic DNA (Homo sapiens)
gggatttgttataggagatggaggtaggagtatagggattttgtttttaggtataggtatttgggtagttatgaggagttttttttttgttttgttaaattaaagttataggtatgggttatgtgtgggggtttgaattttagtattagtagtttggtagtttttgatttttgagttatgaagttatttttgagtagtatttaatttttttggttttttatttttatgggtgttaagtgtttagtattttttttattttttgggagagagtgatttttggttattgttttttttgtggtttgattttgtttttttttgggaatttagtattttttttttgtgggggtggaagagggtgtatgagggttaggttttatttgtttttttttagaagtttagtggggagag

SEQ ID NO: 2999 - DNA, 498 bp, Artificial Sequence
  chemically treated genomic DNA (Homo sapiens)
aagtttttttttgttttagtttagtaattaagttgggtattgttttgattattggtggagatagttaggagggggttggtttttttagggttttagagatagaggtgtattgaagttggagtttgtaatttaggtagtagatttgaaatttttgttggatttgagggttagggaggtttttgggatgtaaataaattttttgtgtttttagagtagagtagagagtttatgttgtagttttattttagttgattagattagttttgggtgttggttttttgtttttttttagttttttttattgatttttaaggaagttattttttagattaggttagtttgttttatagatggttttggtagggtttttttaaggtaaggagtatttttattttgggtagttgggttagttatgtgttatatttgtttttatgtttagaggttagagtgatattgttagtttttgtaggtttggttattgattgttgggttttatta

SEQ ID NO: 3000 - DNA, 498 bp, Artificial Sequence
  chemically treated genomic DNA (Homo sapiens)
tggtgaagtttagtagttagtggttaggtttgtggggattggtggtgttattttagtttttgggtgtgggggtagatgtggtatatggttggtttggttatttagagtggggatattttttgttttggagaagttttgttggagttgtttgtgggatagattgatttggtttggaggatggtttttttgggggttggtgagggaggttgggaagaggtaggaagttagtatttagggttgatttaattagttgagataaggttgtagtgtgggttttttattttgttttgagaatataggaggtttgtttatattttgagagtttttttagtttttggatttagtagggattttggatttgttgtttagattataagttttaattttaatgtatttttgtttttgaggttttgagggagttagtttttttttggttgtttttattggtaattggagtaatgtttagtttggttattgggttgggatagagggaggttt

SEQ ID NO: 3001 - DNA, 452 bp, Artificial Sequence
  chemically treated genomic DNA (Homo sapiens)
aaatgttgggaggttgttttgagggtgggtgttgtgagaaggtttggggagaggtgggttagggttgttaatgggggtagggttgtggaaggagttgtttgtgtggggttttggtgataattgtggggtttagtggtttttgtgggtgttgataggagtttggtggtgagtgatggaggaggtggttgtaaaataggttattgttgggtgtttggggtttattttgtggatggtgttgttgttaagttatttttagaatttgataaggatggatgttttgagtggttttttggggtggggggaattaggaagtagtgaattaattgaaattgtggtgaagttttttttttttgaagagtgagagagtgtggtatgagagtgtgtgtttgtatttatatgtgtttatataagtatttgtatatatgagggatttagttggaaaggggataggt

SEQ ID NO: 3002 - DNA, 452 bp, Artificial Sequence
  chemically treated genomic DNA (Homo sapiens)
atttgttttttttttagttgagttttttgtatgtatgagtgtttgtgtgggtatatatgaatgtaaatatatatttttatattatgtttttttattttttaggaagaaaggattttattatggttttagttaatttattgttttttggttttttttattttagggagttgtttggagtatttgtttttgttgaattttaaaggtagtttagtaatagtattatttgtagagtgaattttgggtgtttgatggtaatttattttataattgttttttttattatttattgttaggtttttgttagtatttataggaattgttgggttttgtggttgttgttaaggttttatataaatagttttttttgtggttttgtttttattggtaattttggtttatttttttttgaatttttttatgatatttatttttaaagtaattttttagtattt

SEQ ID NO: 3003 - DNA, 489 bp, Artificial Sequence
  chemically treated genomic DNA (Homo sapiens)
tttattgtattttatttgtgttaaggttatgggaatttttttattgtttttgttagtagatgttatttagtatttattttaagatatttatattttgatttggaagagattagaagtattttgtagtttgtgtggataagttttttttttgatttatagtttttttatttttgtatttaggagagggatggtagtgttgagggttgtgggatttttttttttggaggtttttttatttttgtggtttttgtgtggtttagtttttttttgagttggtttaaggggtaatttgatttaggttagttggtggagtatgaggtagtgtttagttgagtgttatggtattttattaagtttgaaatgtgattgttattgttgttatattttagtgtttttaataatttttttataaatgagaaaaatagagtttttttaaatgttttttttttgatattaaggaaagtgtatggaattttgtttagaggtttg

SEQ ID NO: 3004 - DNA, 489 bp, Artificial Sequence
  chemically treated genomic DNA (Homo sapiens)
taggtttttgggtagggttttatgtgttttttttgatgttagaggaaaggtatttggggaggttttgttttttttatttgtaaggggattgttgggggtgttaaagtgtgataatagtagtgattatattttggatttaataaaatattgtgatgtttagttagatgttattttatattttattagttgatttggattaagttattttttgagttagtttggaggggagttggattgtgtagaggttatgaggatgggggagtttttagggaagagaattttatgatttttagtgttgttattttttttttaggtatgagggtgaggggattgtaagttagaggggagatttgtttatatgaattgtagggtgtttttggttttttttgggttaaagtatgagtattttggggtgggtgttgaatggtatttgttggtagagatggtggaagggtttttgtggttttgatataggtgaagtgtagtggg

SEQ ID NO: 3005 - DNA, 458 bp, Artificial Sequence
  chemically treated genomic DNA (Homo sapiens)
ttatattttttttgtattttgttttgtggtttagtaggttggttattttttttgtaggtagttttatggtggaggttttatgtggttgtttttttatttgtttgagttaagtgtttttggggaatgatttggagtttgatgggaggaggagatttttttgtttttttttttagttttaaatttaattgaaattgttttgtaataattgtatttgtggtttgtgaaagttgtgttttgtggtgattagggattgagattagttggtgaaaaatttggtataggggtatatatggtattattggggatattaagtaagttatggataatgggggagatagagggtttttgtaattagaaattattgggaattttggttatttttttttgttgtagatatgtttttgttatgttgggttggtgtaggaatatgttgttttttttagtattagttttttttt

SEQ ID NO: 3006 - DNA, 458 bp, Artificial Sequence
  chemically treated genomic DNA (Homo sapiens)
aagggagaattgatgttgggaggaatagtgtgtttttatgttggtttggtatggtggggatatgtttgtagtagggagaggtggttgaggtttttagtggtttttggttgtaggagttttttgttttttttattgtttgtggtttgtttagtatttttagtgatgttgtgtgtgtttttgtgttaggttttttattagttaattttagtttttggttgttatgagatatagtttttatagattataaatgtaattattataaggtaattttagttagatttggggttgggagagaaaatagaagggttttttttttttattaggttttgaattgttttttaggagtatttaatttagataaatggggaagtagttgtgtggagtttttattgtagagttgtttgtaggggaagtggttgatttgttgggttatgaagtagggtgtaggaaggatatgg

SEQ ID NO: 3007 - DNA, 422 bp, Artificial Sequence
  chemically treated genomic DNA (Homo sapiens)
gtgtaaaagttggtattaatagtagtaatttataaatttttggagaggtttggtattttttatttagtgattgttgagtttgattgatggggttatgttggtaaattagttattatttagtagagatattttttagagatgttaattgtttagtgtttatgtgtttttatttttttttggtataggtggttggttgttgattttttgttattattgtttgataatagtgtttgatttgtttatatagattagggtttttgtatgtatgttgttagtatttaattattagttagtatggtgtatgaagtatggtttattaatgtttttgaggggagtaaataggtgttggtagaaatttatttttgtggataaatttgtggatatgtgtatttttatatgtgtttatttagtttttaagtata

SEQ ID NO: 3008 - DNA, 422 bp, Artificial Sequence
  chemically treated genomic DNA (Homo sapiens)
tatatttgggggttaagtgggtatgtatgagggtgtatgtgtttatagatttgtttatgggaatagatttttgttagtatttgtttgttttttttaagagtattaatgaattgtgttttatgtgttgtgttggttggtagttagatgttaatagtatgtatgtaggggttttggtttgtgtagataaattaagtattgttattagataataatggtaggggattgatagttagttgtttgtgttagggaggggtggggatgtatgagtattgggtaattagtatttttaaagggtgtttttgttgaatggtggttaatttgttgatatggttttattagttaaatttagtagttattgagtggggaatgttgggtttttttaaagatttgtgagttgttgttgttggtgttagtttttgtat

SEQ ID NO: 3009 - DNA, 465 bp, Artificial Sequence
  chemically treated genomic DNA (Homo sapiens)
tagattttaggtttttgttggagttttttgtggaagttattttggtggtgagttagtaattaggaggaatggggtagtggttagtgttgagaggaaagttatgtgtaaatattttttttttttttttttttttgtttttttttttttatttaattttaagtgttttttgaggtggttattttgattttgttttttttttgagatggtttttattttgtagaggagttaggagtggattataaggtggtatttttgggtattgatgtagggagttgtttagtggggatgttagattatatttaattttttttagttttgtattgttttttgtgtaaatatggagatagttaggaaatggttttaggtttgtgaggtttaggaggagttttttgtttaggttatagtttgtggtggagttgggtattgagtttttttttgaatttttttgttttttttgtttttatt

SEQ ID NO: 3010 - DNA, 465 bp, Artificial Sequence
  chemically treated genomic DNA (Homo sapiens)
ggtaaaagtagagagaatagaaggatttaggaaggaatttgatgtttaattttattatgggttgtggtttgggtaagaggttttttttaggttttgtaggtttgaagttattttttggttgtttttatgtttgtataggggatggtgtagagttgaggaaagttaaatatagtttagtgtttttgttgaatggttttttgtattggtgtttgagagtgttattttgtggtttatttttggtttttttgtggaataaaaattattttgagggaaggatgagattaagatggttgttttaggaagtatttggggttgagtgagagagagagagtgagagagagagagaggagggagtgtttgtatgtggttttttttttagtgttggttgttgttttattttttttggttgttaatttattattaaaatggtttttgtagaaaattttagtaagggtttgaagtttg

SEQ ID NO: 3011 - DNA, 474 bp, Artificial Sequence
  chemically treated genomic DNA (Homo sapiens)
tagtgggaaagagggaattttattatttatgtgttttttttaaaaaattaatttgttttttggataggtgatgggagtttttgttattagattgttttaagaaaattgtttagtaaaataaaataaaaaattttttttaaataatttaagttttaaagttgagtaatttgatgtaggttagtttttaatttatgtttttgtaggatatatagagttagggagttagttggttaagtttgggggtttgaattaagaaggatttattagttgaaaaattttaaaattttgtgttatgtgaaggaattttttaaaatattggattttatttaggtgtagtgagttgtttaaagttatggtaattttttttttgttgttatattatttttatttttgtgtttttagatttttttttgttttgtaatgttttgttgggatttttgattttgtttgaggttttgtggttaagggttaggg

SEQ ID NO: 3012 - DNA, 474 bp, Artificial Sequence
  chemically treated genomic DNA (Homo sapiens)
ttttggtttttggttatagggttttaggtggagttgggggttttagtaaaatattgtaaaataggaaaaaatttaaggatataaaaataaaagtgatgtggtagtgggaaaggggttgttatggttttgagtgatttgttgtgtttgggtgggatttaatgttttggaaggtttttttatatgatatagagttttggaattttttggttggtaaattttttttaatttaggtttttaggtttggttaattagttttttggttttgtgtgttttgtgggggtgtaggttggaaattggtttgtattagattatttagttttgaaatttaaattgtttgaagagaattttttgttttgttttgttggatgatttttttggaatggtttgatggtagaggtttttattatttgtttagaggataaattgattttttagaaaggatgtgtgggtggtggaatttttttttttttattg

SEQ ID NO: 3013 - DNA, 463 bp, Artificial Sequence
  chemically treated genomic DNA (Homo sapiens)
taataaataagtttgttgttttgtttagaaagggatttgggatttttaattttattagagttttaaaagtattagtttaaagttaaagttagatatatgtaaagttgtagtttttgggggaatttagagtttaaaaataatattttttttgatttaaaaattataagggaatatttatggtatattttttgattaaaaaaggaaagtgaaaaataaggtttttttttttttttttttaattattataaaattaatttgtgtttattttattaagttatgatttttgttggttttaagtgagtttaatttatgttggttatagatatgaggggttgggaagtttgggtatgttttagtgaattgaattggttttttttgaatggttgttattttttttttttgttttttttagtataggaaagttattaaggagttgtttatgttagtatatttattatttaga

SEQ ID NO: 3014 - DNA, 463 bp, Artificial Sequence
  chemically treated genomic DNA (Homo sapiens)
tttgggtgatggatgtgttggtgtaggtggttttttggtggtttttttgtgttaaaggaagtagaggaaggaaatgataattatttagaaaggattggtttagtttattaggatatgtttaagttttttggttttttgtgtttgtggttaatatgaattgggtttgtttgaggttaatagaagttgtgatttgatggaataggtataagttagttttatgatgattaagaaggaaaaaaagaaaattttattttttattttttttttttaattaagaagtatgttgtgggtgtttttttgtggtttttgagttaaagagagtattgtttttgagttttgagtttttttgggggttgtagttttgtgtgtatttaattttaattttgaattaatgtttttagggttttggtgggattgggggttttgggtttttttttgaataaggtagtaggtttgtttattg

SEQ ID NO: 3015 - DNA, 493 bp, Artificial Sequence
  chemically treated genomic DNA (Homo sapiens)
ggtagttttaagtattagtgagggttggaagtttttattgtgaagttttttatagaaagttgtggttggtagtttttgtttttgtatgggaataaattaatattggtattttaaatataggaaaggaaggaaattggaaatatagtttatatttggttagttttttgaaatattgtattatgttattgatattaattaatgaaaagtagggttgtgtgagaggttttggtttggaaatgtattaatatatgtttaatatgtttgtataggaattggattatatgtattttggttttaaaataataaagtaattattttaaagttggtgtttttggagttgttattaatttaatttattttatgtggattagtataggttttgtgtggttttttataatgttttttgatataaatgttgaaaaggtggtattgtatatgtttgtttgagttttgtataagtaagtgttaaattttatgtattttaatatttttt

SEQ ID NO: 3016 - DNA, 493 bp, Artificial Sequence
  chemically treated genomic DNA (Homo sapiens)
gggggatattagagtgtatgaagtttgatatttatttatgtgaaatttaggtaagtatgtgtaatattgtttttttaatatttgtgttggaaggtattgtggggagttgtgtaaagtttgtgttgatttgtgtggagtggattgaattaatgataattttgagagtattagttttagggtaattgttttattgttttggagttagggtgtatataatttggtttttgtgtaaatatgttgaatgtgtgttaatgtatttttaaattagagttttttatataattttgttttttattaattgatgttggtagtatggtatagtattttaaagggttggttaagtataaattgtgtttttaatttttttttttttttgtgtttggaatgttaatgttaatttgtttttatgtaggagtgggggttgttaattgtggttttttataaagggttttatagtgaaggtttttagtttttgttgatgtttggggttgtt

SEQ ID NO: 3017 - DNA, 396 bp, Artificial Sequence
  chemically treated genomic DNA (Homo sapiens)
tataaaagtaagaaaagttagtgtgggttaggaggaggttggggagtttgggttgaaaatagtttatgagtaagtgttttgaaattttgttttaaataagttggtaaatgaatttaattttgttagatttttttttttttatgtagattaaatattttgttggtgtgttgtttagatatagataataaaggattttttatagtgtatagagatgtgttgataaagtagttatttaaagatgtagtattgtttttttggtttaaaatgatttgttagatggatttaaatgaaaatgttaagttattggtttggtttggggtttgttggtggattggttggggggagggggttggttgttttagagaattagaaattattatttgtgattgggttgtt

SEQ ID NO: 3018 - DNA, 396 bp, Artificial Sequence
  chemically treated genomic DNA (Homo sapiens)
ggtagtttaattatagatgatggtttttagttttttggagtagttagttttttttttttagttagtttattagtagattttaaattagattgataatttagtatttttatttaagtttatttgataaattgttttaggttgagaaagtaatattgtatttttaaatggttattttgttagtgtgtttttgtgtgttgtaaaaagttttttgttatttgtgtttagatagtatgttagtggaatatttggtttgtgtgaggggagagagatttgataaggttgaatttatttattggtttatttaaagtgggattttaaaatatttgtttataaattgtttttggtttagattttttggtttttttttagtttatattggttttttttgtttttata

SEQ ID NO: 3019 - DNA, 500 bp, Artificial Sequence
  chemically treated genomic DNA (Homo sapiens)
gaattagttgtagttgggattttttgtagttttttttgtagtaagttggggtagttatgagttttgtttgtttaatgtggggttaggtgggtatgtttgttgtgtttggtagttttgatatttttagattttgttggaagatgtttgtggtttgaaagtttattttgtagttgttttattttgggatgtagtttttgtattggtaggattaatgtaaatagaatttgtttggtttattttttgttgggttttaataggtttgtaatgttattgtttgttagggagagttatttggtgatattgttaattaaaattatgattttgggggtaagaaaaaattttaaaatgttgaagttattttttttaatagaaattttattttgaaggtgtttatggaggttaggttgattagaaaaatttataagttataaataagtttaaatagttttatttaatttatttaatttggtgtttggagtttttatggggagaggtgtttg

SEQ ID NO: 3020 - DNA, 500 bp, Artificial Sequence
  chemically treated genomic DNA (Homo sapiens)
taggtatttttttttatgaggattttaggtattgagttaagtaaattaaataaaattatttgagtttatttatggtttgtgggtttttttggttagtttgatttttgtgagtatttttaaaataagatttttattagggaagatgattttagtgttttaaaatttttttttgtttttagagttatggttttaattaatagtattattgagtggttttttttggtagatagtggtgttgtaggtttgttgaggtttggtgaggaatgagttaagtagattttgtttgtgttaattttgttagtgtagaagttgtattttagggtagagtgattataaaatgagtttttaggttatgagtattttttagtagaatttgggggtgttaaggttgttagatatagtaggtatgtttgtttgattttatgttggataggtagggtttatggttattttagtttgttgtggggaaggttgtagagaattttagttgtagttggttt

SEQ ID NO: 3021 - DNA, 495 bp, Artificial Sequence
  chemically treated genomic DNA (Homo sapiens)
gtttagttttatgaaggttttgtataagttagttttttttttttgttatttgatggaataatagatttataggagaatttatttgtaattttaagttttgagttaaagatgttttaagggatgaatgtgggtgatttgtggaatattgtgatgtatttatgagatagattgtatgtttattgtggtgtttaaagaaattagattgggttgtattagaggtggtgttgtaatttggttgttttttgggaaagaatgtaagtttttagtgtgtgaagtatgaggggttgtagaggaaattgttttggtggttttggttttgggagtaagtatttgttttttgtttatttaagtatattagtgagttttataaatatttaagtggtttatgagatgttttatttttaggttttgttttattttttttgttgttatatagaggttattagaaattatggttttttgggtttgatagttaggtagataggattaggttag

SEQ ID NO: 3022 - DNA, 495 bp, Artificial Sequence
  chemically treated genomic DNA (Homo sapiens)
ttggtttggttttgtttgtttggttgttaaatttagaagattgtggtttttggtggtttttgtgtgatagtggaggaggtggggtgaggtttggaagtgaagtattttgtgagttatttaagtgtttatgaagtttgttaatgtgtttaaatgaatgagaagtaggtatttgtttttaggattagagttattaaagtaattttttttgtagttttttatattttgtatattggaagtttgtatttttttttagaggatagttggattatagtattgtttttaatgtaatttgatttggtttttttgagtgttgtggtgaatgtgtaatttattttataaatgtattgtagtgttttataaattatttatgtttattttttgagatgtttttaatttggggtttagagttgtaaatgaatttttttatggatttattattttattaaatagtggagagaggggattagtttgtgtagagtttttatagagttgggt

SEQ ID NO: 3023 - DNA, 500 bp, Artificial Sequence
  chemically treated genomic DNA (Homo sapiens)
ggttaataaagtttggttggtttttgtgggttgtgtaggagtttattttagggaggtatttagagatatttttggtttggttttgttgggaaagtgggttgagtagggagagggggattagagaggaagagatggatagagttttttggatggtgggttgggtttgaggtttgtggattgtttgaggggggtttttgggtttgaggttgtttgtattgattagtgttgtggtttgggtagtttattgtttttttgggttttagttttttgttttggtagattttgaggtggttttggagattttgggtttggtgaatattgggtggggaggggtgttaattttagttttttgggtggggttttttggtttttgtggttatgttgtagtttaggtggaggtgtgggattttgagttgggattgtttttttgggttttggtgtgattggtggtgggaggtgagagtgggtttggtgggttttgggaggaggtggttttaggg

SEQ ID NO: 3024 - DNA, 500 bp, Artificial Sequence
  chemically treated genomic DNA (Homo sapiens)
ttttggggttatttttttttggagtttgttgggtttatttttattttttgttgttgattgtattgaagtttaagagggtgattttagtttgagattttgtgtttttgtttgggttgtaatgtggttgtgggagttgggagattttgtttgggaggttggagttaatgtttttttttgtttagtatttgttaggtttgggatttttgaggttgttttgaggtttgttagggtgggaaattgaggtttgagagggtggtgaattgtttgagttatagtattggttggtgtgggtggttttgaatttagaggttttttttggatggtttgtgggttttggatttagtttattgtttggaaaattttgtttatttttttttttttggtttttttttttttgtttggtttatttttttggtagagttaaattagggatgtttttgggtatttttttagggtgggtttttatatagtttgtgagggttagttaagttttgttggtt

SEQ ID NO: 3025 - DNA, 433 bp, Artificial Sequence
  chemically treated genomic DNA (Homo sapiens)
aggtgttttttttggatttgggttggatggatattggtttttattgtggtgtgagttgggttatgttttttatttatttgtttaaggatgagaaggtgttgtattttaagtaggtggttaggtagatgatttaataggtttagaaggtaggtttttgtttttgtttttatattgttgggattttggttttagttttttggattgggttttattttttaggtagggtttggggtaggttgttttgagtattttttggaaaatgggttttaatttgtttttattttttggggttgtagtgaggtttgtagagtgaatggttgggaatgtgtttggtaaattataaggtgttggatagatgttagttgttggtattttagtgtttagaggtattggttttgttttgtatttttgaaatttttttgtttagtttttt

SEQ ID NO: 3026 - DNA, 433 bp, Artificial Sequence
  chemically treated genomic DNA (Homo sapiens)
ggaaggttggatagggaagttttagaagtatagagtagagttagtgtttttgaatgttggaatattgatggttgatatttgtttagtattttgtaatttgttaaatatgtttttagttatttgttttataggttttattgtagttttaggaagtaggggtgggttggggtttattttttagagggtgtttagggtggtttgttttgggttttgtttgggaggtggggtttggtttaggggattggggttgaggttttagtggtgtgggggtgaaggtgggggtttattttttgggtttgttggattatttgtttgattatttgtttgaggtgtggtgtttttttgtttttgggtgggtgggtgaagagtgtgatttggtttatgttgtggtagaaattagtgtttgtttagtttaggtttagaggaggtattt

SEQ ID NO: 3027 - DNA, 339 bp, Artificial Sequence
  chemically treated genomic DNA (Homo sapiens)
gtagtagagagttgttgaattttgaatgtgaggtagggaagaaagttgaagtatttgttatttataaattaaaatgaatttattttttttttaaggatagttgttgtaataggttgtagttaataggttttatggtgtgatttttgtgtaggaagttattgtttatattgggtgtggaagtatttgtaatttttaggggatttgttgttttatagaatttgatggaaagtttgaggaaggttgagttttgggggttataggttggatgttggagttgttttatgggtggtgtttgagggagttttgggaggagttgttagtttaggtagtgggtggaga

SEQ ID NO: 3028 - DNA, 339 bp, Artificial Sequence
  chemically treated genomic DNA (Homo sapiens)
tttttatttattgtttgggttgatggttttttttagggtttttttgggtattatttatggagtagttttggtatttggtttgtgatttttgaagtttggttttttttgagttttttgttgggttttgtggagtagtaggttttttgggggttataaatgtttttatatttggtgtgagtagtggttttttgtgtagaaattatattatgggatttgttggttgtggtttattatagtggttgtttttagaggaagagtaaatttattttgatttatagatagtagatgttttaatttttttttttgttttgtgtttagggtttagtagttttttgttgt

SEQ ID NO: 3029 - DNA, 444 bp, Artificial Sequence
  chemically treated genomic DNA (Homo sapiens)
tgtagtttgaggaattttgattttttggtgatttttagaagtttttggatgtagttgtttgtgaggtggatttgtttgttgttggttttggggttggatgatatgtttggagttttagggaggttgtgaggagtttgttttttggttaggaagtgattgttgtttgtgttgtggtttttaaggataatttttgggtggtaattatttttttttatttaggagattaatttttttgttgaggttttatttaaggttgtagtatttatttattgaggtttttaagaaatttgtttgttttaggaaattttttattgagatttgttttgtattgttatttggtggtaagatataaaaatatattttttatggtgggattagattgtgtgtttgttttgtttttattttgttttttttttggtggtggggtagagggatggtggaaag

SEQ ID NO: 3030 - DNA, 444 bp, Artificial Sequence
  chemically treated genomic DNA (Homo sapiens)
ttttttattatttttttattttattattggggagagggtggggtgggggtggagtaggtgtgtaatttgattttattgtggagggtgtgtttttatattttattattaggtggtagtgtggggtaggttttagtaggaggttttttaggataggtaggttttttaggaattttagtgagtgagtgttatagttttaggtggaattttaataaagaaattgattttttgggtggaggaagatggttgttgtttaggggttgtttttaagggttgtgatgtagatagtggttattttttggttgaggggtaggttttttgtggtttttttgggattttgggtgtgttgtttagttttgaggttggtgatgggtagatttgttttatggatagttgtgtttagaggtttttggaaattattaaaggattagaattttttaggttgta

SEQ ID NO: 3031 - DNA, 414 bp, Artificial Sequence
  chemically treated genomic DNA (Homo sapiens)
aggtgtatagggtgagatatttaggaattttgttgtttaggagaattttaggttaatgatttgttggtttttgattagtttttgatgttgttttgtgttaggtagtgtgttaggtagatgattttttttttgattttaggagaggttggagtaagtgtgtttttagttaggatgtgtaaatggtatgtagtggaggaagttagggagtatgaattgttgggatttagttgtttgttttggaagagggtattttttttttttgtttatgttaattttatttttagtttgtatttagaattttattgttgtttattggttgggtagatagaggttgttttgtttggttgttaatatgaaatggtattttgtttgaggtgtttttttttttttgtttttttttgtttttaaatttag

SEQ ID NO: 3032 - DNA, 414 bp, Artificial Sequence
  chemically treated genomic DNA (Homo sapiens)
ttgaatttagaggtagggaaaggtgagggaggaggaatattttgagtaaaatgttattttgtgttggtagttaggtaaggtagtttttgtttgtttaattgatagatagtggtggagttttgggtataagttaaggataaagttaatatgggtaggggggaaaaatgtttttttttagaatagatagttgggttttagtaatttatgttttttggttttttttattgtatgttatttgtatgttttggttggagatatgtttattttagttttttttggggttaaagagggggttatttgtttggtgtgttgtttgatatagagtaatattaggggttaattaggggttggtaggttattggtttaaaatttttttgagtagtagggtttttgagtgttttattttgtgtattt

SEQ ID NO: 3033 - DNA, 440 bp, Artificial Sequence
  chemically treated genomic DNA (Homo sapiens)
aggaaaaaggtgggttagtttaggatgttaagtaaagggagagttgagatttataaattggaataatttgaataatgagtggattagttgaggttaggagtttaagattaatttggttaatatggtgaaattttatttattgaaaatataaaaaattagttaggtatggtggtgtgtatttgtagttttagttatttgggaggttgaggtatgagaattgtttgaatttgggaggtggaggttgtagtgaggtaagattatattattatattttagtttgggtgatagaaattttgttaaaaaaaaaaaagaagaagaagaaagaaaagaaaagaggagaattttttgatgaagtataagtgtttggtttgaatgataatagtattttgatttttttgtttatatatttattttttatgaatttgtttagtgtgtattga

SEQ ID NO: 3034 - DNA, 440 bp, Artificial Sequence
  chemically treated genomic DNA (Homo sapiens)
ttaatatatattgaataaatttataagggatagatgtgtaaataagaaagttagaatgttgttattatttggattagatatttatgttttattaggaaatttttttttttttttttttttttttttttttttttttttttttgatagaatttttgttgtttaggttggagtgtagtggtatgattttgttttattgtaatttttattttttaggtttaagtgatttttgtgttttagttttttgagtagttgggattatagatgtatattattatgtttggttaattttttgtatttttagtaaatggggttttattatgttggttaggttagttttgaatttttgattttagttgatttatttgttatttaagttattttagtttgtgggttttaattttttttttgtttggtattttggattgatttatttttttttt

SEQ ID NO: 3035 - DNA, 382 bp, Artificial Sequence
  chemically treated genomic DNA (Homo sapiens)
tgagtggttgtggatgtttaaggatttatgatttttgattttataaagtttagggtgaaaataaaaaataaaataaggagattattgttttaaagtggttgttgtagttaattattttaagaaagtaaataggttggtattgaaagttatataggtgggtggttttttgggagggttgtttagttttttttttttgagatttgagtagggagtagttagaggagtttgaagggatggtgtttagggtatgggaataggttgtatatatttttatggagtatggtgtttgtttagtttgagaagggaaagaaatgggagtagagggttgatgagaaggtagtagatggatagtgtgggattgaaaaggggatttatttgaaga

SEQ ID NO: 3036 - DNA, 382 bp, Artificial Sequence
  chemically treated genomic DNA (Homo sapiens)
tttttaaatggattttttttttaattttgtattatttatttgttgtttttttattagttttttgtttttgtttttttttttttttaaattggataagtattgtattttgtgaagatgtgtgtagtttgtttttatgttttgaatattatttttttaagtttttttggttgttttttgtttaggttttagaaaaggagagttgggtaatttttttagggagttgtttgtttgtgtaatttttagtattagtttgtttgtttttttgagataattagttataatggttattttaaaataatggtttttttattttgttttttgtttttattttaaattttataaagttagaaattgtaagtttttgagtatttatagttattta

SEQ ID NO: 3037 - DNA, 303 bp, Artificial Sequence
  chemically treated genomic DNA (Homo sapiens)
gataaatatgttggttgggtagataggtagtttttatgtttttggttgatgtagatgttatgtattattttatgtgttattatattttttagtaaatatgtaatataagagaataattaattattattaagtgtttttattttgagataggaagatgtagaggaaagattttgatgtgtgtgttagttataaggatgtatattagtgattgatatgatttggtgtaaattttgggtagagatttatatttaagttttttatttttatttgttgaggtgtaagggtttagagggggttttatgg

SEQ ID NO: 3038 - DNA, 303 bp, Artificial Sequence
  chemically treated genomic DNA (Homo sapiens)
ttatggaattttttttgagtttttatgttttggtaggtgggggtgaggagtttaagtataggtttttatttaagatttgtattaagttatgttagttattggtgtatatttttgtaattgatatatatattaaggttttttttttatatttttttgttttaagatgagaatgtttgatagtggttaattatttttttatgttatgtgtttattggagagtgtgataatatatgaaatagtatgtaatatttatgttagttaaaagtataaggattgtttgtttatttaattagtatatttatt

SEQ ID NO: 3039 - DNA, 496 bp, Artificial Sequence
  chemically treated genomic DNA (Homo sapiens)
gggtttagagttggtaggtgttttggtagggataggtttggtgtttgtgtttgtttgttggattgtttgttttgtgttttggtggttttttttgggtgatgtttttgttttgggttttgttggtttttggttgtttgtggtttggtttgggtaggtggtgaagggtaggagggggttgagtttagaaagagtgggtagttttgttttggggtgtttgttgtttggattttgatttttggtgttggggatttagatattattgttatgaataatagtgatagttaatgtttatgggttttttttgttgggaatttgagggtttatagatggttgtagttttgtgatgtgtgttgtaagagattaatatgtaggggggttgtggtaggatagagaagggattagttttagttttatggtgatgtttggatgggggtagatagagagatattttggttgaggaagtagtatgggtaagtttatggaggggagataatat

SEQ ID NO: 3040 - DNA, 496 bp, Artificial Sequence
  chemically treated genomic DNA (Homo sapiens)
atattgttttttttttatgaatttgtttatgttgtttttttggttgaaatatttttttatttgtttttgtttaggtgttattatggggttggggttagttttttttttgttttattgtagtttttttgtatgttggttttttgtaatatatattgtagggttgtagttatttgtgagtttttggatttttaatagaggaggtttgtaaatgttggttattattattatttataatagtaatatttgggtttttagtgttaggaattagggtttaggtggtgggtgttttagggtagagttgtttgttttttttgggtttagtttttttttgttttttattgtttatttgagttgaattgtaggtagttgagggttagtagggtttagagtggaggtattgtttgggaggagttgttagagtgtggggtgggtggtttagtgagtaggtgtgggtattagatttgtttttgttagggtatttgttagttttgggttt

SEQ ID NO: 3041 - DNA, 499 bp, Artificial Sequence
  chemically treated genomic DNA (Homo sapiens)
attgtaaggtttggggtgatagttttttggttattttttttagtttttttgtgtttttatagttagagatgattaaagtttatttttaagaaaatagtaagttatgtataattgaagtttatgggggtaggatgttgttttttttattggggtaatttaagtatttgagtgtttgatattatttattatttaggggatttgagttgaattttaaagattggaattaaagatgatagagtgtgtggttggagagagggggaagtttatagagtttaggtaaatttttgaattatatttttattatgtttataatgtattgtattgaagtatattggaagttaaagattaaaaaggaattagatttttagttttgttatttaaagtagaaattgagggttttatttattgtatagattttagtttaagtgttatgtttttagttttatagttttattagtagtttaagtaaaatggtttggatattaaagatggtttttgg

SEQ ID NO: 3042 - DNA, 499 bp, Artificial Sequence
  chemically treated genomic DNA (Homo sapiens)
ttagaggttatttttagtgtttaggttattttgtttgagttgttggtgaaattgtgaaattggaggtatggtatttgggttaaagtttgtgtggtgaataaggtttttagtttttgttttaggtggtagagttgaaaatttgatttttttttggtttttagtttttggtgtattttaatgtagtatattgtgggtgtggtggggatgtggtttagaaatttatttaaattttgtggatttttttttttttttagttatgtattttgttatttttggttttagtttttagaatttagtttggattttttgggtgatgggtggtgttagatatttaggtgtttggattgttttggtggagagaatagtattttgtttttatgggttttagttgtatgtgatttgttgtttttttggaggtgggttttagttatttttagttataaagatataaaaaaattgggaagaatgattaggaaattgttattttaagttttgtagt

SEQ ID NO: 3043 - DNA, 499 bp, Artificial Sequence
  chemically treated genomic DNA (Homo sapiens)
tggtatgtttgaaaagtattgtgatggttgaattttgtgggtttggggagattgtagattttttgattttaaggggaatgatgtgattttagagttgtaaagaataagtgatagtggaggtgtttatgttttgtgattgtattagagataaggaagatataattagaataatggggagtaggaatggagtggttaatagaatatgtgattgttagggatttttgatgaaggttgatttttagggagtgaattagattagtgattaattatttgtttttatataattgggtaatgtggatggattttaataaagggattatttatagtatagtaggaaagttataaagaaattagatagaagagtgtaagtagtaaggggttaagtagttatttgattagagatagtgttagtttgttaagaaggtattagatagaagttgtgatttttagtaaagggatatagtttgtttgtgttgattttgtaggggtagaggtgggg

SEQ ID NO: 3044 - DNA, 499 bp, Artificial Sequence
  chemically treated genomic DNA (Homo sapiens)
ttttatttttgtttttgtagggttagtataggtagattgtgtttttttgttgaagattatagtttttgtttggtgtttttttggtaagttggtattgtttttagttaggtgattgtttggttttttattatttatatttttttgtttggtttttttgtgatttttttgttgtgttgtaagtagtttttttattagaatttatttatattatttagttatataaagataaatagttggttattgatttagtttattttttgagaattagtttttattaaagatttttaatagttatatattttgttggttgttttatttttgttttttattattttagttgtgttttttttgtttttagtgtagttataaagtataagtgtttttattgttatttgttttttgtaattttaggattatattattttttttgaaattagagaatttgtaatttttttaagtttataaaatttagttgttatagtattttttaagtatgtta

SEQ ID NO: 3045 - DNA, 279 bp, Artificial Sequence
  chemically treated genomic DNA (Homo sapiens)
aagttttattggatataggtaggtaaatttttattgggtatttgatttttgtattaggttttagtgtggatgttgttaagttagtatgtggttttgtatatgtggagttttatagttattttgaagtaagttttgggattttgaatttgattttgaagtttttgttgggttgattttttatttggtgttgatttgattttatatgggagttagtgtagttatgggtttggaaagtatttagataaaaggtgttttatttagtgatgaagaatgtgttga

SEQ ID NO: 3046 - DNA, 279 bp, Artificial Sequence
  chemically treated genomic DNA (Homo sapiens)
ttaatatattttttattattgggtggagtattttttatttgagtgttttttgagtttatgattatattgatttttgtgtaaggttaagttaatattgagtagggagttagtttagtaagaattttggggttagatttggggttttagggtttgttttagagtaattgtaagattttatatgtgtgaagttatatgttggtttagtaatgtttatgttaaaatttggtgtaagaattaagtgtttggtgagggtttgtttgtttgtgtttagtgagattt

SEQ ID NO: 3047 - DNA, 443 bp, Artificial Sequence
  chemically treated genomic DNA (Homo sapiens)
ggtttagggtagttgaaatggatttttaatttggagttagagtttttattatttttatagtatttatgagggttaatgttttatttttttagtatagaatatggatttttagtttttaattatgagattgggtttagggtggttattttgaagttttttataattttttttttatggttttgggtagggatttatttttggtttttttgaaattataatataaattaagtagggaatattgaagtttttagatattagagattttaggttgattgataggttttagaaagtgagggaaggagagaggattggagttgggattttattttagttttagttttatagatagtagttatgtagagggtgtttgtagagttatattttgggtttgtggttgtggggtaagaaagatagatgtttggttgtttggttggggattatag

SEQ ID NO: 3048 - DNA, 443 bp, Artificial Sequence
  chemically treated genomic DNA (Homo sapiens)
ttgtagtttttaattaggtagttagatatttgttttttttattttataattataaatttgggatgtggttttgtagatattttttatatggttgttgtttgtagggttggggttgaggtgggattttagttttagtttttttttttttttttattttttggagtttgttagttaatttaaaatttttggtatttgaaagttttgatgttttttatttaatttatattgtggttttaaaaaagttaagagtaagtttttgtttaaggttatagaggggaagttatggaaagttttagggtgattgttttgaatttagttttgtggttgaaggttaggagtttatgttttatgttagagaagtgaaatgttagtttttatgggtattgtggagatggtggggattttgattttagattaaaggtttattttagttattttgggtt

SEQ ID NO: 3049 - DNA, 480 bp, Artificial Sequence
  chemically treated genomic DNA (Homo sapiens)
gtttgtttggagtggtttatatttttttttgttgattttagttgatgtttatttttttggtgatttgtgaggtgtttttagaatttatgaggttaggggttaagtgagaggttgtaggttataagtttattaagaggttaaggtagatgaaagggaagtgtttttgtttgttaatttattagttttgtgatttgttttttatttttatttataggaagtttaggtaggagtgaagttggtttggggagtggtagtgaaggttgtagatggtgaatatgtatagggtaattttttttttttgggatatattggttttttgttttaagggaggattggtttaattttgattttgtttattttaaatatgggtatgtagtaatatagaatagatttaagaatataaatattttgttagttgtaataaagataaaaatgtttaaagttaaaaattaaataaataaatggaaatgaggaagtttg

SEQ ID NO: 3050 - DNA, 480 bp, Artificial Sequence
  chemically treated genomic DNA (Homo sapiens)
taggtttttttatttttatttgtttgtttgatttttaattttagatgtttttgtttttattataattagtagggtgtttgtgtttttaaatttattttgtgttgttgtatatttgtatttaaagtggatggggttaggattgagttagtttttttttggaataagaggttggtgtgttttgggggaaggaggttgttttgtgtgtgtttgttgtttgtagtttttattgttgttttttgagttggttttatttttgtttgagttttttgtgggtggaggtggaaggtaggttatagagttggtgggttggtagatagaggtgttttttttttatttgttttggttttttgatggatttgtgatttataattttttatttgatttttgattttataaattttagaaatgttttataaattattaggaagataaatattaattgaggttaatggaagggggtatgagttattttaggtagat

SEQ ID NO: 3051 - DNA, 487 bp, Artificial Sequence
  chemically treated genomic DNA (Homo sapiens)
tttaggtaggggttagtatggttggggtttttttgtttgagtttaggatttgtgtaatattaggaagataatagttgaaggttttttagtgagttaagggaagtatatataaatttattatataaatattagaaagtgttgtttgtaaaaaatatgtttttatagagttaataagtagagaaatagttgtttagtgttaggaagtgtattatgatttagaggtttagtttgtgtgtagtgtatagatttgaggttttagagagattgaggatgtagattagtggtatgatggaaatgtagaatgtttatgagaaaatttttttattaattgagataaagttgtaaagaggtagatagttttattgggtgtgtatgtttgaaatttgtgttttttgggttagggtatttggggtgtggtttttagttttttgtagttgttgtttggaaattgttgttatttatttattttttttttttgtttttttat

SEQ ID NO: 3052 - DNA, 487 bp, Artificial Sequence
  chemically treated genomic DNA (Homo sapiens)
gtggaagagtagagggaggaggtgggtgggtggtagtggtttttaggtagtagttataggggattgagggttatattttgaatgttttagtttagggggtataagttttaaatgtatatatttagtggggttatttgtttttttatagttttattttaattagtaggaaagtttttttataaatgttttgtgtttttgttgtgttattggtttgtgtttttggtttttttggggttttaggtttgtgtgttgtatatgggttgaatttttggattatgatgtattttttaatattgggtagttatttttttgtttgttggttttgtgaagatgtgttttttatggatagtattttttaatgtttatgtagtaagtttgtgtatattttttttagtttattaaggaatttttaattgttgtttttttggtgttgtatgaattttgggtttagatagagggattttggttatgttgatttttgtttggg

SEQ ID NO: 3053 - DNA, 429 bp, Artificial Sequence
  chemically treated genomic DNA (Homo sapiens)
tgggatttttgagatgagattatagttgtagagtatatagtatagggaggagtttattagtatttttttatttgtggtgttttggtttagtttttttttggttggggttggatttgttttggtagttaggttttgtgttatttgttttatttgttttgtaatttatttgtttaattgttattttggtggttgtgaggttagttgatagaatggagaggggtaagtattttttgtttggagaggatgggtgtgtggttatttgattgtttttgtaagtttggtggttgtgtgtaggttgttttggtggttttagttttttggggtaggtggggttttgtgtaggatgtagagattgggtgtggttttttgtagatgtttagatgtttttgggttgtggtttttgagatttagggtaaggttgttgattgg

SEQ ID NO: 3054 - DNA, 429 bp, Artificial Sequence
  chemically treated genomic DNA (Homo sapiens)
ttagttagtagttttgttttgggttttagaggttatagtttagaagtatttgaatatttgtaggaagttatgtttagtttttgtattttgtataggattttgtttgttttaaggggttaagattattagggtagtttgtatataattattaggtttgtagaagtagttagatggttatatgtttattttttttaggtggaaaatgtttatttttttttattttgttaattggttttatggttattgggatagtagttgggtaagtaggttatagggtgggtggggtaggtgatgtaaaatttggttgttagggtgggtttaattttaattggaaggaggttgggttagggtattataggtgggaagatgttgatgagtttttttttgtgttgtgtgttttgtagttgtgattttattttaagagtttta

SEQ ID NO: 3055 - DNA, 267 bp, Artificial Sequence
  chemically treated genomic DNA (Homo sapiens)
ttttagaaggaaggtaataaggaatggttttgtagtttgttttgggtgttgtgtttagtgtatattttaggttttattattgaatagttgagtttgagattttattttttattagttaattttgatgagtggatttagatgataatatgttatttataagggatatagttaggtgttgtgttggttttagttaatgattttgttagtagtttttaggaagtagtttatttttaaaagtatgaggtttgggatggttttatagagtag

SEQ ID NO: 3056 - DNA, 267 bp, Artificial Sequence
  chemically treated genomic DNA (Homo sapiens)
ttgttttgtgaggttattttaggttttgtgtttttggggataggttgttttttaggggttgttagtaggattgttaattgaagttaatataatatttagttgtgttttttgtaagtggtatgttgttatttgagtttatttgttggggttggttggtgagaagtggggttttaggtttagttgtttagtgatgaggtttggaatgtgtgttgggtatagtgtttgagatagattgtggaattgttttttgttgttttttttttgaga

SEQ ID NO: 3057 - DNA, 426 bp, Artificial Sequence
  chemically treated genomic DNA (Homo sapiens)
tattttagttatttttgattataaggttgtttttagaaggaaggtagtagagaatggttttatattgtttgatttgggtgttgtatttagtgtttattttgagttttattaatgaatagttgggtttgaaattattttttttttaggtttgtatagtaatttaagttattgtaaagtttatttttgtagtttttgtttttggttattttgatgatgttgattattttattttgtttaaatatttggtttataggtatttgttgtttaagttttttgtgggtttagtttagttttttggttatagtgtttttgtttatttggatttttattaggtgggtttttttttggtgtagaggaagtaggtgtatttaggagaaggtagatatagtttagttttagttgttagtgttttttttatagtagagg

SEQ ID NO: 3058 - DNA, 426 bp, Artificial Sequence
  chemically treated genomic DNA (Homo sapiens)
tttttgttgtgggaggagtgttggtagttggagttgagttgtgtttatttttttttagatgtgtttgttttttttgtgttagaagaaggtttatttgatggagatttaggtgaatggaggtattgtggttgagaagttggattgggtttgtgagaggtttgagtagtaggtatttgtgaattaagtgtttgggtaggatgagatgattgatgttattggggtgattaagggtaaaggttataaaggtgagttttgtggtggtttgagttgttgtgtaaatttgggggagaagtggttttaggtttagttgtttgttgatgaggtttagagtgagtgttgggtatagtgtttgaattggatagtgtagaattattttttattgttttttttttgagaatagttttgtggttagaagtggttgggata

SEQ ID NO: 3059 - DNA, 306 bp, Artificial Sequence
  chemically treated genomic DNA (Homo sapiens)
ttttagtgtagagttttttggggatattatggttatttttgtttagatgagagggagttggttgtttgtgatagtgttgtaaaatgttgttagggtttttttttttttttttttttttttttttttgtttttttttggttggtggttttttgtaggtttttgtttttgttggtgttggttataatgtttttatttttagggttttggtgttttagttttttgtgtttattgtgtttgtttgttagaatttttgtgtttttggtgtgtgtggtttgttgagttttgagtttttgttttttttagttt

SEQ ID NO: 3060 - DNA, 306 bp, Artificial Sequence
  chemically treated genomic DNA (Homo sapiens)
gggttgaggagaataggggtttgaggtttggtaggttatatgtattaagggtatagggattttggtgggtaggtgtggtgggtgtagggggttgggatgttgaaattttgggagtggggatattgtggttagtattagtagggatgggagtttgtaggaaattattaattagagagggatgaggaagagagaaaggaggagggagggaaagttttggtggtattttgtgatgttgttataggtagttggtttttttttatttggataggagtggttataatgtttttaaggaattttgtattggag

SEQ ID NO: 3061 - DNA, 473 bp, Artificial Sequence
  chemically treated genomic DNA (Homo sapiens)
gggtagtttggatggtgttttgattttaatttttttagggggtttttagttaagggttttttttgtatggaatttttaaagttagtaagaaatagaagttttttgaatattgttaatgttttgaatatttagtatttatgaaatttaagtgaattagttaaaaataaaaatgtggtgatgattatttgttgtgggtttaatttaatttgaggatttatttaaaataaaattttggggaatgaaaatagaagttagtagtatatttttagggttagtagggagtatatttgtttagtatttgagtttttgttaggtgttagattttgtttttgatagttgtgttgggtgtgtgtatataagttttgggtggaggttagggttgtatttagtgtatatgagatgttatgtgggattggaaatgttttttgtgtttttttgagttatatgaaattattgagaagtttttgatttgg

SEQ ID NO: 3062 - DNA, 473 bp, Artificial Sequence
  chemically treated genomic DNA (Homo sapiens)
ttagattaagaattttttagtagttttatgtaatttaagggagtgtaggaggtatttttagttttatgtagtattttatatgtgttaagtgtagttttggtttttgtttggggtttgtgtgtgtatgtttagtatagttgttaggaatagggtttggtatttggtaaggatttaggtgttgggtaaatgtgttttttattagttttggaggtgtgttattgatttttgtttttattttttaaggttttattttaagtaaatttttaaattggattaaatttatagtaaatgattattattatgtttttatttttaattagtttgtttgggttttgtggatgttggatatttaggatgttagtaatgtttaggaagtttttattttttattggttttgggggttttatgtagggaagatttttgattaggagttttttggggggattggggttagaatattatttaggttgttt

SEQ ID NO: 3063 - DNA, 498 bp, Artificial Sequence
  chemically treated genomic DNA (Homo sapiens)
atatggtttgtttggtaattgtttgtggagaatttgttattatatatatgtagagtagaaggtgtgattaatgtgtttttaaatattattagtattgttgttgtgattttgaggagttttttaatattaatgagggattgatttttttagttttatataaatagggaatttaagaagtgggtatatggggttagggtatttaaaattttaaggagttttagaaaatgtataatttttgttttagatttatttttttattggttggtgttgtaatatatttagttgttgagggaatttttgttagttgttgtggttatttttttttttttgaatggtatttaagattatttttttaaattttgtaggtaaattttttattgtttattggagaatgagttattttatagggggatgtttatttttttttattttatgtaatgtgttatttttttttttttataggtttttgatgttttttgtgtaggaggagaagtattt

SEQ ID NO: 3064 - DNA, 498 bp, Artificial Sequence
  chemically treated genomic DNA (Homo sapiens)
agatgtttttttttttgtataggaagtattgggaatttgtgaggggagggggatgatatgttgtatgaagtggagaggagtgggtgtttttttgtgggatggtttattttttagtgggtagtgagagatttgtttgtggaatttaggagggtggttttgggtgttgtttaggaaagagaaagtggttgtggtagttggtagaaatttttttaatggttagatgtgttataatgttaattagtgagaaaatgaatttgagataaaaattgtgtattttttggaattttttagagttttaaatattttggttttatatatttattttttagattttttgtttgtgtagggttggaaaaattagttttttgttagtgttgggaaattttttaaaattatggtaataatgttaataatatttaagagtgtattaattatattttttattttgtatatatatggtgatgggttttttatgggtagttattagataaattatgt

SEQ ID NO: 3065 - DNA, 460 bp, Artificial Sequence
  chemically treated genomic DNA (Homo sapiens)
agagtaatttggggtgagtttataaggtggtggttagttatttatttttttatattttgtggttatttttaggtgagttgagtgaagtttttggttttgttatattttttaaggtaaaggtagtttttgttattatttttttgtttttatttgtttagaaatttttagtaggtatttttttttttttttaggaggaatggaatgggattttttgttttgttattgtaggattttggtgaggtttgtttaggggttttggtgagagaaaagtgtgataggaagtgtatgttagtaggtatttggagatgtatttttggtgatatgtataggtatggtagttgttttatttattataggtttttgtttgggatagtggggtatatgtataatatagatgaggtttagagatgtagagatttttaataaattttttttatgttagggagataggagatttagt

SEQ ID NO: 3066 - DNA, 460 bp, Artificial Sequence
  chemically treated genomic DNA (Homo sapiens)
gttggattttttgtttttttagtatggagaaggtttgttgggggtttttgtatttttgggttttgtttgtattgtgtgtgtgttttgttgttttgagtggaggtttgtggtgggtggggtggttgttgtgtttgtgtatgttattaagggtatatttttaagtgtttgttggtatgtgttttttgttatgttttttttttattagaatttttagataggttttgttggaattttgtggtgatagaataagaagttttattttattttttttgaaaaaaagaaaaaatatttgttgggaatttttgagtaagtgggaatagggaggtggtggtgggagttgtttttgttttaaaaggtgtgatggagttagggattttgtttagtttatttggggatggttatggggtgtagaggggtgagtggttggttgttattttgtgggtttattttaaattgtttt

SEQ ID NO: 3067 - DNA, 300 bp, Artificial Sequence
  chemically treated genomic DNA (Homo sapiens)
ggtggagtttatgtgtagtgaaggtttagtttgtgttagggatgttgggatggagtgaggtggtaagtttaggtgttttttatgttttgaagttttttgtttgagtttggaagtgaggtatgtggttggtgttttttgtaggtttttttgatttttgttagatagggtttagttaagaaataagattaggaaattaggtgtttatatagagattttgttattatttgaggtttattatttttttggtgtttattaaatattagttagtgtggtttttatggtttgttttaaggaatagag

SEQ ID NO: 3068 - DNA, 300 bp, Artificial Sequence
  chemically treated genomic DNA (Homo sapiens)
ttttattttttgagataaattatgggaattatattgattaatatttagtgggtattgaggagatgatgggttttaaataataataaaatttttgtgtagatgtttggttttttggttttgttttttggttgggttttgtttggtaggagttaggaaagtttgtaggaggtattaattatatattttatttttgggtttagataggaagttttagagtgtgggaagtatttgagtttgttgttttattttattttagtgtttttgatgtaggttgagtttttattgtatatgggttttatt

SEQ ID NO: 3069 - DNA, 300 bp, Artificial Sequence
  chemically treated genomic DNA (Homo sapiens)
aggaaggtagtagagaatggttttatattgtttgatttgggtgttgtatttagtgtttattttgagttttattaatgaatagttgggtttgaaattattttttttttaggtttgtatagtaatttaagttattgtaaagtttatttttgtagtttttgtttttggttattttgatgatgttgattattttattttgtttaaatatttggtttataggtatttgttgtttaagttttttgtgggtttagtttagttttttggttatagtgtttttgtttatttggatttttattaggtggg

SEQ ID NO: 3070 - DNA, 300 bp, Artificial Sequence
  chemically treated genomic DNA (Homo sapiens)
tttatttgatggagatttaggtgaatggaggtattgtggttgagaagttggattgggtttgtgagaggtttgagtagtaggtatttgtgaattaagtgtttgggtaggatgagatgattgatgttattggggtgattaagggtaaaggttataaaggtgagttttgtggtggtttgagttgttgtgtaaatttgggggagaagtggttttaggtttagttgtttgttgatgaggtttagagtgagtgttgggtatagtgtttgaattggatagtgtagaattattttttattgttttttt

SEQ ID NO: 3071 - DNA, 487 bp, Artificial Sequence
  chemically treated genomic DNA (Homo sapiens)
ttgttagagaataaagagtgggtttgttatattgtttttttttaagagggtttatttgtttttgtttttttggtatatgttaggggatatatattgtttagtatatttttgtagagttatattttattttatattttattataattttgttgaatgttaggtattattaagaaaatgtttatttattttttttttgttatgtttaatgtgtgaattgataatatatttaaatttaaagaaaattaatagatattattttaattaatttgaaaagtttggtgatttatttttattttttttatggggtttttgttgggttgtttggttttttggaattagtttttaggttttttgtagttggggtgtagtttagtgtttgagttttttttttgttgtttattagatgagtgttgattttttttggtataggtatttgagttgtatttgaattgtagaatatgttgtttttattttgtgttgattgtga

SEQ ID NO: 3072 - DNA, 487 bp, Artificial Sequence
  chemically treated genomic DNA (Homo sapiens)
ttatagttagtatagaatgggggtagtatgttttgtaatttaaatgtaatttaaatgtttgtgttaaagaaagttaatatttatttgatgggtagtagagagggggtttgaatattgagttgtattttggttgtaggaggtttggaggttggttttggagaattaggtagtttagtaggagttttgtgagaagggtgggaatgagttattagattttttaggttgattgaggtgatgtttgttgattttttttgaatttagatgtgttattagtttatatattgggtataatgggaagaagatgagtgaatatttttttgatagtgtttgatatttagtagggttgtgataagatgtggggtaagatatgattttgtaagaatatgttggatagtgtgtgttttttagtgtgtattaaaggagtggaggtagatggatttttttgggagaaaatagtgtgataagtttattttttgttttttgatag

SEQ ID NO: 3073 - DNA, 435 bp, Artificial Sequence
  chemically treated genomic DNA (Homo sapiens)
tgagaagagtagagggtggttttttaggtggttgtgtagtatagagtagaaggttatgttggtgttaatttttttagaggggtttggggagtttttaggtttgtttgtataaggagagaagtagtagtaggtgtggtgggtttttaatttttgggaaggggaagggggttatgaagtaggggtaatttatttgtatatatgtattgtttaaatttgtattttatgtatataagtttttggaggagtggtggttgagtaagtttttgggtttgagtgtttggtgtttttattttatttaggtatagtgttttttggaattgggaggttgttagttgttagtttttttgttgtttatatggtgttgttagtagttttgttaggtgtttttgttatgttattatggtttttgttagttagtttggatttttgagaggt

SEQ ID NO: 3074 - DNA, 435 bp, Artificial Sequence
  chemically treated genomic DNA (Homo sapiens)
gttttttaggggtttaggttggttggtagaggttatagtgatgtggtgggggtatttgataaaattgttgatgatattgtatgagtggtaggagggttggtagttggtagttttttggttttagggaatattatatttgagtgaagtggagatattgaatgtttgggtttagaggtttgtttggttattgtttttttgggagtttatgtatatgggatataaatttgagtagtatatgtgtgtaggtgagttgtttttgttttatagttttttttttttttttagaggttgagagtttgttatgtttgttgttgtttttttttttgtgtagataaatttggaagttttttagatttttttggggaggttaatattaatgtggttttttgttttgtgttatgtagttgtttgggaagttattttttgtttttttta

SEQ ID NO: 3075 - DNA, 476 bp, Artificial Sequence
  chemically treated genomic DNA (Homo sapiens)
ttttgaatttgggttatttaggtagtgtgtttaaagttgaaattgtatatagtataatttaagtttgtattagattgggaagtgaatttaagttagtggtgtgtggtttaggagtgggaaaggaaatggatgtttgaagtggaagaggtggtgtagagggggtattgtttatgttgttttgtttttaattgttgtgtatagggggtggtaggggtggtgatttttatattttttatttttttgttggggttggttgtatttattgtttgggttatagggttgatttgtgtgatgtggttttgtggttttagtaggagtttggttttatttttgggatttatgttgaattgtatgttgagttttggggtgatgattggagggttagtttggaagattatagtagttaaggtgagtattaagtagggtagttttgtttttgggtggttgaagtgttaggttggaatgagtaaggtttt

SEQ ID NO: 3076 - DNA, 476 bp, Artificial Sequence
  chemically treated genomic DNA (Homo sapiens)
gagattttatttattttagtttggtgttttaattatttaggggtaaagttgttttgtttaatgtttattttggttgttgtggttttttaggttgattttttagttattattttggggtttggtatgtagtttggtgtggattttagagatgaggttaggtttttgttggggttgtagggttatattatataggttggttttgtggtttaagtgataggtgtagttagttttggtgggggggtggaaggtgtagagattattgtttttgttgttttttatgtgtagtagttggaagtagggtagtatgggtggtgttttttttgtattattttttttattttaggtatttatttttttttttatttttgggttatgtattgttggtttaagtttgttttttagtttgatgtaaatttgagttgtgttgtatgtggttttaattttgagtatattatttgaatagtttaaatttagag

SEQ ID NO: 3077 - DNA, 460 bp, Artificial Sequence
  chemically treated genomic DNA (Homo sapiens)
tgtttttgtagttgaagttggagttgttgtttgattgggtggttattattggtattgtgttggtgtttattttgttggttattttggtttttattaagaattttgtaggtgaggttggtggttggggtgtggggtgtgggtagagggggtgtttgtaggtgtttgggagttggtgttttttgtgtttttggtggttttgtttagttgtgtttattgtggtttggttgtgtttgtggtgttttaggtattttttatagttgtttttattttagtaggtgttgttggttgtatagattttttgtttttattttattgttgtttttttttttatttgtttgtttatggttgtgggtgggattaggtttgtttggatttaggggttttaaatgttatgagatatggggtttggtttggagaatgttataagtagtgtttgaggggatgtagggtggttaggtgg

SEQ ID NO: 3078 - DNA, 460 bp, Artificial Sequence
  chemically treated genomic DNA (Homo sapiens)
ttatttggttattttgtatttttttaggtgttgtttgtgatattttttaaattagattttgtgttttatgatatttgggatttttgggtttagataggtttagttttatttgtggttatgggtggatgaatggaaggaagaataataataaaatagagatgaggggtttgtgtgattagtgatatttgttaggatgggggtggttgtggaaggtgtttgggatgttgtggatgtagttaggttatggtgggtgtggttggatggagttgttggggatgtgggaagtgttagtttttggatatttgtggatgttttttttgtttgtgttttgtgttttggttgttggttttatttgtgaagtttttggtgaagattagggtgattagtaggatgggtattagtatggtgttgatggtgattatttggttgaatggtagttttagttttagttgtagaagta

SEQ ID NO: 3079 - DNA, 474 bp, Artificial Sequence
  chemically treated genomic DNA (Homo sapiens)
ttttgtatttgggaaagaggtatgtagtaataattttttttttttgaagttagttaggatatttttgttggagttgatgtttgtgtggatagggttagtatgtgagttgggttgaatttgttagttgatttatgtttaagtgtgaatattttaatttttgatatgaaagtttatttttttttttatttttagggtggattagtggtatttgttttatttttttttatttttttaggaagtataagtggtggtgttatgtgtatgttgagttgtagtttttgttgttttattgagtttttattggattgttaaggaaagggttttaggagattgaggtgtggtgggtgagtttgtttgttggttgtgaattttgggtttggtgtgagtgggttagggagggaggttttgattttttatttaggtaggtttgggagggtttggattgggatagtagggtggaatgatagttaatga

SEQ ID NO: 3080 - DNA, 474 bp, Artificial Sequence
  chemically treated genomic DNA (Homo sapiens)
ttattagttgttattttattttgttgttttaatttaagtttttttgagtttgtttgagtaagaaattaaggtttttttttttggtttatttatattaaatttaaggtttatggttagtgggtaaatttgtttattatattttggttttttaagattttttttttggtaatttaatgaaagtttggtggaatgataaaagttataatttagtgtgtatatgatattgttatttgtgttttttaggagggtgagaggagatgaggtaggtgttattaatttattttaaaaatagggagaaggatgagtttttgtgttgggggttggggtgtttatatttaaatataaattaattggtaaatttagtttaatttatgtgttggttttgtttatatagatgttgattttagtaaaaatgttttgattgattttaggagagaggaattattgttatgtgttttttttttaggtataggg

SEQ ID NO: 3081 - DNA, 293 bp, Artificial Sequence
  chemically treated genomic DNA (Homo sapiens)
aggtttttttttgtgatagattgggtggggttaggaggaggggtagggtgggtattttggtttgaagatttaggaattgttttggtttggtttggggtttatatttgatgtttggtgagggttggttttgggtttggttttattgggtttgggagggatgggtggttggaaataaatggttttttttagttttaggtaggatgttttaagggatgaaagtttagtaaattttaaggtttatttttttgataattattaataagagttttttttttttttttttgttttttagg

SEQ ID NO: 3082 - DNA, 293 bp, Artificial Sequence
  chemically treated genomic DNA (Homo sapiens)
tttggagagtaggagaagaaaaaaggagtttttattggtggttgttaaggagatgggttttggggtttgttgaatttttgttttttaaagtgttttgtttggaattgagaggggttatttatttttagttgtttgttttttttaggtttggtgggattagatttgaagttaatttttgttaggtgttaggtgtagattttaggttaggttagagtagtttttgggtttttggattgggatgtttgttttgtttttttttttggttttgtttggtttgttatagggggaggttt

SEQ ID NO: 3083 - DNA, 265 bp, Artificial Sequence
  chemically treated genomic DNA (Homo sapiens)
tggagtttatttttttttgtttgtattgtgggattttatagttggtggggtgggggagttttatgagggttgttagggaggggttgttgattgttttattgtttttgatttttttagttaagttttttaatgttttttgggttgtagatggtgggtgttgttgtttttttttattgtttgttttggaggtagtgttgggataattttgttttttatgttttttattgttgttaatgtttttatttattttattgtggattgattt

SEQ ID NO: 3084 - DNA, 265 bp, Artificial Sequence
  chemically treated genomic DNA (Homo sapiens)
aggttagtttatagtgggatgaatgggggtgttggtggtagtagagggtgtgggggatagggttgttttagtgttgtttttagggtgggtggtgagaggaggtagtaatgtttattatttgtagtttgagggatattgagaggtttggttgggggaattaggggtggtggggtaattagtaatttttttttagtagtttttgtgggatttttttgttttattggttgtgaggttttgtggtgtgggtaagggagggtgggtttta

SEQ ID NO: 3085 - DNA, 401 bp, Artificial Sequence
  chemically treated genomic DNA (Homo sapiens)
gtttttgagatagatagaaatgtggttttttttagagagagagatagatgttttttttgtttttttgtaatttattgggaggaaagggatggagggttggggtggggaagaggtgtggttttttttttatttagagggtgtgtatagagatataggtatgtagaagtttgtgaattgtagtttttttgttgttagttggtttaggttgggagtggtagagttggggtgtttatagtagtttaggtttttatagttgaggttgttggtaaagattagtatgatgttgggtggatgggtaatggttaggttagtagttagggttaggaggagggattgtggtgtttttatggatatgggattgaggggtttgttttaagagagggagggttatttggttttag

SEQ ID NO: 3086 - DNA, 401 bp, Artificial Sequence
  chemically treated genomic DNA (Homo sapiens)
ttggagttaagtagtttttttttttttgggatagattttttggttttatgtttatgggggtattgtggtttttttttttggttttggttgttggtttggttgttgtttgtttgtttaatattgtgttgatttttgttgatgattttggttatggggatttgggttgttatgggtattttagttttattatttttaatttggattagttggtggtgggagggttgtggtttatagatttttatgtgtttgtgtttttgtgtatattttttaggtaaagagggggttgtgttttttttttgttttgattttttatttttttttttttaatggattgtaggggggtgggaaaaatgtttgtttttttttttagggaaggttatatttttgtttgttttagggat

SEQ ID NO: 3087 - DNA, 493 bp, Artificial Sequence; identical to SEQ ID NO: 2505
  chemically treated genomic DNA (Homo sapiens)

SEQ ID NO: 3088 - DNA, 493 bp, Artificial Sequence; identical to SEQ ID NO: 2506
  chemically treated genomic DNA (Homo sapiens)

SEQ ID NO: 3089 - DNA, 499 bp, Artificial Sequence
  chemically treated genomic DNA (Homo sapiens)
atttgtaagtgttatattttattgggtgaaattttaagattttttttaggggattttatttgtttttttttttttgttattatgtagtgttgagaaatagagttttgaatgaatttttagatgtttgtgtgttggggtttttttaggatggtggtgtttagttgtttttgggttagggtgatgtttggaattgggtagggtttttggtattgggattttgaaaagtagatttgtttttttttgtttagttggttttttttttttttgtagttggttttttgtatttgtgttttttttgttagttgagggtttttagttttaattttatttttttagttgtgtgtttatagtgattgttttttttgtagggatgtatggatttggtggtggagttttggttggtaggattggataggaattgaaggggtgaggtgggtttgggggtggtgtgttttaattgggtgttgtttttagggggtggggtttgattttttatttt

SEQ ID NO: 3090 - DNA, 499 bp, Artificial Sequence
  chemically treated genomic DNA (Homo sapiens)
gaaataggggattaggttttattttttggggatagtatttaattggagtgtattatttttggatttgttttgtttttttggtttttgtttagttttgttggttaagattttattattagatttgtgtgtttttatagggagggtggttgttatgaatgtatagttgggagggtggagttggagttggggatttttgattggtagggaggatgtggatgtagggggttgattgtaaggggaaggggaattggttggatagggagaagtaggtttgttttttgggattttggtgttagggattttgtttagttttaggtgttgttttgatttagaaatgattgggtgttgttgttttggaaaggttttagtgtatggatatttgagggtttgtttagagttttgttttttggtgttgtatggtggtggaagggagggagtgaatgggattttttaaaagggattttagagttttatttagtgggatgtgatatttgtaggt

SEQ ID NO: 3091 - DNA, 299 bp, Artificial Sequence
  chemically treated genomic DNA (Homo sapiens)
gttttgtagaggtgtaggggtattttatttagaaggggttatttattggttttttgtggttaaaattagttttaagtaggattttttatggttggagttgtttttaaaggggtgttggtttttatttaggtgtgattttgagtgttgtttagttgaaaaggtgtgatgatagggagtatatgtgaggttatttgggaagaatattttgttaagtgtagaggttgtaaaaatgtggaatatggttttgttttttatgttttattgaaaatgattattagaagtagaaattgggtttgtgt

SEQ ID NO: 3092 - DNA, 299 bp, Artificial Sequence
  chemically treated genomic DNA (Homo sapiens)
atataagtttagtttttgtttttgatgattatttttaatagagtataaaaaatagagttatgttttatgtttttatggtttttgtatttggtaaaatattttttttgaatggttttatgtgtgttttttattattatgtttttttagttaggtaatgtttagagttatatttgagtggaggttgatgtttttttggaggtgattttagttataaaaagttttgtttggagttggttttagttatagagggttaataaatggttttttttgaatgaggtgtttttgtatttttgtagagt

SEQ ID NO: 3093 - DNA, 270 bp, Artificial Sequence
  chemically treated genomic DNA (Homo sapiens)
tttttggtttttttttgttatgtaattgtattgggagggtggagtgttggtgtttttagtttatttaatttggatggagttgtgggtttattagtttggggattggttttattgtttgttttgtttagtagttgtgtttttttggattttttgttttagtttgaattttttttttgttttggttttattttaagatgaagattgtgtaatttagaaaatgtagtgtaagtaattatgtttagtgtgatgttaaatattttttaaaggtag

SEQ ID NO: 3094 - DNA, 270 bp, Artificial Sequence
  chemically treated genomic DNA (Homo sapiens)
ttgtttttgggaaatgtttagtattatattggatataattatttgtgttgtattttttgaattatatagtttttgttttagagtggagttagggtaaaagaggaatttaagttggaataaggagtttgagaagatgtgattgttggatagaataagtgatgaagttagtttttaaattgatgagtttgtagttttatttaaattaaatgggttgagaatattaatattttatttttttggtatgattgtatggtagggaggaattaaaaa

SEQ ID NO: 3095 - DNA, 471 bp, Artificial Sequence
  chemically treated genomic DNA (Homo sapiens)
ggagttttgtgtagtatttgggttttttttgtgtgtgtgtgtattgggtatggaggtattttttttttttgttggagtttagtttgtgtggatgtagtgtatatttggtataggaagtagagttggagatgttggtattgttagttgtgttgtttttagggtgttttattttaattttttagagtggattattttttattgtaagtagaaataaagtttggttaaaggtttattgtataaattagtagaaaatgtttgtagttgttgatttgggaagtggtttttgaatgtttataaaatttggttttgagtagtagtgaagttagtatatgtttgagtggtttttagtaggtgtgtagaagttgtgttgtttttgggaagtagggttagaggttaaggattgtgaaaagtttttatttttagtattaattatgttaggtagattgtttgggggatgtttattttgaaagt

SEQ ID NO: 3096 - DNA, 471 bp, Artificial Sequence
  chemically treated genomic DNA (Homo sapiens)
atttttaaaatgagtattttttagatagtttgtttggtatgattgatgttgggggtggaagttttttatagtttttggtttttgattttgttttttgagggtggtgtggtttttgtgtgtttgttgggggttgtttgggtatgtgttgattttgttgttgtttagagttaggttttgtaaatatttaggagttattttttaggttagtaattgtgagtgttttttgttggtttgtatgataagtttttaattaagttttatttttatttgtaataaaggatgatttattttgggaggttaaaataaagtgttttaggggtggtatagttggtaatgttaatatttttgattttgttttttgtattgggtgtgtattatgtttgtataagttgggttttgataggaaggggggatgtttttgtgtttggtgtatatatatatagaaggggtttaggtgttgtatagagtttt

SEQ ID NO: 3097 - DNA, 343 bp, Artificial Sequence
  chemically treated genomic DNA (Homo sapiens)
tttattattattttgtatttttttgtttttatttttgttttttatttagtagagagagtgagtttattataaatataagttattttagttgtttttttgagaattttttatggttatttgttttttgttaaataaaatttatagttttgattgtggtttagggattttatgtaatgagttttagtttgtgtttttgttatttggttttttttttgttttaaagtattagggtttttatttgaaatttattggtgttgtgagtttttagtaggttattttgggtttttttttttatttttagtttggttaggtattttttgttttggtagttttttttagagtt

SEQ ID NO: 3098 - DNA, 343 bp, Artificial Sequence
  chemically treated genomic DNA (Homo sapiens)
ggttttggagaaggttgttagagtaggggatgtttaattaggttgaaggtgaagagggggatttggagtggtttgttagggatttgtggtattggtgagttttagatggaggttttggtgttttagaatgagaagagggttgagtggtggaagtgtaggttgaggtttgttatatggggtttttaggttgtggttgggattgtggattttatttgatgaagaataggtggttataggaggtttttaaggaggtagttgggatgatttatgtttgtaatggatttattttttttgttgagtagggggtgagggtggaagtaggggagtataaggtgatggtggg

SEQ ID NO: 3099 - DNA, 399 bp, Artificial Sequence
  chemically treated genomic DNA (Homo sapiens)
tagaagtgggtttggtttattttgaagatttttttttgttgtggtattttttggtgttggaggaatgagtgttagttggtgttttttgtttggtttgaaaggttgatatgaattgtgtatttgattttggtagttgattgtgttgattttttagttttaattataatgagtatgagtatgaatgttttgaaatatagatgtatatgagttgttaaatatggtgagttattatatttttaatttttaggtaagtttaggtgttaggggaagtgatttatatattaaagagatgaagttttggtttttgtgggtgggggtggggagagggttggggagttgttggttttggggtgggagtgtatatttttgtttgttagattagaggatgtttgagaggtg

SEQ ID NO: 3100 - DNA, 399 bp, Artificial Sequence
  chemically treated genomic DNA (Homo sapiens)
tattttttaggtattttttgatttgatagataggaatatgtgtttttattttagagttaatagttttttagttttttttttgtttttgtttgtagaaattaggattttatttttttgatgtataggttgttttttttggtatttaagtttgtttgaaagttgggaatatgatgatttattgtatttggtagtttgtatgtgtttatattttaagatatttatgtttatgtttattataattagggttggagaattagtatagttaattgttaaaattaagtgtataatttatattaattttttagattagatagagagtattagttgatatttatttttttagtattaggaaatgttatagtagaagagagtttttaagatgggttagatttatttttg

SEQ ID NO: 3101 - DNA, 431 bp, Artificial Sequence; identical to SEQ ID NO: 2491
  chemically treated genomic DNA (Homo sapiens)

SEQ ID NO: 3102 - DNA, 431 bp, Artificial Sequence; identical to SEQ ID NO: 2492
  chemically treated genomic DNA (Homo sapiens)

SEQ ID NO: 3103 - DNA, 497 bp, Artificial Sequence
  chemically treated genomic DNA (Homo sapiens)
gattgggtatgggaggaggtttttggggagttagtgttttttagagtttaggtttgtgggtgagttgagtagagggagttgttgttggatttttttggtgtttgttttgtgtttgattttgagggattttattggttgttgtttttgtagttgtgattatggataggttttagttttagattggttgttttttaaagtgaggggaggggttttgtttggtaaagttagaaggataattaagttgtaaagttttttgtgtttttttgggaaaaagagtgggttttttatttatgtgttaggttatgtatatggtattattggaggtttttatatgtagatttgagttagtgttatttagggtgtttttgtgattaaggatttatatataattatatatagaatttagaggtaaattgaaattaaaaatgggttaattatttaaatatttaggtaaaattattatgtttataaatgagttattaggttaatgtggggtt

SEQ ID NO: 3104 - DNA, 497 bp, Artificial Sequence
  chemically treated genomic DNA (Homo sapiens)
gattttatattggtttggtgatttatttatgagtataatggttttgtttgaatgtttggataattggtttgtttttggttttaatttgtttttgggttttgtgtgtggttgtgtgtgagtttttgattatggagatattttgagtggtattggtttaagtttgtgtgtggggatttttagtagtattatgtgtgtggtttggtatgtgggtgaaagatttatttttttttttagggaagtatagaaagttttgtagtttaattgtttttttgattttattagataagatttttttttttattttaaagagtagttagtttaaggttgggatttgtttatggttgtagttgtaagggtagtagttagtggggttttttggagttaggtatggggtgggtattgaagggatttggtagtggttttttttgtttagtttatttatgagtttgggttttggagggtattgattttttaggagtttttttttatgtttagtt

SEQ ID NO: 3105 - DNA, 272 bp, Artificial Sequence
  chemically treated genomic DNA (Homo sapiens)
aatagaggtggttgtttgttttttaagttagtttggttttgtttggtatgtataggttttggggattgatatgttgttttgattgagattgttttgattttgttaaattttatgtttggtttgggttatagaagtataagttttttgggtggtattattggttgttttttggattggaatataaagttttttttaagatgatttgtggtttgttttttggtaattaataagtttgtagtgttatatgatttatgagatatggattgaaggtt

SEQ ID NO: 3106 - DNA, 272 bp, Artificial Sequence
  chemically treated genomic DNA (Homo sapiens)
ggtttttagtttatgttttatgggttgtatgatattgtgggtttgttggttgttaagaggtagattataggttattttgaggaggattttatgttttagtttagaaagtagttagtggtattatttaggggatttgtgtttttgtggtttaggttagatgtagaatttgataaagttaggatggttttagttagagtagtatgttggtttttggggtttgtgtatgttaggtaaggttaagttggtttaaagagtaagtagttatttttgtt

SEQ ID NO: 3107 - DNA, 313 bp, Artificial Sequence
  chemically treated genomic DNA (Homo sapiens)
agagttgttttttttgttttatttggggttttagggtgttgtagtttgttattagagggattagatgtttgtggttttttaagggtttagtgtggagttatttatttttattagtatagagaagatttatgttttgtggttgaagtaggggggtagtttttttgatagttgtaggttgtttggttttgtgtttggggtatagttggtggggttttgttggttttgttttagtgtgggtatttggttataggttagtttttttttgaatggtttttgggttatggtatttggggatattatagttgtgttgaat

SEQ ID NO: 3108 - DNA, 313 bp, Artificial Sequence
  chemically treated genomic DNA (Homo sapiens)
atttagtatagttgtggtgtttttaagtgttatgatttaggagttatttagagaggagttggtttatgattggatgtttatgttggagtggggttggtaagattttgttagttatgttttagatgtgaagttgagtgatttgtagttgttgaagagattgtttttttgttttagttataagatgtgggttttttttgtgttgatgggggtgagtagttttatattaagtttttggagggttatgagtatttggtttttttggtgatggattgtagtgttttggagttttaggtgggatagagagagtaatttt

SEQ ID NO: 3109 - DNA, 492 bp, Artificial Sequence
  chemically treated genomic DNA (Homo sapiens)
ttaaggattttaattttggggggttttgtttttttatttgtttatattaggtattgtttattttattgggtgggtgttgtttgatgtttttttttaggattttttttgttagatttagtagtagtagtttttggaggggaatgttgttttattttttattgtttttaggtttgtggtttatagtggggttatgttttttgagtttggtttttatagttgttttggtttgtttagtttttttatttgttggagtaggagtagtataaatgttggagttgtttagttttgggtagattttggttttgtatatgtgttgtttgtttatgtggagtttttggtttttttgggtgataaatggggttttttttggttttttaagatgaagttgaagattgtggttttttttgggtttgttgggggtatgtgggtttggtagttgtttttgtatattttaagggttggtttaggggaggtttagaggaaagaggaggt

SEQ ID NO: 3110 - DNA, 492 bp, Artificial Sequence
  chemically treated genomic DNA (Homo sapiens)
atttttttttttttttaggttttttttaaattggtttttagggtatgtagaggtagttgttaggtttatatatttttggtaggtttaaggagggttataatttttaattttattttggaggattagggagagttttatttgttatttagagaggttggggattttgtgtggataggtagtgtgtgtgtagggttgaggtttgtttagggttgggtaattttagtgtttgtgttgtttttgttttggtaagtggaggagttgggtgggttagagtggttgtgggagttaagtttagagggtgtggttttattgtgagttgtaggtttgaggatagtgagaagtaaagtggtgtttttttttaggggttgttgttgttgggtttggtagagagagttttgggggagggtattgggtagtgtttgtttagtaaggtgggtaatgtttggtataggtaggtgggagggtggggttttttagggttggggtttttga

SEQ ID NO: 3111 - DNA, 410 bp, Artificial Sequence
  chemically treated genomic DNA (Homo sapiens)
agagtatgaatttggtaggggtttttggaattgtatgtgttgtttgtttgtgtttttaagtgttgtttttggagtgaattagagtttgtaggtggattgtattataggttgtggtggaattatttttaggtttatggtagttggatttatagatagttgagaggataattgtttttttttagtggtgagttttggttttattttttaagagttgggttgattttagagtagggttttggaaagggtttgtttttgggaagagtttgtgaatgtttggagattgggtaggtaagagtttttttaaagttggttagttttggaaaaatggtattgggtttttgggttatttggaaattattatttgtttttattttgtaaagtagggataggagggaaatgttaagtaaaaa

SEQ ID NO: 3112 - DNA, 410 bp, Artificial Sequence
  chemically treated genomic DNA (Homo sapiens)
tttttgtttgatattttttttttgtttttgttttgtagagtaaagatagatggtaatttttaggtagtttaggagtttggtgttatttttttaagattgattagttttgaaaagatttttgtttgtttagtttttagatatttgtaaattttttttaaagataaattttttttaaagttttgttttaaaattgatttagtttttaggaggtgaggttagggtttgttattgaaagggagtaattgtttttttaattgtttgtgggtttagttgttataggtttggaggtggttttattatagtttgtggtgtggtttgtttgtaggttttgatttattttagggataatatttaaaaatgtaagtaggtaatatatgtgattttaggagtttttgttagatttatatttt

SEQ ID NO: 3113 - DNA, 327 bp, Artificial Sequence
  chemically treated genomic DNA (Homo sapiens)
ttttttagggtttttagtgtagagttttttggggatattatggttatttttgtttagatgagagggagttggttgtttgtgatagtgttgtaaaatgttgttagggtttttttttttttttttttttttttttttttgtttttttttggttggtggttttttgtaggtttttgtttttgttggtgttggttataatgtttttatttttagggttttggtgttttagttttttgtgtttattgtgtttgtttgttagaatttttgtgtttttggtgtgtgtggtttgttgagttttgagtttttgttttttttagttttttttttttt

SEQ ID NO: 3114 - DNA, 327 bp, Artificial Sequence
  chemically treated genomic DNA (Homo sapiens)
ggaggaaagagggttgaggagaataggggtttgaggtttggtaggttatatgtattaagggtatagggattttggtgggtaggtgtggtgggtgtagggggttgggatgttgaaattttgggagtggggatattgtggttagtattagtagggatgggagtttgtaggaaattattaattagagagggatgaggaagagagaaaggaggagggagggaaagttttggtggtattttgtgatgttgttataggtagttggtttttttttatttggataggagtggttataatgtttttaaggaattttgtattggagattttaggagg

SEQ ID NO: 3115 - DNA, 426 bp, Artificial Sequence
  chemically treated genomic DNA (Homo sapiens)
ggagataaatttatagtggtttagatttatatgatttagtggatgggtattgtgaggaggtttttttaggaagtttttaatttggtgattattatggtgggttatgaatggatgagtgtagagttggttagttggattttttttaagtgtattttttttttttgatatttggttttttggagttgggaatttttttgttgtttttttgtttgtagttaatagagattttttttattgaggaaaaggtatatagatttggaattgttagatattgtaagtttattatgttttaaaaaatattaaaataatattgaaagttttttttttttagtttttttagggagggggttttagatattaaattggggaagttattttttttagaatagttgttagttaaagtttaggtattttttgttttttgta

SEQ ID NO: 3116 - DNA, 426 bp, Artificial Sequence
  chemically treated genomic DNA (Homo sapiens)
tataggggataggaagtgtttgggttttgattgataattattttggaagaagtaatttttttggtttgatgtttgggattttttttttgggaggattggaggggaggagtttttagtgttgttttaatattttttaaaatataataagtttataatatttggtggttttgaatttgtatgttttttttttagtgaagaaaatttttgttggttgtgagtagagaagtggtggaaggatttttgattttgggaagttaggtgttggaaggaggaagtatgtttgaagggggtttggttggttgattttgtatttgtttgtttgtggtttattgtggtggttattaaattgagggttttttggaaggatttttttatggtgtttatttattgggttatgtgggtttgggttattgtgagtttattttt

SEQ ID NO: 3117 - DNA, 397 bp, Artificial Sequence
  chemically treated genomic DNA (Homo sapiens)
gggttttaggatttgttaggtttatggaagtggtttttgtaattttttttttggtggtagtttttggtgtattttggtaggggtagtttttttttattatagggattttgtgtgttaggttttagttgtgttgttgttgaattatggatttaatagtagagaagttttgtaggttgtttgtgttggtttgggaaattggggtttagttggggtttgttatggttttggtgttgttttgttttttgttggtgttatggagtaagtggagagatttatttttttggttttaagaggtattaatggaggaggttgagaggtaggagttgaataattgatggttttttttggtttaggatttgttgaaaatgatatggtgtaaggtagaggggttgagagt

SEQ ID NO: 3118 - DNA, 397 bp, Artificial Sequence
  chemically treated genomic DNA (Homo sapiens)
atttttagtttttttgttttgtattgtgttatttttagtagattttgagttagagaaggttattaattatttagtttttgttttttagttttttttgttagtattttttaaagttgggaagataaatttttttgtttgttttgtggtgttgataggaagtagggtggtattaggattgtgataggttttggttgggttttggttttttgagttagtataggtggtttgtaaggtttttttgttattaaatttataatttagtggtaatgtagttggggtttggtatatagggtttttgtgatgaggaggggttgtttttgttggaatgtattagaggttgttattagggagagagttataaggattatttttgtggatttggtaggttttagggttt

SEQ ID NO: 3119 - DNA, 354 bp, Artificial Sequence
  chemically treated genomic DNA (Homo sapiens)
gtgttttattttttgatttttgttaagttgtttttagtagtagttggaattttttgaagtggttgttatagatgttggtaaagtttggtttgggatgtttttattttgtattaggtatggggttgtttttgttgtatatttatttggaaattatttatatgttaagtattgtagaggtaaggggagtttgttattggattgtgtttaatatggttgtagggatatagataagtatattttttggtagaggtatgggtttggttggttggagttgtagtagttgtgtgtggttatagagtttttaaatgagggagatggatggttttgttttatagtgtgtttagagtatgttta

SEQ ID NO: 3120 - DNA, 354 bp, Artificial Sequence
  chemically treated genomic DNA (Homo sapiens)
tggatatgttttgggtatattgtgaagtgaggttatttattttttttatttggaagttttgtgattatatatagttgttgtagttttagttagttgggtttgtgtttttgttagggaatgtgtttgtttgtatttttgtagttgtgttgaatgtagtttaatggtagattttttttgtttttgtggtgtttggtatgtggatgatttttaggtgaatatgtagtagaggtagttttgtgtttggtgtagggtggaggtattttaggttgggttttgttaatatttgtggtagttattttaaagagttttagttgttgttgaagatgatttggtaaaggttagagagtgagatat

SEQ ID NO: 3121 - DNA, 382 bp, Artificial Sequence
  chemically treated genomic DNA (Homo sapiens)
tttttgtagagggtggggaagaaaaggatgtttggggtagtttagttttatggtgtggtggggttaggggttgtgtttattatggatttgattttttttttttttgtgattttgttttattgtatgtgttgggatgggttttaaagattagtttatattagaaattttgattgaggtttttgagaaatgttattttgaattttgttttagtatttggatgtgtttttttatttgatagagttataaagatttttttagttaaaaataaaagtaaagttttgttagatttgtgtttgtggttttaaatttgttttagttattgagtaggagttgagagggaagagagagagaagaatataagatttatatggggaaggatttt

SEQ ID NO: 3122 - DNA, 382 bp, Artificial Sequence
  chemically treated genomic DNA (Homo sapiens)
gaaatttttttttatatggattttgtgtttttttttttttttttttttttagtttttgtttagtggttgaagtagatttggagttatgaatatgagtttggtagagttttgtttttgtttttaattgggaaaatttttataattttattaggtgaaaagatatatttagatattaaggtagagtttagggtaatattttttaggggttttagttaaagtttttgatgtaggttggtttttgaggtttgttttgatatgtatagtgagataggattataaggaggggaggagttaagtttatggtggatatagtttttgattttattatattgtggggttggattgttttaggtattttttttttttttattttttgtagagg

SEQ ID NO: 3123 - DNA, 369 bp, Artificial Sequence
  chemically treated genomic DNA (Homo sapiens)
tagagataggtttttgggaattagttgtgttgggtgggatgaaagttgttttgatgttttggagtgagagagtagagagaaggaggaagatagatattatttgttagttgtagggttttgggtagtagtagtatgttaaggaggagttagggggttgtggggagtttaggagggtgtgggaggtttggtagggtttgttattttataggttggttttttatttgggggtttgtttgtttgtggtgattttttagtttataggaggggatggttggtgttgatagttttttttttgttttttttatgaagtttttttttggtagtttttgattttttgtttagaagtaaagttggaatagtttagtaggg

SEQ ID NO: 3124 - DNA, 369 bp, Artificial Sequence
  chemically treated genomic DNA (Homo sapiens)
ttttgttgggttgttttagttttgtttttgagtggaaggttaggggttgttagggaggagttttgtggggaaagtaaaggggaagttgttagtgttggttgtttttttttgtgaattaaagagttgttgtagataagtaggtttttagatggagaattagtttgtgaggtggtgggttttgttaggttttttatgtttttttgggttttttgtagttttttggtttttttttggtgtgttgttgttgtttgggattttgtgattggtaggtagtgtttgtttttttttttttttttatttttttgttttagaatattagagtggtttttattttgtttggtgtagttaatttttagggatttgtttttg

SEQ ID NO: 3125 - DNA, 425 bp, Artificial Sequence
  chemically treated genomic DNA (Homo sapiens)
ttagaatgaggtaggaggtggaggggttgttttgggtgtttgggggttgttagggattgagttttgagttagtttgagatttaggaaattttgttaggagggagaagggagaagtagattttggatattagaaagttaggggaagggttataaaaggagtggatgtgatggaagggtgggtttttgggtttttttagaatatattttttgtgtttagggggattagaggggtagagtttattgtgtgaaagttttattgttatgattaggtagttgggatgtggggtggatgttagaaaagattttatggaataagagagagtttaggatagtaggtaggttttttgatttttttaggtttttgttttatatatgggttttagaatatatatttggttggaatagtttgagggattaaaaggttt

SEQ ID NO: 3126 - DNA, 425 bp, Artificial Sequence
  chemically treated genomic DNA (Homo sapiens)
gggttttttggttttttaggttgttttagttaaatgtgtgttttggagtttgtgtatggggtaagggtttggggggattggagagtttgtttgttgttttgggtttttttttattttgtggagttttttttggtatttattttatgttttggttatttggttatagtagtggggtttttatgtagtggattttgtttttttgatttttttgggtataggggatatgttttgaagagatttaggagtttgtttttttgttatatttattttttttgtgattttttttttggttttttggtgtttagagtttgtttttttttttttttttttgatggggttttttgagttttaggttggtttagggtttagtttttggtagtttttagatgtttagggtagtttttttattttttattttattttgg

SEQ ID NO: 3127 - DNA, 425 bp, Artificial Sequence; identical to SEQ ID NO: 3125
  chemically treated genomic DNA (Homo sapiens)

SEQ ID NO: 3128 - DNA, 425 bp, Artificial Sequence; identical to SEQ ID NO: 3126
  chemically treated genomic DNA (Homo sapiens)

SEQ ID NO: 3129 - DNA, 473 bp, Artificial Sequence
  chemically treated genomic DNA (Homo sapiens)
gggattgttattatatgggttgtggggaggtagagtttttttgtgtttttgagagtatttttttttggggttttattagtttttaatttgttttttgaatttttatttttttttttgttttgtgtttttggaaatttagatagtggttttatttttgtgatttatttagtaggaatgtgggagtttttgaattgttttagttaaagttttttaatttttttttggtgatgaatgggtgaggtttttaaatgaaatgtggaggtttttagttttagtttgtggttttttttttttttggtgtaattatttttgtgtagaatatgttaagtgttttgttttttgggaatttgttttgtatgtaaatatttggtgattaagtgaggtttatttaattaagtattttgtaatgatttttaaattaaagaatagtggattaggagtttagtttgtgttggtgatgggaaaggtagttt

SEQ ID NO: 3130 - DNA, 473 bp, Artificial Sequence
  chemically treated genomic DNA (Homo sapiens)
aagttgttttttttattattagtatgaattggatttttaatttattgttttttggtttaagagttattataaagtgtttaattaagtaagttttgtttaattattaaatgtttgtatgtgaaataagtttttgggaagtagggtatttgatatgttttgtatagaaataattatgttgaggagggggagggttgtgggttgggattgggagtttttatattttatttgagggttttatttatttattattgaaggggaattaaaaggttttagttggagtaatttgagaatttttatatttttgttggatgaattatgggagtggggttgttgtttgggtttttaaaggtgtagagtaaggggagaggtgggaatttgagaggtgagttgggggttggtggggttttggggaggggtgtttttggggatataggggagttttgtttttttatagtttatgtgataataatttt

SEQ ID NO: 3131 - DNA, 439 bp, Artificial Sequence
  chemically treated genomic DNA (Homo sapiens)
tgtggtgtgaattaagatatggtgttttttgtttttgttttttttttgtagggagaggggttattttggttttgagtatttttaattttatgtgaattatgtggatgggtggatagttggagggttagtagtagtagtaggagtttttgtttatttgggggttttgagtgttggtatgatttgattttatggtgtgggtggggtttgggtttatttggaggagtaggatatgttgttggattatagttgggggtgttagatttaggttatgttatatttggtgttagagtttaagatttaggaatagaaattgtgtatggggttaagttggttgtagtttaatatttaggtgattttaggtttaaagtatgtttttggtttttgagatgggttttgtagttgtagtttatgttttggattttgttagttgggtttggta

SEQ ID NO: 3132 - DNA, 439 bp, Artificial Sequence
  chemically treated genomic DNA (Homo sapiens)
tgttaagtttagttgataaggtttaggatataggttgtaattgtgaggtttgttttgggggttaggagtatgttttgggtttgaggttatttggatattgggttgtggttaatttggttttatatatagtttttatttttgggttttgggttttgatattaaatatggtgtggtttgagtttggtatttttaattgtggtttgatgatatattttgtttttttaagtgggtttggattttgtttatattatggagttagattatgttagtatttggggtttttaagtgggtagaggtttttgttgttgttattggttttttaattgtttatttgtttgtgtggtttatatggggttaaaagtatttaggattaaaatagtttttttttttgtagaagaaagataggggtagggggtattatgttttggtttatattata

SEQ ID NO: 3133 - DNA, 188 bp, Artificial Sequence
  chemically treated genomic DNA (Homo sapiens)
gggtggttgtgatgtgtttttttaagaatggattttgtaggttttttttttttttggtttttggtgttggaaggaggatattgtgagtgttgtttgtttgtttatagagagtgtgtagtagtagtagtagtagtttggggttagttttgggaggattaaggatattttagggttttaagttaggggat

SEQ ID NO: 3134 - DNA, 188 bp, Artificial Sequence
  chemically treated genomic DNA (Homo sapiens)
attttttggtttaaaattttgaaatatttttagtttttttaaagttggttttgggttgttgttgttgttgttgtatattttttgtaagtaaataagtaatatttgtggtgttttttttttggtattggagattgggaggaagaagaatttgtaggatttatttttaaagaaatatattataattattt

SEQ ID NO: 3135 - DNA, 449 bp, Artificial Sequence
  chemically treated genomic DNA (Homo sapiens)
ttttaggttgagtggtttataggttagttggttgggggttggggagttatatagggtgaatgggtagtagttggttttatgttttattgttttggttgatgagttttttggtggttttagtgtgtatgtttgtttgtttgtttgtgtttgtggttatgagtgtgtgtttttatttattttatgatttgtgattattgtgtaagttggttaggaggtaggtggagggtaaggttattagatttggttttgtgttgtttattgtttttttttttttttttttgttgtagatatgtaggatttgtttgtttttttgtttatttgtttttatggtgattgagttgtgagagtttgtgttgggtttattttttggtttttgtttttgagttgttttgtgttagtttttggtttggagttaggttttttgtgttatttatattttttttttttgg

SEQ ID NO: 3136 - DNA, 449 bp, Artificial Sequence
  chemically treated genomic DNA (Homo sapiens)
ttaagggagggagatgtaagtagtatagagagtttggttttgggttagggattgatatgggatagtttaggggtggaggttagggagtgagtttagtgtaggtttttgtagtttagttattgtggggatgggtaagtaggagggtgagtgggttttgtgtgtttgtggtagggaggggaggagagaggtagtggatagtgtgaagttaggtttggtggttttgttttttatttattttttggttagtttgtatagtagttatgggttgtggggtgggtggaggtatatgtttatagttataagtatagatggatagatagatgtgtatattgaggttattgaaggatttattagttagggtagtggggtatggagttggttgttgtttgtttattttgtgtggttttttaatttttggttagttggtttgtgaattatttagtttagga

SEQ ID NO: 3137 - DNA, 488 bp, Artificial Sequence
  chemically treated genomic DNA (Homo sapiens)
gattggtgtaggtggttagtagtttaatttgtattgagtgtttattgggtttttatagtgattttgaattgtgtttttgtttatagtgatttggttggtttgggtatggtagatttagtggtgggtattgtgggtttggtggttaagagtgtgtggttattttgttttagtgaggtttatgtggaggttatgaaggaggatttggttgagtggtttaatgttttgtatggtttgggttttttgggtggtggtgatggttttttgatagggttggttatgggtatgattttgtgttaatatgttaatgttgtgattgaggttgtttgtgtattggtagttgtttgtttggtttgaggtgtggttttttaggtgtatagtgtagtgtttggtttttttatggtgtgtgataatgtggttatttttattggttggtgttgtgtggagttgggtgtgttggaggtgtttatgtttgagattgaggatttggt

SEQ ID NO: 3138 - DNA, 488 bp, Artificial Sequence
  chemically treated genomic DNA (Homo sapiens)
attaggtttttagttttaaatatgagtatttttggtatatttagttttatgtggtattagttgatgaaggtggttatgttgttgtgtgttatgaaggagttaggtattatattgtgtgtttggaaggttatattttgggttgggtgggtggttgttaatgtatgggtagttttggttatggtgttggtatgttggtatagggttgtgtttgtggttagttttgttaggaagttattgttattatttgggagatttaggttgtataaggtattgagttatttggttaggtttttttttatggtttttatgtaggttttattggagtgaaatggttgtatgtttttggttgttgagtttgtgatgtttgttattgggtttgttatgtttggattggttgagttattgtgggtaggaatatagtttaggattgttgtggggatttagtaagtgtttagtataaattaagttgttggttatttgtattagtt

SEQ ID NO: 3139 - DNA, 355 bp, Artificial Sequence
  chemically treated genomic DNA (Homo sapiens)
ttttagggttttttttttaatttatttttggtttttttaaggtttttatttatgtggatgagttttttagtttgttgtagagttagttgttttgggttttgggtattaatatttttattatgtttttagtggagaagtgtagtagtgtgtggttggtgttttttgagtgggagattagggtgtggatttttttggtgtttttgttgttgtttgggtgtttgttaaaggagttggagtgtgagttttgggtgttgttgttgtagagtgaggttgtgggtgggagagtgtggtggtatgtgggtaggaagttttttttggtgtttgtttttgattttttttgttgtagttttatttt

SEQ ID NO: 3140 - DNA, 355 bp, Artificial Sequence
  chemically treated genomic DNA (Homo sapiens)
ggggtggggttgtagtaggagggattgagggtagatgttaggaagaattttttgtttatgtgttgttgtgtttttttgtttatagttttgttttatagtggtagtgtttaaagtttgtgttttaatttttttggtgagtgtttgggtggtggtgggggtgttaggagagtttgtgttttggttttttatttggagggtgttaattatatgttgttgtgtttttttgttggggatgtggtggaggtgttggtgtttgaggtttagaatggttggttttatggtaagttggagggtttgtttgtgtgagtgggagttttggaggggttgggggtgggttgagaagaaggttttgggg

SEQ ID NO: 3141 - DNA, 385 bp, Artificial Sequence
  chemically treated genomic DNA (Homo sapiens)
attagtgattatagggtaatttgtagtatttgttgggggtttagtaggtaagatgttttttgtttgttgttgtttgttatggttgtttggtggttatggttgggggtgggtttgttatgttgggaattgtttagaggttgtggttagtttgaggttttttgttttggtgagttagtttttgagtgtagattgttgttgatgatttttgttttttggggtatttgtgtggttatgtgggttgggtaggattggtatttttttttttttattgttgttatggttaggggtgggtttattttttgaggttgtgtggagaggattttaggttgttgtatgtgagtagagtagttggtgtttggtttggatttttttgttatttggggtt

SEQ ID NO: 3142 - DNA, 385 bp, Artificial Sequence
  chemically treated genomic DNA (Homo sapiens)
ggttttagatggtagaggggtttgggttagatattggttgttttgtttatatgtagtagtttggggttttttttgtatagttttgggaggtgggtttgtttttggttatggtaatggtggggaggggagaatgttagttttgtttaatttatatggttgtatggatgttttaggaggtaagaattattggtgatagtttgtatttgggggttggtttgttagggtgaggggttttaggttggttgtagtttttgagtagtttttagtatgataagtttgtttttggttatggttattagatagttatgatagatagtagtaggtaggggatattttatttgttgagtttttagtaggtattgtaaattgttttgtagttattggt

SEQ ID NO: 3143 - DNA, 452 bp, Artificial Sequence
  chemically treated genomic DNA (Homo sapiens)
gtggagttttggggttattagagaagatatagtttagagaatttgagtaagaaattttatagtttgagtttagtagttattaagtggagggaaagttttgtttttttgtgaaattaaatgaaggtagttgagtattgtgattattgtattatttttgatgtttttgttggtttttaatttagttataaattttatgggtgggggatggtataatgttttatttgtttggttatgtgatttggtagtatttggattttgtttagttagttggtaggaaaattatattttttatgattgatggagtgtgtgtttgtggggattaagaggtgggggttgtgtggggttgagttattgttgttagggtttttaatattgttgtttagtggtggtttgggggttgttttggggtttttatttattaaatttaaggggtttttgagaggggaggttgt

SEQ ID NO: 3144 - DNA, 452 bp, Artificial Sequence
  chemically treated genomic DNA (Homo sapiens)
atagtttttttttttagaaattttttgggtttggtgggtgagggttttgaggtagtttttaggttattgttgaatagtagtattgaaggttttggtggtagtggtttagttttatatagtttttgttttttggtttttatagatatgtattttattaattataagaaatgtgatttttttgttagttggttgggtaaaatttaagtgttgttgaattgtgtggttaggtaggtggggtgttgtgttgttttttgtttgtgggatttataattgagttaggagttagtaggggtgttaggagtggtgtaatggttataatgtttagttgtttttgtttaattttatggagaagtggggttttttttttgtttagtagttattgaatttagattgtgaagttttttgtttagattttttggattgtgttttttttggtgattttaagattttat

SEQ ID NO: 3145 - DNA, 482 bp, Artificial Sequence; identical to SEQ ID NO: 2671
  chemically treated genomic DNA (Homo sapiens)

SEQ ID NO: 3146 - DNA, 482 bp, Artificial Sequence; identical to SEQ ID NO: 2672
  chemically treated genomic DNA (Homo sapiens)

SEQ ID NO: 3147 - DNA, 499 bp, Artificial Sequence
  chemically treated genomic DNA (Homo sapiens)
taaggttatgattgagaagttggagaaggagggtgtggttgggtgagttgtagaagtgggttgggtagtggggggtggggtgtgataggtagtggggggtggggtttgatagttggtttggtagaggtgggaagattgtgtggttagatttgtggtgtaaaggtttgaaggttatggaaggtggggtttgggatttattgggtgggtttattgaggtatgttttttatagttgtgtgatttggttttgatattgtttttatagtagttttggtggattttgtgtagttgtgtagtgatttattagttttggggtttttaatgttaatagtattaagtagatgttgttggattggtgttgagttaagatttgtggttatgaggtgagttttgggaggttagggggtttggaggtttttttagattttagtttaatattttttttttagtagagtttttattatttagtatattttttgttattgtgtggttttataggga

SEQ ID NO: 3148 - DNA, 499 bp, Artificial Sequence
  chemically treated genomic DNA (Homo sapiens)
tttttgtgaggttatatagtggtaggaagtgtattgggtaataggagttttgttaagaaggaggtgttgagttggggtttggggaggtttttaggttttttggttttttggggtttattttgtagttgtgagttttggtttgatattagtttagtagtatttgtttgatgttgttggtgttggggattttgaagttggtggattgttgtatggttgtgtggggtttgttagggttgttgtaggggtggtgttaggattaggttatatgattataaggggtatgttttggtgggtttatttagtggattttaggttttgttttttatgatttttgggtttttgtattatagatttagttgtgtggtttttttgtttttgttgggttaattattaagttttgttttttattgtttattatgttttgttttttattgtttagtttatttttgtagtttatttggttgtgttttttttttttagttttttaattatggttttg

SEQ ID NO: 3149 - DNA, 397 bp, Artificial Sequence
  chemically treated genomic DNA (Homo sapiens)
atatgttggtggtagttttggtatgttattggggggtatggtgttttatgttaggtggtatttgttgttgagttttattgtttagttttatttttggtatgtttatggtttgtggtaatgtgggtttaagggttgtgtttttggatttggtataattggttattattattatatttttgtttattttggttttgttggtgttgttgttgggttgttgttattatttattttagttggttgttatgggtttgttttgtttgggggttgtttgtagtttggttggagagttttggatattttttattggttgtggttttttgtttgtagttatttgtttttgtggatttaagttggtttagtaaagtaagtgtttgggtggttaattgagaaggtgggg

SEQ ID NO: 3150 - DNA, 397 bp, Artificial Sequence
  chemically treated genomic DNA (Homo sapiens)
ttttatttttttaattggttatttaggtatttattttgttgaattgatttgagtttgtggaggtaggtggttgtgagtaggaagttatagttggtagggggtgtttggaattttttagttaggttgtaggtggtttttaggtagagtggatttatggtggttaattgaagtgggtggtggtggtggtttagtagtagtgttgatagggttagggtgaatagaggtgtggtggtagtaattagttgtgttaggtttaggggtatagtttttaggtttatgttgttgtaggttatggatgtgttaaaggtgagattgagtagtaggatttggtagtgagtgttgtttggtatggggtgttgtgttttttggtggtatgttagggttgttattagtatgt

SEQ ID NO: 3151 - DNA, 353 bp, Artificial Sequence
  chemically treated genomic DNA (Homo sapiens)
agaatagtgaatgtggattattttgttttatttattttatttagtatttatggttggtataggttgggttgttgtagaagatgtagttagtggtttggttgtagttatgtagtatgatgaagtggttttggtagttaggagtgtggtagaagtagtggtggttattgggggtgaagtagtagtatttgatagggttggagtataggttatagtgtagtatttttgagtttattagtatgatggttatatggttttgagttaggtgtgtttggatgttttttatatttattgtgttgtgggtgggaggggggttagttggtgttgttgggtttttattttttattttttaaatg

SEQ ID NO: 3152 - DNA, 353 bp, Artificial Sequence
  chemically treated genomic DNA (Homo sapiens)
tatttgagggatggggaatgggggtttagtagtattagttgattttttttttgtttatagtatagtgagtgtgaaggatatttaggtgtatttggtttagggttatgtggttattgtgttggtgaatttgggggtgttgtattgtgatttgtgttttagttttgttaagtattgttgttttatttttagtggttattattgtttttgttgtatttttgattattagggttattttattgtgttgtgtggttataattgggttattggttgtattttttataataatttagtttatgttgattgtgagtgttgggtggggtgggtgaggtagagtggtttatatttattgtttt

SEQ ID NO: 3153 - DNA, 483 bp, Artificial Sequence
  chemically treated genomic DNA (Homo sapiens)
tttagagatatttttttgggaagatagttggaaggtagggttgagttggggttatttgtgatttagtggtgaggtgatgaggtattgatgaaagtattgtattttttttttttgagaaatgttttggtattagatgagttttgggggagggaggagaggaatttggtagggatttggttataagttatttggagggtggtgtgaggattggaaaagttgttgtttgttttgtttggttttattttttgaatgaggttattgaatgtgtatgggaggtttagtgttgttttattttagtttgatggagaaattttatttgaaattttaaagtagggtagggatatttttattagatatttttgtagtttttgttttgtgggatgaagtaagggatgatgatatatttgtttgtttatttggaagtgagttttaggttattgtattagaagggtgataatttaatataagttattgttaagtaat

SEQ ID NO: 3154 - DNA, 483 bp, Artificial Sequence
  chemically treated genomic DNA (Homo sapiens)
gttgtttagtaatgatttgtgttaggttgttatttttttgatgtaatgatttgagatttatttttgggtgggtaggtgagtgtgttattattttttgttttgttttataggataaaggttgtaaaagtatttggtgggaatgtttttgttttgttttgggattttgggtaggatttttttattaggttggagtggggtagtgttgagttttttgtgtatatttagtgattttatttaggggatgagattaaatagaatgggtagtggtttttttggtttttatgttattttttagatggtttataattagatttttgttaaatttttttttttttttttttaagatttatttgatgttaaagtgttttttaaaagggggaaatatagtatttttgttagtattttattattttattgttgggttataaatgattttggtttagttttgttttttagttgtttttttaaggggatgtttttgaa

SEQ ID NO: 3155 - DNA, 498 bp, Artificial Sequence
  chemically treated genomic DNA (Homo sapiens)
attaatttttttaatttatttattttgtagatgaattatggtgtgtattaagtagatggtttgtaaatttataggtggtaaagtattgtgtaaatagttggttattaaggtagtttgtaagagtgttttggttatgggtggtgtgaagaagttttattgttattgttttggtattgtggttttgtgtgagatttgttgttattagaagtttattgagtttttaatttggaagttgttgttttagtgtttggtgtgagaaatagtttaggattttaagattgatttgtgtttttagagttttgtggtgatggtgttgtaggaggtttgtgaggtttatttggtggggttttttgaggatattaatttgtgtgttatttatgttaaatgtgtgattattatgtttaaagatatttagtttgtttgttgtatttgtggggagagggtgtgaattgttttgagtataaattttaaatttaaaggttttttttagagttaatt

SEQ ID NO: 3156 - DNA, 498 bp, Artificial Sequence
  chemically treated genomic DNA (Homo sapiens)
ggttggttttgagaagagtttttggatttaaggtttgtatttaaaataatttatgttttttttttatgaatgtggtgggtaagttggatgtttttaggtatgatggttatgtgtttggtatgaatagtgtataggttggtgtttttgaaaagttttattaagtaggttttgtaggttttttgtagtgttattattgtggaattttggaagtgtaggttggttttgaagttttgagttattttttgtattaggtgttgaaatggtagtttttggattagaagtttggtagatttttggtagtgatggattttgtgtagagttatggtgttagggtggtagtgatggggtttttttatgttgtttgtggttggagtgtttttgtgagttgttttagtggttagttgtttgtgtggtgttttattgtttgtggatttatgagttgtttgtttagtatgtgttatagtttatttgtaaagtaaatgagttaggaagattggt

SEQ ID NO: 3157 - DNA, 433 bp, Artificial Sequence
  chemically treated genomic DNA (Homo sapiens)
ggatgtaatttggagagtaggagaaagtaatttttattaaatttataaatttttttatgttagatgttagggattttttgaattgaggttgaatttttgtgttttagtggaataattattttagttggtttaaattagtttattgttaaatgtagtaaaaatgttggtaaaagttttattttttggtgtgttgaataaaaggaagtaaaaatggattaaagtaatttttaagaggagtaaggttagaggtgtggaattgttttttatgtttatgttaatgagtttttttttggatttattttaagtttatggttattattatttgttttagttgagggttggatttggatagttttttgtttttattttttgtggttgaatttttgaaattttagggtttggtatttgtgtgggttgtttatatggttgagat

SEQ ID NO: 3158 - DNA, 433 bp, Artificial Sequence
  chemically treated genomic DNA (Homo sapiens)
attttagttatatagatagtttatgtaggtattgagttttggggttttagggatttagttataggaagtgggggtaggaagttgtttaaatttagtttttagttaaagtaaataataatggttgtaagtttaaaatagatttagggaggagtttattaatgtgaatatagaaagtagttttgtatttttggttttattttttttggaaattgttttggtttatttttatttttttttatttgatgtattagaaaataagatttttattaatatttttattgtatttgatgatgaattaatttagattggttaaaataattgttttattgggatataggaatttaattttagtttagaaaatttttgatatttgatgtaggaggatttataggtttagtggaaattgtttttttttgttttttagattgtattt

SEQ ID NO: 3159 - DNA, 461 bp, Artificial Sequence
  chemically treated genomic DNA (Homo sapiens)
ttttagtttgtttatggttaggagttgtttaaaaagttgtatttattttagttatattttgttatatttttaagtttgtggatgattttgtttgagtttttagtagttttaaagttttgttaatagtagatggaggtattatgttgagttttgtggagagaaagttttgtattgtgtaagtgatttatttggtattagagagggggaggggaagagaaattttgatgggttttagggattttttatttatttatttttttttgggatttttttttggagggtttttgtaaatatagttgttttgttatggtggaggattattaatagaaatttatgaaataaggttatgttttgtggtattttgagttagttttgtagtgtgatttattagttttttgaaaaaagaaatttgttaggatttgggttggaattgtaagatgtaaagatgttaagttgaaaaa

SEQ ID NO: 3160 - DNA, 461 bp, Artificial Sequence
  chemically treated genomic DNA (Homo sapiens)
ttttttaatttgatatttttatattttatggttttagtttaggttttagtagatttttttttttagagagttggtaaattatgttatgggattgatttagagtgttatggggtatggttttgttttgtgggtttttgttgatgattttttattgtggtggggtaattgtgtttgtaagagttttttaggagaggattttggggagaagtagatggatgaggagtttttggagtttattaggatttttttttttttttttttttttggtgttaaatgggttatttgtatagtgtaaagttttttttttatagagtttagtgtgatatttttgtttgttgttggtaaagttttaagattgttgggaatttagatgaaattatttataggtttggaggtgtggtagggtgtaattagaatgagtgtaattttttaaatggtttttaattataggtaggttggga

SEQ ID NO: 3161 - DNA, 440 bp, Artificial Sequence
  chemically treated genomic DNA (Homo sapiens)
tatttataattttttattagtaaagatttgattattaaataaaggtagtttgattagattatggttttatgatgggtttgagaggggttttgttttatattttggttgtatttttagtggggtttatttttaattgttttatgatttggggagatatattgttgattttattgtttagagttttttttttttttttttttgtggaatgagtgatgttttatatggaagattaagatatataataataaaatagaaatttttatgtttagttgtagttagatttatggttaagtttatggagattatttagggttgggaatatatgtttaagaatgtttttgtagttataattgtgtatggagtgagatgttgttatagattatggatagtaaatatttttgaggttgtgtgttattttttgtaggtttatgagttttttt

SEQ ID NO: 3162 - DNA, 440 bp, Artificial Sequence
  chemically treated genomic DNA (Homo sapiens)
agaaagatttatgggtttataggaagtgatatataattttagaggtatttattgtttatagtttgtaatagtattttattttatgtatagttgtaattgtagagatgtttttggatgtgtgtttttagttttaagtaatttttataaatttaattataaatttaattatagttaaatgtgagagtttttgttttgttattatatattttaattttttgtgtggaatattatttattttataagaaaaaggagaagaaaggttttgaataataaaattagtaatgtgtttttttaaattatgaaatagttaagaatgagttttattgaaaatataattagaatgtgaaataaagttttttttaagtttattataaaattgtggtttggttaagttgtttttgtttagtagttaggtttttgttagtgaaaagttgtaaatg

SEQ ID NO: 3163 - DNA, 334 bp, Artificial Sequence
  chemically treated genomic DNA (Homo sapiens)
attatttgtttttttaaaatgttttaattgtattggtaaaaggagtattttttattttttaaagtttattgtaattggattgttagagtagtattattaaaaggataatgatggtgttatttttaaatagatttttttaaaataattgtttttttttattgagtgttggtatggtatttgtgaaattttgatggggttagtgggttttttgatgttgtttattagaagattgtttttttttgatttattttttttttttttgttttttttttatttatatttatgttggttttatttagttattgtaatttgtttttgtatttgaattaagtta

SEQ ID NO: 3164 - DNA, 334 bp, Artificial Sequence
  chemically treated genomic DNA (Homo sapiens)
tggtttgatttaggtgtaaagataagttgtagtagttaaataaaattaatgtgagtgtagatgaggaaaaaataaaaggagagagagtggattggaaagagataattttttggtgggtaatattaaagaatttgttgattttattagaattttatgagtgttgtgttagtatttagtaaggaaaagtaattattttaagaaaatttatttgagggtaatattgttattatttttttaatggtattgttttaataatttagttatagtaggttttaaaaaataagaagtgttttttttgttaatataattaaggtattttggagaggtagatggt

SEQ ID NO: 3165 - DNA, 308 bp, Artificial Sequence
  chemically treated genomic DNA (Homo sapiens)
gagtttttttttaattttgagaatttgtggttttaaaagtgtggatggtttagtaggggtaaaattttagttttgttttatagtttttgttgttatgaggtgagttgtttttttttgagggtattagagggttttatttagttaggtattgttttttaagtatgtgttttatgtgttggggtaggtttattattggattttatttatgttttggtagttagtgggtttagtggaatatttgtgattgggaatatggtgatattgtattgatttggatttttattttttttttttatagttgtatatag

SEQ ID NO: 3166 - DNA, 308 bp, Artificial Sequence
  chemically treated genomic DNA (Homo sapiens)
ttgtatgtagttgtgagaaaggagagtggaaatttaagttaatgtagtattattgtgtttttaattatgagtattttattgggtttattggttgttaagatatggatgggatttagtggtgagtttgttttagtatatgaaatatatgtttgggaaatagtgtttgattggatggagttttttggtatttttaaagagaagtaatttgttttatgatggtaagaattgtaaaataaagttaggattttatttttattgggttatttatgtttttagaattatagatttttagggttagggaagaattt

SEQ ID NO: 3167 - DNA, 496 bp, Artificial Sequence
  chemically treated genomic DNA (Homo sapiens)
gtgtgtgggaagaggttgggtgttttttagattattgtattatgtttttttatatttgtttaagtttttgtgtgaatattgaaataaagtgttatgaattttgtttttggtatttgttggttatagttgtggttttgggttgtatatttgttgtggttttagagtttttgagaagttattggttgggagggtgttaagaatggttggtgtatgtggtaattgagtgtttaaggggaggaggatgatttttagtgtatttattgttttttagtttttattttaattttgttataatttagagagatgtttttttggtgtgtttatagagagatggatgtgtgtttaggaatgtataatttagtgagtagtttgaatatttagatgttgggaatattgttgagtatttatttttaaagtttaagttttttatgtttagttagtgttagtttgtaagaaagaattagttgtttttaatggattatgttagttggatttg

SEQ ID NO: 3168 - DNA, 496 bp, Artificial Sequence
  chemically treated genomic DNA (Homo sapiens)
taagtttagttaatatgatttattaagaataattagtttttttttataggttaatattgattagatatggagaatttgaattttaaaaataaatatttaataatatttttaatatttagatgtttaaattgtttattaaattatgtatttttaagtatgtatttatttttttgtggatatattaggaaaatgtttttttaaattataataggattgagataaagattggagagtaatgagtgtattaagaattatttttttttttttaagtatttaattattatgtgtattaattatttttagtgtttttttaattaatggttttttagagattttgaaattataataaatgtgtaatttgaagttatagttgtggttgataaatgttagaagtaaaatttatgatattttattttagtatttgtatagaagtttggataggtgtgaggaagtatggtataatgatttgaggaatatttagtttttttttatatat

SEQ ID NO: 3169 - DNA, 472 bp, Artificial Sequence
  chemically treated genomic DNA (Homo sapiens)
aatttaattttttttttattgttatgttggaaaatatattttggaaatttttattttttatgtaatatgtaaatttttttattaagataagtgttgtttggatgtgtattgtttagagttttgtaatttgttttattattttattaattattttagttgttttttttaaatttaagttttgtttttttttgtttttttttgttttttgttatgtggatgttaagtttttttaaatattttattaaatttaatgatagattgttattagttgagagtgttttttggtgaagagttggagtgatgtgttgttttgggtgtagagtgtgtgtttaataaatatgggtgatgaagggttatgtagttttatagtatgtggttttattttatttatttggtatatgtaggttaatgaggttgagagagttgtgggtggtatgtttagtgaaggattaggatatttgtttaaggtttt

SEQ ID NO: 3170 - DNA, 472 bp, Artificial Sequence
  chemically treated genomic DNA (Homo sapiens)
ggagttttgggtagatgttttgattttttattaggtatattatttatagtttttttagttttgttagtttgtgtgtgttaaataaataaaatagaattgtgtgttatgaggttatgtgattttttattatttatatttgttgagtatgtgttttgtatttaggatagtgtgttgttttggttttttgttgagaaatgtttttagttggtggtaatttattgttagatttagtaaaatgtttagagggatttaatatttgtgtgatagagaatgaagaaagatggagagggatagaatttagatttggaaagagtagttaaaatggttaataaaataataaagtaaattataaggttttggatagtatgtgtttagataatatttgttttggtaaagagatttatatgttatgtaaagaatgagaatttttaggatatattttttagtatggtaataggaagaggattagatt

SEQ ID NO: 3171 - DNA, 241 bp, Artificial Sequence
  chemically treated genomic DNA (Homo sapiens)
ttttttttgttaatatttgttttagagtgtatatataggtttttgttagagatatttgtttgttgggtttttatgtaaatggtagattgaagggtagtgtgattgttttagtttttaatgttgtattatatattttgagtttttggttttttattagattttaaggaatgattttatgttttgtggtttggggttttatgtatttagttttgtttgttttttttgttttttttttttagtt

SEQ ID NO: 3172 - DNA, 241 bp, Artificial Sequence
  chemically treated genomic DNA (Homo sapiens)
gattggagggagagaataggaaaagtaagtagaattaaatatgtaggattttaaattataagatatgaagttattttttgaggtttaatagagaattaaggatttagagtatgtgatatggtattaggaattagaataattatgttattttttaatttgttatttgtgtaagagtttagtaggtgaatgtttttggtaaagatttatgtgtgtattttgggataagtattgataagagagg

SEQ ID NO: 3173 - DNA, 395 bp, Artificial Sequence
  chemically treated genomic DNA (Homo sapiens)
ttatatgatttatttttagtaaaaaaattgtttatttaagtataggaaagttaatttttgtattaaaagagaattgagaaatttaaatagtttatgatttttattgttttggtttttgttgtaaagtgttattgtgaaaaattggttttgattttagtaattaatgtttttttattgtatagagatggtttggtgttattgtgttattgtggttgttaagggtagggttttttagtaatgtataatggttagaataagttttttttaattttgtattaagggtaggtttttagttttaaattatttttttattttattttagtttttttttgggagttgtggtttttttttgtggttgaatgtggtttagttttttttgaattttgttttttttt

SEQ ID NO: 3174 - DNA, 395 bp, Artificial Sequence
  chemically treated genomic DNA (Homo sapiens)
gggggaggatagggtttaggaaaagttgaattatgtttaattatagaaagaaattatagtttttgaagagaaattggaataagatggggaaatgatttgggattgggggtttgtttttagtgtagggttggggaggatttgttttggttattatgtattgttaaggaattttgtttttagtagttataatggtataatgatgttaggttatttttgtgtagtgggaaagtattgattgttgggattaggattaattttttatagtgatgttttgtagtagaggttaaagtaatgaagattatgggttgtttaaattttttagtttttttttagtatgaaggttggtttttttatgtttaagtaaatagtttttttgttgagagtaaattatgtga

SEQ ID NO: 3175 - DNA, 258 bp, Artificial Sequence
  chemically treated genomic DNA (Homo sapiens)
atttttaatatttatgtatatttatgggaatttattagagggggaagtttggatttaaaatttttttttatgaaatagttaaagattaagaggtgaattgtgtgggatatgaagtatgttatggttgagttgttgatgaggttttggttgtgttttgtattatgtaagggtttagtattttgagaaggtgtttggtaaatgttattggttgattggatggtagtttttggaaggtttgttgattagaaatagagtttt

SEQ ID NO: 3176 - DNA, 258 bp, Artificial Sequence
  chemically treated genomic DNA (Homo sapiens)
aaggttttgtttttgattagtaggttttttgagaattgttgtttgattagttagtggtatttattaggtatttttttagggtgttgagtttttatatgatgtaaagtatagttgaggttttgttagtagtttagttatgatatgttttatattttatatgatttattttttgatttttaattgttttatggagggaaattttaaatttaggtttttttttttaatgaatttttataaatgtgtatgggtgttaaaaat

SEQ ID NO: 3177 - DNA, 498 bp, Artificial Sequence
  chemically treated genomic DNA (Homo sapiens)
ttttggtttattttttatttttatttatagttttaatggaagggtttaggtttttaagtgggtttgtgtatttttagaatattatttaagttattttaaggtatgaagttttttttgggtgtatttgttaatgagttaattgttggttttgttggaaggttttattttgattatggtttgttggtggttattaataaaatattttggattttataagttttatgtttgaattttataagatttgtattttattaattagttatatgtgggttgatattgaaaggtatatgttgatatttgtttgtttaggggaaatttattatttttttattttagttagggggtggtgtgtaggttgtggaattttttaatgagtgtgtttttttttattttttgggtttgtgtggatttttgtttatttttatatgttttggggggggggttgggtttatatgttttggaagtttttagaggtgattttttttgggatttttgtat

SEQ ID NO: 3178 - DNA, 498 bp, Artificial Sequence
  chemically treated genomic DNA (Homo sapiens)
gtataggggttttagggagagttatttttaggggtttttagggtgtgtgggtttggttttttttttagggtgtgtgggggtggatgggggtttatgtgggtttagggggtgaagagaaatgtgtttgttagagaattttgtggtttatatgttgttttttaattaaaatagagagatggtagattttttttgggtggataggtgttagtatgtgttttttagtgttaatttgtgtgtggttgattggtgagatataagttttgtgaaatttaaatgtgaaatttgtgaaatttaaagtgttttattaatggttattagtgagttatgattaaggtggagttttttagtgaaattaatgattggtttgttggtaggtatatttaagggaggttttatattttgaggtgatttagatggtgttttggagatatgtaggtttatttggggatttgggtttttttgttgggattgtaaataaaaataaaaggtgggttagag

SEQ ID NO: 3179 - DNA, 380 bp, Artificial Sequence
  chemically treated genomic DNA (Homo sapiens)
ttttgatagtggttttgttttttaggattttttttttttttatagaatttagtatattggagagatggtagagatggtatttgatttgttgttgatgtgattgttttttttaaaatgtttagattttgatttattaatgttaaagtttttttatgagatattggtgttagggtggtattgggtaatattgttgtatgtttataaatagttgtagtgaaagtgttttggtagttggtttttgagatatagaaaagtaaaattgttatgtaagttggtaattgagtagttatgttgaagtttaatgagtgttgaaaaatagagtatgttttggtatttatagaaagaagatatgtggtgtttagaatttagtattttaaatt

SEQ ID NO: 3180 - DNA, 380 bp, Artificial Sequence
  chemically treated genomic DNA (Homo sapiens)
agtttaaggtattaagttttggatattatgtgttttttttttataaatattaggatatgttttgttttttagtatttattggattttagtatgattatttagttgttagtttatgtggtaattttgtttttttatgttttaagagttagttgttaggatatttttattgtagttgtttatgagtatgtagtgatattgtttaatgttattttaatattagtgttttgtgaggaggttttggtattaatgaattggaatttggatattttggaaggagtgattatattagtagtagattaggtattatttttattatttttttagtgtattggattttatgagaaaggagggggttttaggagatagggttattgttaggg

SEQ ID NO: 3181 - DNA, 405 bp, Artificial Sequence
  chemically treated genomic DNA (Homo sapiens)
gtattgtttgaatgttaggtaggattttgttttgggtaatggttatgttgtttaaaagtttattgagttttttattattgtggattgttagttgtaggtggtggggaataatgtgagtttttttgttattgtgagatgtattgtttgttagtttaaggatttttgttgtgagatattttaatattgttgttaaatatattggtgtgtttgtttttatttgttttgtatagttttttttatgaagtagatgatggatttggtttatgggaaattgtaaatttgttttagaagagtgagatttagatttggtgtgtgttttttttttttgttttttttgtttagatatttttttgtattaaattgtagtaatatgagaattatatttttagggttgttattgggttt

SEQ ID NO: 3182 - DNA, 405 bp, Artificial Sequence
  chemically treated genomic DNA (Homo sapiens)
aggtttagtagtagttttagaaatgtggtttttgtgttgttgtaatttgatgtgaggagatgtttggatgagggaagtagggaggaaaagtatgtgttaagtttaagttttgtttttttagagtgggtttgtagttttttgtaggttggatttattgtttgttttgtaagggaaattatgtagagtggataggggtaggtgtattagtgtatttggtggtagtgttagagtattttatagtagaaatttttgagttggtaggtaatgtgttttgtgataataaaaaaatttgtattattttttgttatttgtagttagtgatttgtaatgatgaggaatttaataagtttttgggtggtgtgattattgtttagggtggagttttgtttaatatttaggtagtgt

SEQ ID NO: 3183 - DNA, 500 bp, Artificial Sequence
  chemically treated genomic DNA (Homo sapiens)
gatttatttgtgttggtggaaatggtaatgtaggtattgtttgagggagttttagaaattattgttttggggtagaatttgtaattattttgtgtggttttttaaaatgttttttattttttgtttttgaataaaatgtttttataaggaaatattagggagaatttgggtttattgattgtatgttttaggtattttttttggggtaggtaagtagggggttgtgtttttttttgtgttggttgtgtggttttttattgggatttttttgatggtgtgaggtaaggagtggattgagaggtttttgagttttgagttgagtgtgtgtgggttgtgtaggaggtttttgtgttgtttgtagtttttgtgaggatttaggtttgatagttggtgaggtagtttttggtgtgtgtgtaggagtttagatttttggttttgtttttggttgggttagtttgggtgttgtggttgtggttgggtgtgtagggggtttaggttgt

SEQ ID NO: 3184 - DNA, 500 bp, Artificial Sequence
  chemically treated genomic DNA (Homo sapiens)
atagtttgaattttttgtatgtttagttgtagttgtagtatttaggttggtttggttagaggtagagttaggagtttgggtttttgtatatgtattgggggttgttttattagttgttgggtttggatttttgtagggattataggtggtatgaggattttttgtatggtttatatgtgtttagtttaggatttggagattttttgatttattttttattttatgttattgaggaggttttggtaagaggttgtgtaattagtgtgggagggaatatagttttttatttatttattttagaaaggatatttggaatatatagttggtgggtttgggttttttttagtatttttttataaaaatattttatttggaggtggagagtgagggatgttttgaggaattatataaagtagttgtgagttttattttagaataatggtttttggagtttttttaaataatgtttgtattattatttttattaatatagataaatt

SEQ ID NO: 3185 - DNA, 475 bp, Artificial Sequence
  chemically treated genomic DNA (Homo sapiens)
ttttgattttagaaggtttggagaaagtgtgagaagggagattagattagaatagattgatggaagggaaaggtggtgagggtgaagtaagagaaatttggttttagtgaaaaggatttattattgtattttagaatgtaatttgtattttatatgtaaatgaggaggttttttagaggttggattgggttgggtttagttgagtttttgtaaatagtagggatttaattttggggaattgtagattaaagtgagagagggatgtattgtatttttaggtatatttaaaaaggatggatgagatattgaagtagaggatataggaggattaaaggatttaggaaagtaagtagttttttggagaagttgttgaaatttaagattggtaagagaagtaaatttaattttttatattgattattttttattttttgaaaagaagagattgtttttttagggaagtgaaaataatgaa

SEQ ID NO: 3186 - DNA, 475 bp, Artificial Sequence
  chemically treated genomic DNA (Homo sapiens)
tttattatttttatttttttggggaaataattttttttttttagggaatgagaaatgattggtgtgagaggttgaatttgttttttttgttagttttgaattttgatagtttttttggagggttgtttgtttttttgaattttttaatttttttgtattttttgttttggtgttttgtttattttttttggatgtgtttggagatgtggtgtgttttttttttattttggtttgtagttttttagggttgaatttttgttgtttgtaaaggtttagttaagtttagtttagtttagtttttaggaagtttttttatttatatatgaaatgtaaattatgttttggaatgtaatgatgggttttttttattggagttgagttttttttgttttatttttattgttttttttttttattaatttattttgatttgatttttttttttatgttttttttaagttttttagaattagag

SEQ ID NO: 3187 - DNA, 426 bp, Artificial Sequence
  chemically treated genomic DNA (Homo sapiens)
tttttattattttatagatttagatatttttgattttttaatgttaaagtttatatatttgtattaatatttatataaattaatttattttatgtatatatttatattaattttattattatttaatttatatttatattaattgtttggttttataagtatttagtttgtgattttgaatatgtttaggtattaattatggttttttttaggttatgagttgtttttaatttttttttttttttggtttgttttgtttaattttgttaaaataaataaatatggtttttgtaataatggagaaagatgttattttaattaaaaagtaataataatgtggtttgtggttttttgggttgtttgggttatgttttattggtttttattgagtttggtttttttgggttgttgttttttttgtttttt

SEQ ID NO: 3188 - DNA, 426 bp, Artificial Sequence
  chemically treated genomic DNA (Homo sapiens)
gggaggtaggaagagtagtagtttagaaaagttaggtttagtgggggttagtggagtgtggtttaaatagtttagagggttataggttatattgttattattttttaattaaaatggtgtttttttttattattataaaagttatgtttgtttattttagtaaaattagatagggtagattaggaaaaagaaaaaattaaaaatgatttatgatttagagagaattatagttaatgtttgggtatatttagagttatgaattaaatgtttatggggttaggtagttgatataaatgtgaattgggtggtagtaaaattaatataaatgtgtgtatagggtgagttaatttatataaatattaatataaatatgtgaattttgatattaaaaaattaggaatgtttgaatttgtgaagtaatggaga

SEQ ID NO: 3189 - DNA, 422 bp, Artificial Sequence
  chemically treated genomic DNA (Homo sapiens)
gatatttatttttagggtaagtggttaattttttttttaagtttgaataataaatgtttaattatttttttattttttttaaatagtaatgtgttttgtatttagtttgtgtttgtttgttggtgtagagttgatattatttgattttattttatagagattttgtgtttgttagatgtttaaataagtggttgatttagggtaaaaatattagttaagttatttgttttatttagttaaagaattagtgtaggtaaagtaggtgagttagtagtttagtgtaggtaaagttgtgtgtttttgaatgatttttttagttgttatttttgggagggttgggtttttggggtatttttaaaggaattgttttgggtttaaggtaatatttttttttagtagtttttttttttttatttttagtg

SEQ ID NO: 3190 - DNA, 422 bp, Artificial Sequence
  chemically treated genomic DNA (Homo sapiens)
tattggaaatggggaaggagaagttgttgagagagaatgttgttttgagtttaaggtagtttttttaggagtgttttaaaagtttagtttttttaggaatgatggttggaaagattatttgaggatatgtagttttgtttatgttgggttattgatttgtttattttatttgtattgattttttaattgagtgaaataaatggtttgattaatatttttgttttgaattaattatttatttggatatttagtaaatatagggtttttgtgaaataggattaggtaatgttagttttgtattggtagatagatatagattggatgtagagtatattattgtttaggaaaaataaaaagatgattaggtatttattatttgagtttaggaaggaaattagttatttgttttgagagtggatatt

SEQ ID NO: 3191 - DNA, 365 bp, Artificial Sequence
  chemically treated genomic DNA (Homo sapiens)
ttttataggtgtatgagagaaaattgtagttttaagtattagagtattattaaatataatatattttgtatgtaggggtagttatttaatattaaattaataaaatattattagtgttggtgagagttttggttgttgatagtaggttaggtgttttatagttatgttgtttttttgtttgtaggttaattttatatagttgtttttttttggaaattatgttttatttgaagtttttgtaagtatgataaatagtttttttaagttttagtgatggtggagaaatttgaaaatatttaggagtatttattaattagaatatgaaagaagatttagtttaattgtagtttttgattgtgtggagg

SEQ ID NO: 3192 - DNA, 365 bp, Artificial Sequence
  chemically treated genomic DNA (Homo sapiens)
tttttatatagttaaaagttgtagttgaattaaatttttttttatattttagttaataaatgtttttaaatatttttaagtttttttattgttgttaaggtttagagaggttatttgttatatttgtgaaggttttaaatgaggtatgatttttagaagaaagtagttgtgtaaaattggtttgtaaatagaaagatggtatggttgtgggatatttagtttgttgttaataattaaaatttttattggtattggtaatgttttattggtttaatattaaataattgtttttgtatatggagtgtattatatttaatggtattttaatatttggaattgtagtttttttttatgtatttgtaaaa

SEQ ID NO: 3193 - DNA, 356 bp, Artificial Sequence
  chemically treated genomic DNA (Homo sapiens)
gggaagttatttaatgtagatgtttaaggaattttatgtttaaatatggttattgttgaatttgatgggagaaaaaaaggattgtatttttgttggttaatgtggtatttttggatgtttattaagttgttaaaaaatgtgaaatgatgatttattgtgaagtttttttaatttttttttttgttttaatttgtttgtggtttgaaggaatgtatattgatttgagttaaagaagaaatttgtggtttttattatagtttgtaaatattgattgttgaaagttttaagtgtgttattattttttgttatatatatgttttatatatagtttattttggaaaatagattgggagagt

SEQ ID NO: 3194 - DNA, 356 bp, Artificial Sequence
  chemically treated genomic DNA (Homo sapiens)
gtttttttaatttgttttttaagatgaattgtatataaagtatgtgtgtggtaggagatgatagtatatttgaggtttttagtaattgatgtttatagattataatggaaattataagttttttttttaatttaagttagtatatatttttttaagttgtaggtaaattggagtagggaagggggttgggaaggttttatagtgagttattattttatattttttaatagtttaatgaatatttagaaatgttgtattagttagtaaaaatatagtttttttttttttttattaaatttagtaatgattgtatttggatgtgggattttttgagtatttatattaagtgatttttt

SEQ ID NO: 3195 - DNA, 474 bp, Artificial Sequence
  chemically treated genomic DNA (Homo sapiens)
tgatgtttttggggtaggtttattttagaagttttaagaaattttaaaatgagttttatgatgtttgttgtgtttggatataaaatgagaaatagaaaatttgtttttttattttatgggtggagtgttgtttttttatattttaattttttttaataagaaaagggtgttttgaatgtggtgggaaagggtagattatatggtgggaagttatgtaatataagatatattttattgtatggtgtgtttttgtattatagatgtgtatatagatgtgattattaatagagataattagtttataagttttttttggaaattttttattgtttttagtagaaaagtgatttttagttaaggtttgagttgaagtttagtttatgattaaagtatttttaattgttttatattgaaaagaaagaaaagagaaatgattagtagtggttttttagttaaggtgtgagattagaggtt

SEQ ID NO: 3196 - DNA, 474 bp, Artificial Sequence
  chemically treated genomic DNA (Homo sapiens)
gatttttggttttatattttggttggaaaattattgttggttattttttttttttttttttttagtgtggaatagttggaaatgttttaattatgggttgagttttagtttaggttttggttgaaaattatttttttattaaaaatgatgaggagtttttagggagggtttgtaaattagttatttttgttgatgattatatttgtgtgtatatttgtggtatagaaatatgttatgtaataaagtgtattttgtgttatatgattttttattatgtggtttgtttttttttattatatttaagatgttttttttttattaaaaagaattaaaatatagaggagtaatattttatttatagggtgagaaggtagattttttgttttttattttgtgtttaagtatggtaaatattatagaatttattttgagattttttaaaatttttaaagtaagtttgttttaaaggtatta

SEQ ID NO: 3197 - DNA, 412 bp, Artificial Sequence
  chemically treated genomic DNA (Homo sapiens)
aattattttatgatatatttttttttttttagatgtaaaaattgaggagttagttgttagttgaatattttagtattatttttttagtaattattttaaggaatgtatttgaataaaatgtagttttggtattattttaaaaaatggatgatgatttatgttttttttgtggggataagatggttgtgggtatgagttatgattgtatgttgggaagattttgatgggaattttgtttttgttggttgagttataatttatatggatttgagattgtgtgtggtttttattaatatgtttattttgtttgttaaggtttgagttttatttttttttttttgattaaagttttgtttgtattttatatatatttgatttaaaatttgtgtttggaatttagagtggtttggga

SEQ ID NO: 3198 - DNA, 412 bp, Artificial Sequence
  chemically treated genomic DNA (Homo sapiens)
ttttaagttattttgggttttaagtatagattttgaattaggtgtgtgtgaaatataaatagggttttagttgggaagaaaaagatgaagtttgagttttaataagtaaaatgaatatgttaataaaagttatgtatagttttaagtttgtgtaagttatggtttaattagtaaaagtaaggtttttattggaatttttttagtgtatagttatgatttatgtttatagttattttgtttttgtaagaaaagtataaattattatttattttttaaaatgatgttaaaattgtattttatttaaatgtattttttaaaataattgttgagaaaataatattagagtatttaattgataattgattttttagtttttatatttggagagaaaaaaatgtgttatggagtggtt

SEQ ID NO: 3199 - DNA, 464 bp, Artificial Sequence
  chemically treated genomic DNA (Homo sapiens)
tttgggaggatggatataagtgtaatttaaattttggagttttttataattgtaaggtagtattatttatttaaatataaaaataggttattaagtattattaaagggaaaagtaaatgtttagggattatttttgttgtattgttgttggggaaagaggttttttgtttttttaagagtttttagatatatttttagttatattttaaaagtttttttagttgtgtagtttaggtgtatttggtagtatagttgtgttttgatttttttggtagatgttataatttattgttatttttatgtaggaatgtagggtgaggggtttttatgttggttttgtgatttattgtttgataagttttgagtgttaattttaggtaggtttagtggaggtggaatattatttatttgatagtgtttgtgataaagtgggtaattagatgtatttggaaaagtttggttgg

SEQ ID NO: 3200 - DNA, 464 bp, Artificial Sequence
  chemically treated genomic DNA (Homo sapiens)
ttagttaggtttttttaagtgtgtttaattgtttattttattataggtattattaggtaaatggtgttttatttttgttgggtttgtttgaggttgatatttaggatttgttaggtaatggattatagagttggtatgggggttttttgttttgtatttttgtatgggggtgatagtaaattatgatatttgttaggaagattagaatatggttgtgttattggatgtatttaagttatataattaggaaggtttttaggatgtgattagagatgtgtttgaaagtttttaaagggataaagagtttttttttttagtaatagtgtagtagagatgatttttgaatatttatttttttttttgatgatgtttaatgatttatttttatgtttgagtgaataatgttgttttgtagttgtaaagggttttagagtttaagttgtatttatatttatttttttaag

SEQ ID NO: 3201 - DNA, 429 bp, Artificial Sequence
  chemically treated genomic DNA (Homo sapiens)
aggaaaatgggtagatggtataagaggatattgaatgtattgaaggtagtttaaatattttatgtattagttattttggatatttagtggagtgaatgtggtatttattaatgtttaatgttggtttgggtaaagtttagatagtttgttggtagtaagaaagttaaaggtaagaaggtttgtgttgattgttgtttgtatttatgaggttgagaaatagtagttatgaattagtttgtttgagattttgttgttattatttgtagtagtaaggaagataatattttaaaaagtttttaggaataaaatgagttttaattattagaggaagaattatagtttgtagttatattgtttagaggtttaatgatgatttattgtaaattagattaattaagaatattttttatattgtagttttgagtggtt

SEQ ID NO: 3202 - DNA, 429 bp, Artificial Sequence
  chemically treated genomic DNA (Homo sapiens)
agttatttaagattataatatggggggtatttttaattggtttaatttgtaatgaattattattaagtttttaggtaatgtagttgtagattgtgattttttttttagtggttaagatttattttatttttgaaagttttttaaaatattattttttttattgttgtaaataatgatagtagagttttagataggttgatttatagttattgttttttagttttgtaagtatagatgataattgatataggtttttttgtttttagtttttttgttgttagtagattgtttggattttgtttgggttgatattgggtattaatgaatgttgtatttattttattggatatttgaagtgattaatgtatggaatatttgggttgtttttagtatatttaatgtttttttatgttatttatttattttttt

SEQ ID NO: 3203 - DNA, 431 bp, Artificial Sequence
  chemically treated genomic DNA (Homo sapiens)
tttaaaatttattatttaggtttttgtaggtaatattttgaatttaaaatgatttttagttaagttgtgtttgtatttgggaattgtgagaagtattgaaagttttataaaggagaggaaatttgattatgataggaagtgatttatagtttttgaggtttagatgtattgatataaggtagtgaagtaggaaagaattatggtttttaaaaagaagtaggattttggttttttttttattttagtgtgatgtgtgtgttttagaataaaattttttaattatagtgtaaaagtgatatttatgtaataggagtggtttaaattttttgtttttgtgggtttgatatagaggaaagttagaattttttttatgatttgtttattgtgtgttagtgttgtggtttttaagtgttgtgtaaatttgatttttt

SEQ ID NO: 3204 - DNA, 431 bp, Artificial Sequence
  chemically treated genomic DNA (Homo sapiens)
ggaaaattaggtttgtatagtatttggaaattataatattgatatatgatgaataagttatagaggaaattttgatttttttttgtattagatttataaaggtaagggatttagattatttttgttgtatgaatgttatttttgtattgtggttagaggattttgttttaggatatatatattatattgggataaaagagaaattaagattttatttttttttgaaaattgtaatttttttttattttattattttatgttaatatatttgagttttaggggttgtaagttattttttgttgtggttaggtttttttttttttatgaagtttttaatattttttatagtttttaggtgtaaatatgatttggttgaaagttattttgaatttagaatattgtttatagaggtttagatggtgggttttgag

SEQ ID NO: 3205 - DNA, 460 bp, Artificial Sequence
  chemically treated genomic DNA (Homo sapiens)
gtttttaggatttttagatatggaattggggttttatttttggttttgggtatttatgttgttttttgttatgttgttagatttatatgtaagttaaggtagttttagaggaatatttttttttttttatttttattttttagtatagttttggatttatagttaattaagtgtattatagaagagttagtaattttgatgtgtaaaatgtttatgttttgttatttttaatatgttggtatttttgatagtttttaattagagtagtatggttaattttagtttgttatttgtgtgggttaagttgtttgaaaaatttttgagggattagttagtggtgggaggatgatttttttataaataaatgatggaattttgatgtttggaagatattagttgtggtttggtttttggggttttttgaggggatagaaatgttagttttttttttttttggttt

SEQ ID NO: 3206 - DNA, 460 bp, Artificial Sequence
  chemically treated genomic DNA (Homo sapiens)
gagttaaggaagaagggagttgatatttttgtttttttaaaaggttttaggaattaaattatagttagtattttttagatattgaggttttattatttgtttataggaaaattatttttttattattggttgattttttaaggattttttaaatagtttaatttatataaatgataggttgaagttaattgtattgttttaattgaggattgttaaaaatattagtatgttgggggtggtaggatatgggtgttttgtatgttagagttgttggtttttttatgatatgtttgattggttgtggatttagaattgtattaaggaataagaataaagggagggaaatatttttttagggttgttttagtttatgtatgaatttggtaatataataggaagtagtatagatgtttagagttaaaaataaagttttagttttatgtttggaagttttgaagat

SEQ ID NO: 3207 - DNA, 489 bp, Artificial Sequence
  chemically treated genomic DNA (Homo sapiens)
gtttggggaagatgatttgaatgttttttaaaatttttgagaagtattaagtttaagtttagttttttatttttgataaatattatattgtgtatttgtttgttattttgtggttttgttgtttttgttagtttgttaaatggaattttggttttagttagatgaaaatgtggtaatttttgtgttttgtttgttttggtgtttgaggagtggttgtgtttgattgtgtgaggttgtttagtgttaagggtaattattggtatttgtattgatagtaagtagtttgtagtaatagattgaaaatgttttttttagatttttagattggaattttagttttatttttaaaagttttatgtttatagtatggttgataaaataaattattaaattaattgttttgggagtttttaagttgtgatattaaggtagttgtgagttattatttttgatgaaggagtagttttagaaattgtgtgtatttgatgg

SEQ ID NO: 3208 - DNA, 489 bp, Artificial Sequence
  chemically treated genomic DNA (Homo sapiens)
ttattagatgtatataatttttgaagttgtttttttattaagaatgatgatttgtagttattttaatgttatagtttggaagtttttaaagtaattggtttagtaatttattttgttaattgtgttgtggatatgaaatttttaaaagtaaagttgaagttttaatttaaagatttgaaaagaatatttttaatttgttgttgtagattgtttgttgttagtgtaggtgttagtagttatttttggtattgggtggttttatatagttgggtatagttgttttttggatgttgaggtaagtaaagtatagagattattatatttttatttgattgaaattagagttttatttaataagttgataggagtaataggattatgaaataataagtagatatatagtgtggtatttgttaaagataaagggttgagtttgagtttaatgttttttgaaggttttggaagatatttaaattattttttttaaat

SEQ ID NO: 3209 - DNA, 500 bp, Artificial Sequence
  chemically treated genomic DNA (Homo sapiens)
agtatggttagaggaattgaagaatgtattatgaaaatatgatattagaatttagagatgtttatttatgagtttggtaaggttttaaaaatttttttatgatgtgtttgagtttttttgtatataaggtaaaattttattaatttggttagtttataaaattttttataaattgttttatgatgtgtttgaaatattttaggttgagttatttgttgataatttgttttttatttttgatattttggttgaggattattttttttaaaatagaattgttaattttttggagatttgtgattattgtgtgttagtaatgttagtttattaggtatataaatatttatttattggtgttaagtaggtagtaatagaattttggattttagttgttggagaagaaataaagatttttagaattagaattataaattgtttattttatggttgaggaaattgaggttgaaggttatttagttaatttgatgtggagttggaat

SEQ ID NO: 3210 - DNA, 500 bp, Artificial Sequence
  chemically treated genomic DNA (Homo sapiens)
attttagttttatattaagttggttgggtgatttttggttttaatttttttaattataaaataaataatttgtgattttagttttaaaagtttttgttttttttttagtaattaaggtttagaattttgttgttatttgtttaatattaataaatgaatatttatgtgtttggtagattgatattgttagtatatagtggttataggtttttaagaagttagtaattttattttggggaagataatttttagttgaggtgttaaaaataaaggataaattgttaataaataatttagtttgaggtattttaaatatattataaaatgatttgtgagggattttataggttggttgggttgatggaattttgttttgtatgtagaagaatttaaatgtattataaaaaaatttttaaaattttgttaaatttataaataaatatttttgagttttgatattatgtttttatggtatattttttaatttttttggttatatt

SEQ ID NO: 3211 - DNA, 460 bp, Artificial Sequence
  chemically treated genomic DNA (Homo sapiens)
tgtggaagggattttaggtttttgtgattattattatgtttttttgagttgtgtttttggaaaaaaatgtgaaggaggtagttttttggaatgaataaattttgttgtttgtttgtaattatttattaaaatagattaaagaaataggttaaaaaggaatttgttatttatgttagagatagtataataagagtatatagaaagggaaaattaatattagggaggaaggaatgttagatatgtgtttttaagaatatggttatgtttgtattgttggtttatatgtagatatatgtttgggttttttatttggtagggtgggttgtgttgatgaaaatgtgggttattaatattgatgtgtatgtttttaattaatattagaattgagtggtaaatataattaggagagtatttaagagagaaatgggttaaaagagaagttaatgtgtagagaggaggg

SEQ ID NO: 3212 - DNA, 460 bp, Artificial Sequence
  chemically treated genomic DNA (Homo sapiens)
tttttttttttatatattggttttttttttagtttattttttttttgaatgtttttttagttatgtttattatttaattttaatgttaattagagatatatatattagtattagtaatttatgtttttattagtatagtttattttgttaaatgaaaaatttgagtgtgtgtttgtgtgtaagttaataatgtagatatggttgtatttttgaaagtatatatttaatatttttttttttttggtgttaattttttttttttatgtatttttattatgttatttttaatatgggtggtgggtttttttttagtttatttttttaatttattttaataaataattataggtaggtggtaggatttatttattttagagggttattttttttatatttttttttagaggtgtagtttaaggagatatggtgataattatagaggtttggaattttttttata

SEQ ID NO: 3213 - DNA, 463 bp, Artificial Sequence
  chemically treated genomic DNA (Homo sapiens)
tgataagggtgtttttgtgtttggttttaatttttattagtgaggattatgaggatgtagttatattggtattttttaagtgttattgtgatagtatttgttgtataaatgtttagttgttattgtgagttttattatttagtttttttttttgaatgtagattaataagtttagaaattataattgtttttttgttgaatttgtgataggtggaaataatgatattagtgttttgttaatttttttgtttttgtgtttggtattgttttattgagttatttgttatattttgttttgatgaggtgaatttaatttttttgttgtaatgataatggggttattttaatgtttggaaatgattatgtggaagttttattgtgttttgttttggtaagtaaattaaggtattgtgtatgttaggagagtgggttttggttgttaggtaggtagtggagatgttga

SEQ ID NO: 3214 - DNA, 463 bp, Artificial Sequence
  chemically treated genomic DNA (Homo sapiens)
ttagtatttttattgtttgtttgatagttagagtttgtttttttggtgtgtatagtgttttggtttgtttgttaagatagagtatggtgaagtttttatataattatttttaaatattaaaatggttttattgttattatagtagggagattgaatttgttttattaaagtggagtgtgataggtgatttaataggatagtgttaagtgtagaggtaagaagattagtagggtattgatattattatttttgtttattatagatttggtagggaggtaattgtaatttttgggtttattagtttatatttggagggaaaaattgagtgataaaatttatggtgatagttaggtatttgtgtagtaagtgttgttatggtgatatttagaaaatgttaatgtggttatgtttttataatttttattaatagaggttaaagttgggtataaaggtatttttatta

SEQ ID NO: 3215 - DNA, 499 bp, Artificial Sequence
  chemically treated genomic DNA (Homo sapiens)
tttggtttaaggaagtaaataaggttttggggtatttttttatggttgttttgggattttttagaagtgataagttgttaatttggaagttgtttgggtgataatgatttttgaatgggtttttatgtggatgagtaatatgatttaaggtattagggatattagaaaggatattttttatgtagtttgaaatgtgagtagagagtaaaatagattttaaaagatgagtattgttgtttttttgatattataaagtgttttttgagtgataatagtgtatttttgtgtatgaattgtatttaagttttgtatttttggaaaataataatttgtgttttttggttattatagatttagtatgggtttagaggttttatgtgtgtaggattttatttgtgtaatttttttagtgattgggagaggtaggagtggtttttgtttttattttataggggaggagatggagatttttaagttagtgaaggatttagttgggatt

SEQ ID NO: 3216 - DNA, 499 bp, Artificial Sequence
  chemically treated genomic DNA (Homo sapiens)
agttttagttggattttttattagtttagggatttttgtttttttttttgtaaaatgggggtaagaattatttttgttttttttaattattgaaagggttatatgaatgaggttttgtatatataaaatttttaggtttatattgggtttatagtaattagaaaatatagattgttattttttaaaaatataaagtttaagtgtaatttatgtataaggatgtattgttgttatttagaagatattttataatgttgagagagtggtggtgtttgttttttgaaatttgttttgttttttatttatattttaagttgtataaaaagtgttttttttggtatttttggtgttttaggttatgttgtttgtttatataaaagtttatttgagaattattattatttaagtagtttttagattggtggtttattatttttgaagggttttaaggtggttatggagaagtgttttaaagttttgtttgtttttttgggttaaa

SEQ ID NO: 3217 - DNA, 323 bp, Artificial Sequence
  chemically treated genomic DNA (Homo sapiens)
ggtattgggaggattagagattttattttagttttgtttattttgggaataattgttggtgtatgaataataatgtttttttttgattatgattaattgaattgtagtttgtgggtagtggggaggggttttgttgggttagtttattatggtgttttttaagtagttattgatagtgatggatgtagtggtgttttttagagtgtatttttgaatatttaagagtaggggtatgaatttgtattttgagtttttattagttggggtttggtagagaggatgggaatggtggtagttaaagatgagttggttgattaaaagga

SEQ ID NO: 3218 - DNA, 323 bp, Artificial Sequence
  chemically treated genomic DNA (Homo sapiens)
tttttttaattaattaatttatttttaattgttgttatttttgttttttttgttaggttttggttaatagaaatttggaatgtaggtttatatttttgtttttaggtgtttgaggatgtattttgggaagtgttgttgtatttattattgttggtggttatttgagaaatgttgtgatggattggtttggtaaagtttttttttattgtttgtaggttgtaatttaattagttatggttagagggaggtattattatttatatattaatgattgtttttaaagtaaatagagttgggatgaggtttttgatttttttagtgtt

SEQ ID NO: 3219 - DNA, 466 bp, Artificial Sequence
  chemically treated genomic DNA (Homo sapiens)
tttttaggttttatggtatagggagttgagttgggtttatgttagtaggtttatgatgttattgttgtagtttgtttatttggttaggattattaaaataattttttttgagaagaataaatttgtttttgtagaaagttaaagatttgagaggttttaattagtttattttgtttttgtttttggttgttaaatgttattgtagagtttaaagaatatgatgttgtgtgttttttttttttatttttgtgtgggggttttttttttttttttagtattttttgtgaatagttgaaaatgagtggtaaaatgatatttgatttagaaagtaagagtattaggaagtaaaattggaggtaaatatagtagttaattttattaggtatagttggtgttgtttgtggttgtttttgatagtgtggttgatatagaattatttgtgtttgtttattagttttttttaatt

SEQ ID NO: 3220 - DNA, 466 bp, Artificial Sequence
  chemically treated genomic DNA (Homo sapiens)
gattggggaaagttagtgagtaaatataggtggttttgtgttggttgtgttgttagggataattgtggatagtattagttatgtttggtgaaattagttgttgtgtttgtttttagttttgttttttggtgtttttattttttaagttgaatgttattttgttatttatttttaattatttataggaggtgttaaaaagggggaaaaggtttttatgtaaaaatgggaaagggagatatataatattatgttttttgaattttgtaataatgtttggtgattaaaggtgagggtagggtaaattaattaaaattttttaggtttttaattttttgtaagagtaaatttattttttttaaagggaattattttagtgattttgattaaataagtaagttataataatgatgttataagtttgttggtatggatttagtttggttttttgtgttatggggtttggaag

SEQ ID NO: 3221 - DNA, 473 bp, Artificial Sequence
  chemically treated genomic DNA (Homo sapiens)
tttttaatttttatagtttaagtgttttatttagtttaaatgttagggatttaaattgttattttagtggaagaggtttgattaaaatttgtgtttttattaaattattggatagtggtttttgggttttgtttatattagtgttaattttaatttaaattttgtataattatatttgttttgttaaatgtatttattaggaatatattataaattattttgtattatgagttgagtttttttgtttattgtaaagtgttttgaaattagtattataagtaattagttgtaagtgttattttatttttttaatgttttattaattaaattttatggtagttgatgtgatgtttaagtttttaatatataagattagtattatttattttttgtatttgattatggtttttaaatttgatttgttatttgtgtatttgtttttgttggagttttgttttttttttagtggtttt

SEQ ID NO: 3222 - DNA, 473 bp, Artificial Sequence
  chemically treated genomic DNA (Homo sapiens)
gaggttattgagggaggagtagagttttagtgagggtaaatgtataaataataaattaagtttaaagattgtggttaaatgtaaggagtaaatgatattgattttatatgttaggggtttggatattatattagttgttatggagtttgattaatgaggtattaaggagatggagtgatatttatagttagttatttatggtgttaattttaaaatattttgtaatagataaagagatttggtttataatgtaaagtaatttgtggtgtgtttttggtgaatgtatttagtgaagtaaatatagttatgtggaatttaaattaaggttgatattaatgtaaatagagtttaagaattattgtttaataatttgatgaggatataggttttaattaagttttttttattaaaatagtaatttaaatttttaatgtttaaattggataaaatgtttaagttgtaaaggttggggg

SEQ ID NO: 3223 - DNA, 437 bp, Artificial Sequence
  chemically treated genomic DNA (Homo sapiens)
tttgtttggttgttttgtgtttatagggttagtatgtgattatttgggatttggtgtgggtttttttttggttgttttattttttatttattagttgtgtgttaatagaaagttttttgattgaaggatttgtttgggatttttgtaataaaaatagaaggatttgttataaatgttggaaggattttttgtaaaagtggtattttttatgtgattatgagttttagaatatattgttattttgggttgtaagtttggtttttttattgagtggtagtgatagatgttttttgttaatgtttagtgattgaatgttattgtagaggtttgtttttatttatataatttgtttttttttttttgtagttattgtgttatgtttgttataaaatttatattttttgtatattgttggttttttttagtagtgagttttt

SEQ ID NO: 3224 - DNA, 437 bp, Artificial Sequence
  chemically treated genomic DNA (Homo sapiens)
aagggtttattgttggagaaggttaataatgtgtagaaaatgtggattttgtgataagtgtgatatagtggttgtagaaagaaaggaataggttgtgtgggtgaggatgggtttttgtagtgatatttaattattggatattaataggggatatttgttattgttatttagtgaggaggttaggtttgtagtttgggatgataatatgttttggggtttatgattatgtgaaaaatattatttttgtagagggtttttttagtgtttgtgataaatttttttatttttattatagaaattttgggtaaattttttagttaggggattttttattaatatgtagttggtaagtgaaaaataaaataattaagagaaaatttatattagattttaaataattatatgttggttttgtgagtatagggtagttaggtaga

SEQ ID NO: 3225 - DNA, 215 bp, Artificial Sequence
  chemically treated genomic DNA (Homo sapiens)
tataagggttgggggtgtggggatagttagagttaaaggttttttttttatagttttggtagttttagtttagaggtgttggtttggtggttggaagattgtattgtgggtatatttggggagtagttgttgagttagggttagagtgggttatgtggtatagggtaggattgttttggagtttataaggttaagatttttaggaggggtagtgg

SEQ ID NO: 3226 - DNA, 215 bp, Artificial Sequence
  chemically treated genomic DNA (Homo sapiens)
ttattgttttttttaggagttttggttttgtaggttttaggatggttttgttttgtgttatgtgatttattttggttttggtttggtagttgttttttagatgtgtttatagtgtaattttttagttgttaggttggtgtttttgggttgggattgttggagttgtgggggagagatttttggttttggttgtttttatatttttaatttttgta

SEQ ID NO: 3227 - DNA, 431 bp, Artificial Sequence
  chemically treated genomic DNA (Homo sapiens)
ggtaggttgggaagttgttttgtgtaagaggatagaatatgtattttttgttttttgagttattttttgggattgggtgatgggagtgatttttagtgtagataaagttgaattatttttattttttaggtttatattttatatttggttttgtttttattgtttggtatgtttgtggtttttttttattgtttttgtttttatgtgatggtgtttttaagtttgtttttgggatgttttttgtttttggaatagttgtattagtttggggtatttttttgttatttgattttatagggaggtgtttagtggttgtgggtaatttttagatgattttgtttgtttgatgttattagattgttatttttggttttgttgtttatgttgtagaagttgggttggaatgggagaggaggaatgaaggaggggtt

SEQ ID NO: 3228 - DNA, 431 bp, Artificial Sequence
  chemically treated genomic DNA (Homo sapiens)
agttttttttttatttttttttttttattttagtttaatttttgtagtataaatagtaaagttaaaaatagtgatttaatgatgttagatgaataaggttatttgaaaattgtttatagttattggatatttttttataggattaagtagtaggagggtattttaggttggtgtagttgttttaagaataggaaatgttttgggagtagatttggaagtattattatataaaggtagaagtagtagggggaaattatagatatattaaatagtagaagtaagattaagtgtggagtatagatttagaagataagagtaatttgattttatttgtattagaagttatttttattatttgattttaggaaatggtttgaggagtagagaatgtatgttttgtttttttatataggatagttttttagtttgtt

SEQ ID NO: 3229 - DNA, 460 bp, Artificial Sequence
  chemically treated genomic DNA (Homo sapiens)
ttttatgtttttagtagggttggagtttgggggtggtgggtagtgtgtttgggttgttgggggggtttaatttttttttgagtagagttatggtggtatgatggatgtgtttgttattgtggggagtttagggtatagtagttgtttggaaataggttgtttttgtggtttatatttagatttttgttattattttaaggatttttttttttttttttttttttttatgatggagttagattttgtatgtaggtgagaaattgtagttaattttattagtagttttttgttattagggattatgggggtttttggggtttggttgtgggtggggaggtaggtgggtgttgggaggatgaggggaatttgtagtgggaagttagtgttttatgggtggtttagttgaggtttggaaaaattttgatgttggaatgttttttttattggttttatttttttt

SEQ ID NO: 3230 - DNA, 460 bp, Artificial Sequence
  chemically treated genomic DNA (Homo sapiens)
ggggaaaataaagttagtgagagaagtattttagtgttgggatttttttaagttttggttgggttgtttgtggagtgttgattttttgttgtaggttttttttatttttttggtatttatttatttttttatttgtaattaggttttaagggtttttatggtttttggtgatagggggttgttggtggggttggttgtggttttttatttgtgtgtagggtttggttttattgtgaaaggaggaagagggaaaaaaaggtttttgagatggtgataaaggtttgagtgtgggttgtgagagtagtttgtttttaggtaattgttatattttgggttttttgtggtggtgggtatatttgttatgttgttgtggttttgtttgggagggagttgggtttttttagtagtttaggtatattgtttattgtttttaagttttggttttgttggggatatgagg

SEQ ID NO: 3231 - DNA, 408 bp, Artificial Sequence
  chemically treated genomic DNA (Homo sapiens)
ttttgggagtggaggttttggtttttttagtagtttttagttgtgtgttttttataggtggtgagtggttgtttgtgtggtatagtgagtgtgtgggaggttgtgatgggtaggaagatgatggagtttgttgtgtttgggggttagtatgtggagatgattgttatggttttggatgagttagagtggtgtttgtttataggtttgtgggatggtataatgaagatgtggaattataatattggtaaatgtttgttgattttttttagtttggaatagttggaggttagttttgtttgttaattatagttagggatggttttttgggaagtaaagtatagtttttttgattttgggatgtattattttttgtatttttttgaaagggtgtttattatagttaggtgg

SEQ ID NO: 3232 - DNA, 408 bp, Artificial Sequence
  chemically treated genomic DNA (Homo sapiens)
ttatttgattatgatgaatatttttttagagaggtataaaaaatagtgtattttagggttaaaggagttgtgttttgttttttaagaggttgtttttggttgtaattgataagtaagattgatttttagttgttttggattgggaaaggttaataggtatttgttaatgttgtagttttatatttttattgtgttattttgtaaatttgtgagtaggtattgttttgatttatttagggttatggtggttatttttatgtgttggtttttagatatagtaaattttattgtttttttgtttgttatgattttttatatatttattgtgttgtgtaggtagttatttattatttgtagggagtatatagttgggggttgttggagaggttggggtttttatttttaagg

SEQ ID NO: 3233 - DNA, 461 bp, Artificial Sequence
  chemically treated genomic DNA (Homo sapiens)
agagggtaggaattgggtatagaaaaagttggaagggtaggttgggttatgagtgggggagttgggtgtgtagtgaggggtgggggtgggaggggattgggggattagttagttattaagtggttttggtgatagggttggagatggtagttggtggtggatgtagttttgggttggaaaattaataggtgattagtggtttaggggtaagttgtttattaggtgtggtagaggggtaggggtaggggtgggggggttgggaggaaatattattgatttttggtaggattgattaaatagttagatatttaaggttaaatttattaataaagtgagatatttagtttagtttggtggttgttgttgaaggttttaaaaaaattgtttattggggagtttttgataaattgtttttgttttttgaggtaagtgggagggaggatagattgtggggaggtttg

SEQ ID NO: 3234 - DNA, 461 bp, Artificial Sequence
  chemically treated genomic DNA (Homo sapiens)
taggtttttttatagtttgtttttttttttatttgttttaagaaataaagatagtttattaagaattttttagtaagtggtttttttaagatttttagtagtagttgttgggttgagttgaatgttttattttattagtgagtttggttttgggtgtttggttgtttgattaattttgttgggggttagtgatatttttttttagtttttttgtttttgtttttgtttttttgttgtatttgatgaatagtttgtttttggattgttgattatttattgattttttagtttgaggttatatttgttgttagttgttatttttagttttgttattaggattatttggtgattaattgattttttggtttttttttatttttattttttattgtatatttagtttttttatttatggtttaatttgtttttttggttttttttgtgtttagtttttatttttt

SEQ ID NO: 3235 - DNA, 417 bp, Artificial Sequence
  chemically treated genomic DNA (Homo sapiens)
tttttttttttgttttgtagggaggtgaggtgtttatatttagattattataaggagttgttgagagaatgtttttaggttatgaatttagttttatatgtaaatttattgtagatttaggagaaggttaggaataaatgggtgggagaaggtttttgattttaaatagaaattgagttgattaaatatagtttgagtatatgtagaggttgtaggagggaaatgagattaattttaaattttgtgtatttagaagttttttttagaatttaggttttattggtaggaaattgttattttgtgtatttgtttattttttttatgttttttgttaggttttgtgttttattgagtttttattttttttgtgtatgtttataggttgttgggttggaaatagtttaaagttatttagat

SEQ ID NO: 3236 - DNA, 417 bp, Artificial Sequence
  chemically treated genomic DNA (Homo sapiens)
gtttgaatggttttgggttatttttaatttagtagtttgtggatatgtatagagaagataaggatttagtgaaatatggagtttggtagaagatatgggaaaaataaataaatgtatgaagtgataattttttgttagtgggatttgggttttggggaaagtttttgagtatatagggtttgagattaattttgttttttttttgtagtttttgtgtgtgtttaggttgtgtttgattagtttagtttttgtttggagttaaggatttttttttatttgtttatttttggtttttttttggatttgtagtgaatttgtgtgtaaggttgaatttatagtttgaggatatttttttagtagttttttgtaatgatttaaatatagatattttatttttttgtagagtagggaggaaga

SEQ ID NO: 3237 - DNA, 486 bp, Artificial Sequence
  chemically treated genomic DNA (Homo sapiens)
gggatagatggtgggagataaggaaatttttatgtttttttttatttgttatatttaattgattttttgtagaaagaaaaaaaaataaattagttgtaaggatgaaattgttaattaaaaggttttttgattagatagataaatatttattaattatgtttgattttgtttgtttttttttatgtttgtgaatttttttattagtattgtggttatattatatttagttggtggtttttttattaattatttttttggggtttagattggttgtgggtgaaatagggtagaagaaaggtgaatattgtaaatagttgtttaataaatgtgatgtttgttgtatggttaggtttagtgttgggtttttggaagttatagtagaatttttatggatagttttttaagttgtgtgttgtataaaggtgtatttgtaggagagtgggggttttttttgttaatttgggatttttggtattaggtaagggg

SEQ ID NO: 3238 - DNA, 486 bp, Artificial Sequence
  chemically treated genomic DNA (Homo sapiens)
ttttttgtttggtgttaggggttttaggttgatagggggagtttttatttttttgtaggtgtatttttgtgtagtatataatttgaaaggttgtttatggaaattttgttatggtttttaggggtttagtattaagtttgattatgtaataggtattgtgtttgttgaatggttgtttgtagtatttattttttttttattttattttatttgtagttagtttgagttttaagagagtgattggtggaagagttattagttgggtatgatgtggttatagtgttgatgggggagtttgtagatgtaaaaggggataggtagggttaggtataattggtaaatatttgtttatttaattagagggttttttaattagtaattttatttttgtaattggtttatttttttttttttttgtgggaagttaattaaatgtaatagatggaggaaaatatgggggtttttttgttttttattatttgtttt

SEQ ID NO: 3239 - DNA, 463 bp, Artificial Sequence
  chemically treated genomic DNA (Homo sapiens)
ggaatgtaggggagttagagtttagttaggaaggagagaggaaatatgatttttttgttgtatgtgggtattgtaattttagttaggtaaagtgttggtttgttgtagtttatttttatgtttttatttagaagttttaatattagagttgatggtagaaaatgtgtagtaaaatgtggggaggttgttgggtaatggtttttgtaaagtgttaattgtttattgagattgtagattttgtttatgttttaggatttgaattattgataggttttaatttattttgggtttataaagtgggttttttttttaaataggtttttaattagttatgtttttttgggtttgttaagaagttttagttgataagtatgtttgttgttttaattttttgaagttggttgtgtggtttgattttggtttgttttaaggaaatttttatgtataatggttttggatgaaa

SEQ ID NO: 3240 - DNA, 463 bp, Artificial Sequence
  chemically treated genomic DNA (Homo sapiens)
ttttatttaagattattgtgtatggaagtttttttaaggtaagttagaattagattatatgattagttttaaagggttaaggtagtaaatatatttattgattggagttttttggtaggtttagggaagtgtgattgattggaagtttgtttagaggaggagtttgttttgtgggtttgaaataaattagaatttgttaatagtttagattttggagtatggataaagtttgtagttttaataggtaattaatattttataggggttattatttagtggtttttttgtattttattgtatattttttgttattagttttggtattgaagtttttaaataaaaatataaaaatgagttataatagattagtattttgtttggttggagttatggtgtttatatgtaataaagagattatatttttttttttttttttaattggattttaatttttttgtatttt

SEQ ID NO: 3241 - DNA, 461 bp, Artificial Sequence
  chemically treated genomic DNA (Homo sapiens)
gagtgggtgtgagggttttatatttgattatgtgtttaggtttttgtaagtttagaatttgattatgtagagataatgaatttttttgtatttttttgatttttatttgtgtttttatttattttttttagggttttttttgtttggggagttattttttttattagtttgtagttagtttttatttggatttttatttttgtgtgttttttggaggatatagatggtaggagtatggaattggaagtatttggtaatgaagtagtaatttattttgtaatttttttgtatttattgtaataatgtttgttttgatgggttttgtgtgttgaatgtagtttttaatgtgtaatttagtgggaattgtggtgttttgtggtttttattatgtttatttattgttaagtgttgttgagaatttttttatttgggatgagggaattatttgttttagtaattga

SEQ ID NO: 3242 - DNA, 461 bp, Artificial Sequence
  chemically treated genomic DNA (Homo sapiens)
ttagttgttaaaataagtggtttttttattttgagtgggagaatttttagtaatatttgataataagtggatgtgatgaggattataaagtattataatttttgttggattgtatattgaaagttgtatttagtgtgtggagtttattagagtaggtattgttgtgatgaatatgaagggattgtggaatgaattgttgttttattgttaagtgtttttgattttgtgtttttgttatttgtgttttttggaagatatatagaagtaaaggtttaaatgggggttggttataggttggtgaggagggtagttttttaggtaaggggagttttaaggaagatgagtgggagtataggtaggggttagaggagtgtaagaaaatttattgtttttgtatggttaagttttagatttatagaaatttaaatatataattagatgtaggatttttatatttattt

SEQ ID NO: 3243 - DNA, 495 bp, Artificial Sequence
  chemically treated genomic DNA (Homo sapiens)
tttttttataatttttatgttaaggttatggagttttagttattgttaggtagaggtggagttatatatgattgtgtttttatataattatattttttttatttaagaatatttattttatatggagaaatagattatgtttattaattattttagaaagtatgtaattttattagattaagttttgtttttgggtattgattaatagagggaatggttttttagtgatttagaatttttatgatatggtttgtggagattatattttggggttagttgtttaaatgtattgttggaattttaggtagaaatgtgtaatggtatgttaagggttgttgagttgttatagtttaagtagggttatttgtggtttttaaagagaggttgtaattttttatggtatttataaattttagtttttaagagttagggagaaaatgtaattatgttgtttgattgagttaattttttttttattttgttttttttttattt

SEQ ID NO: 3244 - DNA, 495 bp, Artificial Sequence
  chemically treated genomic DNA (Homo sapiens)
gagtgggagaggggtaaggtggggaaagagttagtttggttaaatagtatggttgtattttttttttgatttttgaaggttgagatttgtggatattataaaaggttatagtttttttttggaagttataaataattttgtttggattatgatagtttagtagtttttggtatgttattatatatttttgtttggaattttagtagtgtatttgagtagttggttttaaagtatggtttttatagattgtgttgtaggggttttgggttgttggggagttgttttttttattagttaatgtttagagatagagtttgatttaatgaaattatatattttttggagtgattaataaatatggtttatttttttatatgggatgaatatttttaaatgaaaggaatgtgattatgtgggggtgtagttatgtatagttttatttttgtttagtaatggttaaaattttatgattttggtatagagattgtaaggaaa

SEQ ID NO: 3245 - DNA, 425 bp, Artificial Sequence
  chemically treated genomic DNA (Homo sapiens)
aatttggggatatttgttttttagggtagtattttgttgttttttaatatttagtagttgtgattgttagatgatgatgatgattattaatagagttattgtttttggggtaatattagtagtgtagtagtgagtaggttagtagggtttagggtagtttgtttggttatatttgttttggagttgttgtttgttgtgtattaggaatttgttgaagtttgagagttgttagtatagattttattagggagttagtaatgttttttatttttttaggtttttttgaaatttagttaaggaataggtgttgagtttatagttagatagtttttggagtttttggttttgggtatggtgttttagttggtggagatggaaatagtaaggtttttttgatttaaagattttttattgtttttgatatt

SEQ ID NO: 3246 - DNA, 425 bp, Artificial Sequence
  chemically treated genomic DNA (Homo sapiens)
ggtgttaggggtaatgaggagtttttgagttagaagggttttgttgtttttatttttattagttagggtattgtgtttagggttggaggttttgggagttatttgattgtgagtttagtgtttgttttttggttggattttagagaggtttgaggaagtgaggggtgttgttggttttttggtggaatttgtgttgatagtttttaggttttggtgggtttttggtgtatagtagatagtagttttagggtagatgtggttgagtaagttgttttgggttttgttagtttgtttgttgttgtattgttagtgttgttttaaaagtaataattttattaataattattattattatttaataattatagttattgggtattgggaggtaatggagtgttgttttgaagagtagatgtttttaggtt

SEQ ID NO: 3247 - DNA, 488 bp, Artificial Sequence
  chemically treated genomic DNA (Homo sapiens)
ggggttatggatgtatggttatgtagggtgagtaattgtgatgagagaatagaaaggaaatttaaataagagaatttaaagtagagatgagttaaaaattagtaatatgaattattataagtgggtagttatgtttggtaggagatttaggtaaagtgagggtaaattttttagtttttttttgtggaaaatttataaagtttagattggagaaaatgtattgatagttttgaagttggtattttaagttggaatgtttttttaaagtagtatataatggtataatttaataattttgattattgtggaaaaatgttatgtgttaatagtgattttttataattttgtttagaaaatttgaaagaaatgtaaaaaatggatttgtagttttggtagtaggtagagaaatagtagtagagggttgtaggttagtaattgatgttttaaatattattgagtgttttgtttgtaattttaggggagaatga

SEQ ID NO: 3248 - DNA, 488 bp, Artificial Sequence
  chemically treated genomic DNA (Homo sapiens)
ttatttttttttgaaattataggtaaagtatttagtgatatttgaaatattaattattggtttgtagttttttgttattgtttttttgtttgttgttagggttgtaaatttattttttgtattttttttagattttttgaataaaattatggaaaattgttgttggtatatggtatttttttataatggttagagttattgaattgtgttgttatgtgttattttgagaagatattttaatttaaaatgttagttttaaaattattagtatgttttttttaatttgagttttataaattttttataggaaaaggttaagaagtttgtttttgttttgtttggattttttgttgagtgtaattatttatttgtgatggtttgtgttgttgatttttagtttatttttgttttgagtttttttatttggattttttttttgtttttttattataattgtttattttgtgtggttatgtatttatggtttt

SEQ ID NO: 3249 - DNA, 378 bp, Artificial Sequence
  chemically treated genomic DNA (Homo sapiens)
tagatttttattattttaggtttttaaagatgtttttagttttaaataattaatagagtggttttatttttatttattgtgtattttggttaagtgtatagtaagtggattttttggttgggtattttgttaatgttggagttgttaggaaataagaatgtgtgtatttattgaagaaaataaaaatgtttatgtgatgttgtatagagatgatttatgagattttatgaatgtgttattaaaagatttatttagttattgttaatgttaggtttgtaaatatttgggggtttaggtaataaagttttttgatggagttagtgggtaggatgtgtttgtggaggggagtatgagttttgtgttgtaggtgtttgtatt

SEQ ID NO: 3250 - DNA, 378 bp, Artificial Sequence
  chemically treated genomic DNA (Homo sapiens)
ggtgtaggtatttgtagtatagggtttatatttttttttataagtatgttttgtttattgattttattagggagttttgttgtttgagtttttaggtgtttgtagatttaatattggtagtgattgagtgggttttttggtgatatatttataaaattttataaattgtttttgtgtaatgttgtatgaatatttttattttttttaataaatatatatatttttattttttaatagttttagtattggtagaatgtttggttaagaggtttatttattgtgtatttggttaggatgtatagtggataggaatggggttattttgttggttgtttgagattgaagatatttttggggatttgggataatggaggtttg

SEQ ID NO: 3251 - DNA, 432 bp, Artificial Sequence
  chemically treated genomic DNA (Homo sapiens)
gggttgggttaggatagagaggggagaggtaatttggaagttgtaggttataagtttttttttttgttattttgtgttttttttttagttttgtttttagttaagtataggagtagttgtttaagtttatgatgtgttgtgtgtaggttgtagatttattattatttataataggttgttgtttttattttttatttatagaggtggttgagttattatttatggttattgtagttgttaaattgttttgggggttgagatttatatagtagttatgtgagttgttataaatttggggttgggaggaggatgtttttaattgaattagagttgatgattgatagatagggatagtagagattagttttattaattttaaaaagtttaggaagtttttatttagaatgtattttttggagataatagtggtgg

SEQ ID NO: 3252 - DNA, 432 bp, Artificial Sequence
  chemically treated genomic DNA (Homo sapiens)
ttattattgttatttttagggagtgtattttgggtgagggttttttgggttttttggagttgatgaggttggtttttgttgtttttgtttattaattattagttttaatttgattgaaaatattttttttttaattttaagtttgtggtagtttatatggttgttatgtaaattttagtttttggagtagtttaatggttgtggtgattataggtggtaatttagttatttttataaatggaaagtaaaaataataatttattatggatgatggtaggtttgtaatttgtatgtagtatattgtaaatttgagtgattgtttttgtgtttggttgaggataggattggggagggggtataaagtggtaggagaggagatttgtgatttgtagtttttaggttgttttttttttttttgttttggtttagttt

SEQ ID NO: 3253 - DNA, 475 bp, Artificial Sequence
  chemically treated genomic DNA (Homo sapiens)
agttttttttttgttttatttagttttgaggttagtggtttgttttgttttgtgtttgggaggaatgtttgtggtggttttagtttggatttgagaagaaaggtagttttgtgggtgaaaggtgagtggttgggtgggtgtgggtgtgtttatttagggttggtgtgtggtttggggtggtgttgttgttagttgtgttggttgttttaggtttgtgttggtttttagatgtgagttggttttagttggttgggtttttttattttatgtatagaggggttttattaaaagtggttgtgaggaggtttaggaggttgtttggttttagtttgttggttttgagttttgggtttgtagaagttaggttagttgtatttgtgtttttgtgttttggtttttgtgtgttttatggtttagtttttttgttttttttgagttttttgggggtttaggtgagggatagtttttttgttag

SEQ ID NO: 3254 - DNA, 475 bp, Artificial Sequence
  chemically treated genomic DNA (Homo sapiens)
ttggtaaaggggttgttttttgtttgggtttttaggggatttgaggagaatagaggagttgggttgtggagtatatgaagattagggtataagagtataagtgtgattggtttggtttttgtaggtttggggtttagagttagtaggttggagttaggtggttttttgggtttttttatagttgtttttgataaagtttttttgtgtgtggggtgggggggtttggttggttggagttagtttatatttggaggttagtataggtttggggtagttggtgtggttgatagtggtgttattttgagttatatgttggttttggataaatatgtttgtgtttatttagttgtttattttttgtttataaggttgtttttttttttggatttaggttggggttattatgaatattttttttaggtatagggtagaatgggttgttgattttaaggttgagtgaagtaaaagaagggtt

SEQ ID NO: 3255 - DNA, 456 bp, Artificial Sequence
  chemically treated genomic DNA (Homo sapiens)
ttggtttttattttttagttattggtttttttttttttgtaatttaggtttgtaatataattttttagttttttaaggaaaatagaattaaagatttttaatagaagattttagtttattaatatagttaatagttattaaagttatttaggtattggtttaataaaaaattaaagggttgtagtaagtgattagatttttattatttatttttgtgagatgggttttagagggttttgtttttgttgatattaattatttttattggtagtttgttaatatataagtagtttatagtagaatattgtagattgtagggtatttttaggttatatagttttaagtttttagaataggaattgaggtttggaagaaggttagtgtagtgtatttagtgaatggataaattgaattattattttataaggttgtaagtttatgtattaatggaattaa

SEQ ID NO: 3256 - DNA, 456 bp, Artificial Sequence
  chemically treated genomic DNA (Homo sapiens)
ttgattttattagtatatgggtttgtagttttgtgaaatgatgatttagtttatttatttgttgagtgtgttgtattgatttttttttaagttttagtttttgttttaggaatttgaggttatgtagtttgaaaatgttttgtagtttgtagtgttttattgtgaattgtttgtgtgttggtaggttattggtaagaatggttggtgttagtagggatggggttttttgagatttattttataaagatgagtggtgaaaatttgattatttgttgtagttttttagttttttattaagttgatgtttgagtagttttaatagttattagttatgttagtagattgagattttttgttagaagtttttagttttgttttttttgggggattaagaaattatattgtaggtttgaattataggaaggggagaattaatggttagggaatgagagttaa

SEQ ID NO: 3257 - DNA, 488 bp, Artificial Sequence
  chemically treated genomic DNA (Homo sapiens)
ggtgtttattgagtttggaaattatggaaagttattgttagaagggaggtagttgttttagaggtggagtggaagttaggattggagaaggttgttttattgtgggttttagtgtgttttttgttgttagttggttaagagttttgtagtagttattttatattttattagttttattattgtaattatttttgttaaaatgaaatataaaagaatggtatgtttatgaatattttttatagaaaatatatttgtttgattattttttataaaatgtgaagttaatttttttttttatttttaattatgaaagtgaagtttggaagttttaatttttttgtaatggaaagatttgagtttgtggttttgtttttattttttattttttttttgttaagttaggaatatgatatttatataatattttttgggtagtggttttgtttaggaattgtatggttgtttgattgtagagggagggtaaaggt

SEQ ID NO: 3258 - DNA, 488 bp, Artificial Sequence
  chemically treated genomic DNA (Homo sapiens)
gtttttgttttttttttgtagttaaatagttatgtaatttttgaatagagttattgtttgggggatattatgtgagtattatgtttttgatttagtaaaggagaagtggaaaatggaaataaggttataaatttagatttttttattataaagaaattgaggtttttgggttttatttttatgattaaaaatagaaaaagaaattgattttatattttatggaaaatagttaaatgaatatattttttgtgaagaatatttatagatatgttatttttttgtgttttgttttgatagaaataattgtgatggtggagttagtgaggtataaagtggttgttgtgagatttttgattagttagtagtaagaggtatgttggagtttatagtaggataattttttttagttttgatttttattttgtttttggagtagttgttttttttttgataatgattttttataatttttaagtttaatgaatatt

SEQ ID NO: 3259 - DNA, 471 bp, Artificial Sequence
  chemically treated genomic DNA (Homo sapiens)
taattttgtttttttaatattgttgtgagttgattttatttgtttgagataaaattttttttttgatttagtagtgtttatggttgagttggttatgagatagaggattttgtgtttttaattatttttggatgaaaagttttgtaggtgagtggagatttggggtaaagatggttaggtggagttgttattagtgagtagtggattgtagaaatggagagataattaaattaaaagtgttaggtgtaggtattgaaaaataattttgggtgttaattatgtagtttagtgttagtagaggaaatgttattggtttgtttattatgtggtagttgaaaagtttgggaaagatatatttatggtttttagagaatttgttagggttgtttatttgggattttggtgaagtagagattatttattagttggagtgtgtatattttttttattttttatttagttaagttgggt

SEQ ID NO: 3260 - DNA, 471 bp, Artificial Sequence
  chemically treated genomic DNA (Homo sapiens)
gtttaatttggttgagtggaaaatgggggaaatgtatatattttaattaataaataatttttgttttattagaattttaagtaggtagttttggtaaattttttagaaattatgaatgtgttttttttaagttttttaattgttatgtgatggataggttggtggtattttttttgttaatattgaattgtataattaatatttagggttattttttaatgtttgtatttggtatttttaatttaattatttttttatttttataatttattgtttgttggtgatggttttatttggttgtttttgttttgaatttttatttgtttgtaggattttttatttagaaataattaggaatatagggttttttgttttgtggttaatttagttgtgaatgttattggattaagagggaagttttattttagataaatggagttagtttatagtagtgttaaagggatagggttg

SEQ ID NO: 3261 - DNA, 495 bp, Artificial Sequence
  chemically treated genomic DNA (Homo sapiens)
ttattattttatataagttttttgttataattgtattttggtttattttgatatttggtgtttattttaagttgaggttttagggaagggtagttggaggttagtggtggtttttagtgatagatgggtagagtgtttgttttggtattatttagggtgtgggtagtagtggtttgagtaggtattattgatttgtaggtagggaaagtttgttaggttagttatgtgtttggtattaggaggagaggattagagttagtagtggttataatgagggtaaaatttttatagtggaatattgttatttaaaagggatgggtggttgtagggttttttggatggaagtataaatgagaaaatatatatgtttttgtaaatggatttgtttgggaagataaggttatagtatatatagttttttagtaatttaaattttatgtgttatgatgtagatatttataggataagtaagaataataaaatttttagttttgt

SEQ ID NO: 3262 - DNA, 495 bp, Artificial Sequence
  chemically treated genomic DNA (Homo sapiens)
ataaaattgaaggttttgttgtttttgtttgttttgtaaatatttatattatgatatataaggtttagattgttagaaaattatgtgtattgtggttttgtttttttaaataggtttatttatagaaatgtgtgtatttttttatttatgtttttatttaaaaagttttatagttatttattttttttgggtgataatattttattgtgagggttttgtttttattgtgattattgttggttttgattttttttttttgatgttaagtgtatggttgatttggtaggttttttttgtttgtaggttagtggtgtttatttggattattgttgtttatattttggatgatgttaaagtagatgttttgtttatttgttattaggagttgttgttggtttttaattatttttttttaaaattttagtttggagtaaatattagatgttaaggtaagttagggtatagttatgataaggaatttgtatgaagtgatgg

SEQ ID NO: 3263 - DNA, 364 bp, Artificial Sequence
  chemically treated genomic DNA (Homo sapiens)
tttttttttagagttaaggttagttgtgtttatatggatatggtagtaaagattggaattgaaagtatgttagtttttttaatatttttgttaatagtttttttaatttttttgtggtatgtgttaataatatagtttgtatttgttttagaaataagtgttttataagtatttttgtttgatttgttttggttggtataggatttagatgtttttagaatagtataatagattttttaaattagtttatttttattttgagttatttatagttttgatttgttgttggttggggtttatttttgagttttttttatttattatgtgaattatgtttagatttttgttagtttgtttttttttt

SEQ ID NO: 3264 - DNA, 364 bp, Artificial Sequence
  chemically treated genomic DNA (Homo sapiens)
agggaaaggataaattagtaaaagtttgaatgtgatttatatgataggtagggaagatttggggatgaattttagttagtagtagattagagttgtgagtggtttggaatgggaataggttgatttggagagtttgttgtgttattttaagagtatttggattttgtattagttaaagtaaattaaataggagtgtttatggagtgtttgtttttaaaataagtatgggttgtgttattgatatgtgttataggggaattgagagggttgttggtggagatgttaaaaaagttgatatgtttttagttttaatttttgttattatatttatatgggtataattgattttggttttagaggggaa

SEQ ID NO: 3265 - DNA, 472 bp, Artificial Sequence
  chemically treated genomic DNA (Homo sapiens)
ttaaggaggtatggtggttaatttttttttgaatgggattggtttttatatagttattttttttggtttatgatttttttttttatttgttgtttatggatgttgaaaataatttgttttttggtaagtttgggatgagattttttatgatttaattagatttataatgaagtttttttagtttttaggagaaaatattttgaattgtagggttggttaagggtagggttttggtgaagaggaggagttttttgtttgagtagtatatttggagttaggagagttgtaatagggttatgttatttatttagtggggtgtttttattgtggttgagatttttggtagtgttttaaggtgtgtattatgtaagttgtgtttttttattttttgtagtttagattaaaggttttaaagataataggtaggatattgtatttgtaaatattagttgtttggtttaggaagagatag

SEQ ID NO: 3266 - DNA, 472 bp, Artificial Sequence
  chemically treated genomic DNA (Homo sapiens)
ttgtttttttttggattaagtagttggtatttatagatgtgatgttttgtttattatttttgaggtttttagtttgggttgtagggagtgggaaggtatagtttatatggtatatattttggagtattgttaggagttttagttataatgggggtattttattgggtgggtggtatggttttgttgtagtttttttggttttaaatgtgttgtttaggtagggggttttttttttttattagggttttgtttttaattagttttgtagtttaggatgtttttttttgaaagttgggagagttttattatggatttgattaaattataaggaattttattttaagtttgttagaaaataagttatttttggtgtttgtgggtagtaaatggagaagaaagttatgagttggaaggaatgattatatagaaattaattttatttaggggaaggttggttattatgtttttttga

SEQ ID NO: 3267 - DNA, 397 bp, Artificial Sequence
  chemically treated genomic DNA (Homo sapiens)
tttttttttttttttttgtttttgtgataaatgttttattaggttagtatgtttgataaagttttatttgaaaatatgtttgagatttgtgtttttgttgggttttagggattagttggtaatttattttatggataatattattttttattaggggaaatattaaaaattaatttagaggattttatatttttttgttaggagtaaagttgttatggttattagataatgtattgattgggttggaatatagataaggatgatttttttttgtttttaatattagaaaggtaaaggttttagtgatggtttataggagaaatgttttgtggataaagagaatataattagtattagagtttggtagaaggtatttgattttaggtagtatttaatt

SEQ ID NO: 3268 - DNA, 397 bp, Artificial Sequence
  chemically treated genomic DNA (Homo sapiens)
ggttagatattgtttggagttaaatgttttttgttaagttttgatgttgattgtattttttttgtttatagggtattttttttgtgagttattattggggtttttgtttttttgatattaaaaataaaaaaaagttgtttttatttgtattttagtttagttagtgtattatttggtaattatagtagttttgtttttagtagaaaaatatgaagttttttgggttaatttttaatgttttttttggtaaaggatgatgttatttatgaaatggattgttggttgatttttgaaatttggtaggagtatggattttgaatatatttttagataaggttttgttaggtgtgttggtttaatagagtgtttattatagagatagggaaaaagaaaagaa

SEQ ID NO: 3269 - DNA, 466 bp, Artificial Sequence
  chemically treated genomic DNA (Homo sapiens)
agtagatggtatttgtttgttatagggtattgagtggtgtattgttttatgtattatgtattaagagtggtttagtattttggtttggttgtgtgggataagttttgtaaaagaaatatttgatgaattgattgggatgttaaaatgttattaaggataaattaatggatgtgttattttggttgtaagaggtagtgttagtaagataatagatagttggtgggttgttttttagtttaagatagatggtgtttgtaatggagatttatggtttttatgtaatgtgaggtgttttgtagggagaagaataaatagaaatgttttagtatttaagtgttataaaattataagtatgagattaattaattagtgtatattaggaaggtggttggtttgtttgtgtttttggggaaagttagaatggatggtattgggttagagatgatgggtttttgtattagttttt

SEQ ID NO: 3270 - DNA, 466 bp, Artificial Sequence
  chemically treated genomic DNA (Homo sapiens)
ggaggttggtgtagggatttgttatttttaatttagtgttatttattttagttttttttaggagtgtagatagattagttgtttttttagtgtatattaattaattaattttatgtttgtgattttatggtgtttaagtgttggagtatttttgtttatttttttttttgtaaagtattttatgttgtataaagattatgaatttttattgtaaatgttgtttgttttgggttggagaatagtttattggttgtttgttgttttgttggtattgttttttatagttaaagtaatatatttattaatttatttttaatgatattttgatattttgattagtttattagatgttttttttgtaagatttgttttatatagttgggttagggtgttaggttatttttgatgtataatgtatgagatagtgtattgtttagtattttgtgatagatagatgttatttgtt

SEQ ID NO: 3271 - DNA, 496 bp, Artificial Sequence
  chemically treated genomic DNA (Homo sapiens)
gaggtggtaatttttgttaaaggggattaagaataaggagttttaagaattttttgtagggttgttggttggagatgttgtttttatgtaaattttatttgttgttgttaatttagattttgttttattatgattatttttgagaaatagatttaagatatgaaaaaaaattttttttttgtaaaattggtttgtgaaatagattataggtattaatattttttatgagtgataatttagggttaatatttatattttgtaatgtttgtttttttttttttgggatagaaaagaatgttgttaatattaatgaataaatattaataaaattaaatataattttgttttatttggaattaatttttaaaaaaatttttaatatttgtatataatatatatatatttttatgtataatagggaaattagattttgtttgagagatgtgtatagtatttaatgttaatttatttggttttattttttttttagattgtt

SEQ ID NO: 3272 - DNA, 496 bp, Artificial Sequence
  chemically treated genomic DNA (Homo sapiens)
agtagtttggagaaaaggtggaattaaataaattggtattaaatattgtgtatattttttaggtaaaatttgatttttttattgtatatagaggtgtatgtatattatatatagatgttaagaatttttttaaaggttgattttagatggaataagattatatttgattttattaatgtttatttattgatattggtaatatttttttttgttttgagagaaagagaatgaatattataaagtgtaaatattggttttaaattgttatttataaaggatattaatgtttgtagtttgttttatgaattaattttatagaaagagggtttttttttatgttttgagtttgttttttagaaatggttgtggtgggataggatttggattgatagtggtaaatgagatttgtatggaggtagtgtttttaattaatagttttgtagaaagtttttagaattttttgtttttaattttttttggtaggagttgttatttt

SEQ ID NO: 3273 - DNA, 474 bp, Artificial Sequence
  chemically treated genomic DNA (Homo sapiens)
gttgagaagatgtgattgttatttttttaatttgataagatgattttttttaattataatataagtttagtgagttatataattatggtgaattttttattagtttaatattttatgtaattttttagagaatatgattttatttgaaaatatatgtaatagtttggaatttatttttttttagtgtttaatttttagatttttataaatattagatggttttttaggtagtgatatatgttggaattattgaataagtattgtttatgattttgttttgggtagtgttaaaaggtattgagaatttatttattttattatggtgttgttaatagggttttaggtagtttgttgggtttggaggtgtgttaaattgtagtgttatgaatgttttaaatgagagatagagaaagagaaagagaaggaatatgtgaatgtgtgtttgtagttgagggaaataataagagtaaaggg

SEQ ID NO: 3274 - DNA, 474 bp, Artificial Sequence
  chemically treated genomic DNA (Homo sapiens)
ttttttatttttgttgttttttttagttatagatatatatttatatattttttttttttttttttttttgttttttgtttgaggtatttatggtattgtaatttgatatatttttaggtttagtaaattgtttgagattttgttagtaatgttgtaatgagatgggtaaatttttagtattttttgatattgtttaaggtaaagttataagtgatgtttgtttgataattttaatgtgtgttattgtttggaaggttatttggtatttataggaatttgaaagttaggtattggggaaaaatgagttttagattgttgtatgtatttttagatagaattatattttttgaaaaattgtataggatgttgagttgataggggatttattatgattgtatggtttattgggtttgtattatggttgagaaaaattattttgttgggttgggaggatgatagttatatttttttagt

SEQ ID NO: 3275 - DNA, 460 bp, Artificial Sequence
  chemically treated genomic DNA (Homo sapiens)
tttttataattgttttttttattgaaggatttagatataaattgtattttaaatttaatattagttattaatattttatgattataaaatgttaaagataatgttagtggaaggagtgtttgtatgggtagaatggatgatttagaagtttggggagaggggagttggtatattaagtggtttgggagtttttgaggtaatttagtatgataggtggtggtttttggttgagtgtaatattttttgaggtgtttattaagtgttgttgttgtgtataaatattttttttttgatttttgttattttatgtttattatgattaggagtaggtggggttattatgattttttgagttttttttttgtttttgaggaagttaaatggatgttttggtaggagggtatggggttgggtgggtagatttgatggttatgtatttggggttttggttggtttttgg

SEQ ID NO: 3276 - DNA, 460 bp, Artificial Sequence
  chemically treated genomic DNA (Homo sapiens)
ttaggagttagttagagttttaggtgtatggttattgggtttgtttatttagttttatgtttttttgttaaagtgtttatttggtttttttaaaaatagaagggaaatttagagggttatggtggttttatttgtttttggttataataaatatgaggtgataagaattagaggggaaatatttatatatagtggtggtgtttggtgagtattttggagaatgttgtatttagttaggagttattgtttgttatattggattattttaaagatttttgagttatttagtatgttggtttttttttttttgaatttttgagttatttattttgtttatgtagatgttttttttattgatattatttttaatgttttgtaattatgaaatattaatgattgatattgaatttaaagtataatttgtgtttgaattttttggtggaaagggtagttgtaaagg

SEQ ID NO: 3277 - DNA, 410 bp, Artificial Sequence
  chemically treated genomic DNA (Homo sapiens)
gagatgagtaggggattggagaagagaattgttggaaatgataggagttgaaggttttaaaggtatatagaaggttatgttttttagttttttaaatttatatatttttagatgttgtttgtttttatatttggttgttggggttgagtagttaatttgggatgattgtgatatatttaatggtgagttatgtttttttttagtaattagtagtggtaggtttgggaggatgtagggagtatttttggaaatttgtgtttgagggttgttatgataatgttatttgagttgtttgttagtagttgggatgttagtgtttgaattaaggtataaaatagttttataggttgagtgtggttgaggataggagtaggttttttgtatggtatttttaatgggtttgttaggga

SEQ ID NO: 3278 - DNA, 410 bp, Artificial Sequence
  chemically treated genomic DNA (Homo sapiens)
tttttggtaaatttattggggatgttgtgtagggggtttgtttttgtttttggttgtatttagtttgtgagattattttgtgttttggtttaggtattggtattttagttgttggtaagtgatttagatggtgttgttatggtgatttttaggtatggatttttagagatgttttttgtatttttttgagtttgttattgttgattgttgggggagagtatgatttattgttaaatatattatggttgttttaaattggttgtttagttttagtagttggatgtagggataggtagtatttgggggtgtgtgggtttgggaagttgagaggtatgattttttgtgtatttttggggtttttagtttttgttatttttagtggtttttttttttaattttttatttatttt

SEQ ID NO: 3279 - DNA, 489 bp, Artificial Sequence
  chemically treated genomic DNA (Homo sapiens)
tgagagttggaatagtagtagaaattagaagaaattttattgagaaaagaggtatagagaggagtgttaattagtatttaggtttttttttgggagtgttaatttataaatattaataattgtaattatttagtattagttataatgttttgtaaattaaggttattttttgtggagtaaatagttgtgttaatggtagtaaaaggtaatggtgttgttggttgtatgttagttgatgtttgttaggatgatagtataaattaggaaggatatgtttaatttgtgaagataggtagtggtatgggggtaggtggagtgatggggtagagtgtggttgtagatatatattttatgtaaggtttttgggttgatttgatttaatagggatttgttttagataggtgatgtttggggtagatgaagtttttagggttattaggtgtaggtaggaggggagagaaggggttgggtgggtagggagagggtgtt

SEQ ID NO: 3280 - DNA, 489 bp, Artificial Sequence
  chemically treated genomic DNA (Homo sapiens)
gatattttttttttatttatttggttttttttttttttttttatttatatttagtgattttgggagttttatttgttttagatattatttgtttaaagtaggtttttgttagattagattggtttaagggttttgtgtgggatgtgtgtttgtggttatattttgttttgttattttatttgtttttatgttattgtttgtttttatagattggatgtgttttttttgatttatattgttattttggtaggtattaattggtatgtagttagtaatgttgttattttttgttgttattaatgtagttatttattttatggaaaatgattttaatttataaggtattataattaatattggatgattatggttattaatatttatggattgatatttttaggaggggatttgggtgttaattggtatttttttttgtgtttttttttttaatgagattttttttgatttttgttgttgttttagttttta

SEQ ID NO: 3281 - DNA, 494 bp, Artificial Sequence
  chemically treated genomic DNA (Homo sapiens)
tttattttttatttggatattattttaatgtaaaggtatggttgagatatagaaatttttttgaaatgtattattgtggtttttattgatttttattgtgtgttttaatggtgggtttagtgggtgggggttgggaggggtggagtaggtgtatggggtagtggtgtttagtatttgttttagttatagttgttggtttattgtatggtaggtttttttaatttggggatattgtatgtatagtgttttttttggtgttttttgtttttgttggtttggtgttgattttatatttgttaggagtattatgaaggtgtttggggggtgagggatttaaggagtgggggtttgtgttttttgtgtgtgtatatagtttttgtttttagtttattatgttttagaatgtttttttttttttttgtttgggtttaggttttattatattttgggtatttattgtataggagggtagtgtttaggattttattaatagt

SEQ ID NO: 3282 - DNA, 494 bp, Artificial Sequence
  chemically treated genomic DNA (Homo sapiens)
gttgttggtgaagttttgagtattatttttttgtatagtaagtgtttaaagtgtgatgagatttgaatttaaataaaaggggaaggagatattttaggatatgatgggttgggggtgggggttgtgtgtatatgtaggaggtatagatttttattttttggattttttgttttttagatgtttttatggtatttttggtaagtgtgaaattggtattaggttggtggggataaagggtgttgaggggggtattgtatatgtgatatttttggattaaaggggtttgttatgtagtgggttagtagttgtgattggaataggtgttgggtattgttgttttatgtatttgttttattttttttagtttttatttattgggtttattattaaggtatataatgggagttaatgaggattgtaatgatatattttaaggggatttttgtgttttagttatgtttttatattaaaataatgtttagatgggaggtgag

SEQ ID NO: 3283 - DNA, 472 bp, Artificial Sequence
  chemically treated genomic DNA (Homo sapiens)
ttggttatttttattttggagtattataggttaaattagttagtaatttgtggaattaatttatgagtggtgtttatttttggataatggtttagtggaggggttggtttgtagtttatatttattatggttttgttgaatggtgtttgttagattttgtataattgaatttagtttagttttatgaaggttttgtataagttagttttttttttttgttatttgatggaataatagatttataggagaatttatttgtaattttaagttttgagttaaagatgttttaagggatgaatgtgggtgatttgtggaatattgtgatgtatttatgagatagattgtatgtttattgtggtgtttaaagaaattagattgggttgtattagaggtggtgttgtaatttggttgttttttgggaaagaatgtaagtttttagtgtgtgaagtatgaggggttgtagaggaaattg

SEQ ID NO: 3284 - DNA, 472 bp, Artificial Sequence
  chemically treated genomic DNA (Homo sapiens)
taattttttttgtagttttttatattttgtatattggaagtttgtatttttttttagaggatagttggattatagtattgtttttaatgtaatttgatttggtttttttgagtgttgtggtgaatgtgtaatttattttataaatgtattgtagtgttttataaattatttatgtttattttttgagatgtttttaatttggggtttagagttgtaaatgaatttttttatggatttattattttattaaatagtggagagaggggattagtttgtgtagagtttttatagagttgggttaaatttgattatgtaaagtttaatgagtattatttagtaaaattatggtgggtgtgagttgtaggttagtttttttattgggttattatttaggggtaaatattatttgtgggttagttttatgagttattggttgatttgatttgtgatattttaaggtggaagtaattaa

SEQ ID NO: 3285 - DNA, 474 bp, Artificial Sequence
  chemically treated genomic DNA (Homo sapiens)
tttgttttatttaggtgtgaagtattttgttttatttggaaggttgggtatatttaaatattatttttttgtatgtttatttgttgtagagtggttaatgttttttaattggtgtagtaaatattttagagttttttttgttatgttggagttatttagaaattagttttgaaatgtggttgttattttagggattattatatattatttgttgtttggtgttaaattttgagttgttgttatttaatattgattaataaatggtaggttgttagtattggtagtgaagatattttaaggagttattgtttttttaaattaaaatatttaaatatttaaatttagggttggtttttatggtttgttttaattattttttttgttttggtatatttttttttttttgattatatagttgttatgttagtagtatttggagttggaatatgatagttttttttttattagttgtta

SEQ ID NO: 3286 - DNA, 474 bp, Artificial Sequence
  chemically treated genomic DNA (Homo sapiens)
tggtagttaatagggaaagggttgttgtgttttgattttaggtattgttggtgtgatagttgtgtgattaggagaagaaaggtatgttaagataaaaggaataattaaaatgagttatgagaattagttttggatttaaatgtttaaatgttttaatttaaaagaataatggttttttgaagtgtttttattgttggtattgataatttgttatttattaattagtgttaaataatagtggtttagggtttaatattaaatagtagatgatgtgtgatgatttttaaaatagtagttatattttagggttgatttttaaatgattttggtataataaggaagattttggaatatttattgtattaattaaagagtattaattattttgtgataaataagtgtgtaggggagtggtatttaaatatgtttagttttttaggtaaagtgaggtgttttatatttaggtggggtagg

SEQ ID NO: 3287 - DNA, 481 bp, Artificial Sequence
  chemically treated genomic DNA (Homo sapiens)
gggagtagtttgggtattttttatgtttggtataatttgtttgggttggtagttagagaagttaggtagagaagtgtggttagagaggttgtttaatttaatttttttgggttgggttatttgaaagtttaaaattttttaatattaagagatgggtggtatttaaatttaagtttggtttttaaatgaaatttttttgtttaattgtttaattttatttggaaatatgaaatggtaatttgattatatgttaaggtagttttggttgggggattagagttgaaatttttgtttttttgagtttattttttagtgaatggaatttatttaaattaggaattagttttgttattgtgggtgagttgtaggtttggtggtttggagggtggggtattttgaggttgtgggattttagttattttgtatggttaggataagggggtgtttagagttttgtgttttttaagggaggttggaagga

SEQ ID NO: 3288 - DNA, 481 bp, Artificial Sequence
  chemically treated genomic DNA (Homo sapiens)
tttttttaattttttttggggaatgtagagttttgggtgtttttttattttggttatgtagagtaattggaattttgtagttttaagatgttttattttttaggttattaggtttgtggtttgtttgtggtagtagaattgatttttaatttggatggattttatttgttggaggatgaatttagaggggtagagattttggttttaattttttgattaaagttattttaatatgtaattaagttattattttatatttttaaataaagttgaatagttgaatgaaaagattttatttgggagttagatttaaatttaaatattgtttgttttttggtattagggagttttagatttttaaataatttagtttggggaaattgggttggatagtttttttggttgtatttttttgtttggtttttttaattgttagtttgggtggattgtgttgagtgtggagagtatttaggttgttttt

SEQ ID NO: 3289 - DNA, 425 bp, Artificial Sequence
  chemically treated genomic DNA (Homo sapiens)
gaagttagggtaggggatgttttttgaaggttatattttatggtaggtatatagtagtatgtttaaatatggtttttgttaaggttagagaggtattatttatatagaagaagttattattgtgattttatttattttgtgtttttattgtgtaattgaatgttgagtgtggatggtattttttttagtatttggttgtgttattgtgtttagttggtaagttttgggggagaagagaggtttagaaggaagattatttgagtttattagaataatgtgtgtttttaataaggtaggggtgtttaaatttagtaggtttaatagattaagttatgttatgaaggttttgtggattatttatttttgttaattagttattatttaaaagatgagaaaatgttagtttataggttaaatgggaggta

SEQ ID NO: 3290 - DNA, 425 bp, Artificial Sequence
  chemically treated genomic DNA (Homo sapiens)
tgttttttatttggtttgtgagttggtgtttttttattttttaagtggtgattggttggtgggggtaggtggtttataagatttttatagtataatttggtttgttggatttattgagtttgggtgtttttgttttgttaaaagtatatattgttttgatggatttagatggttttttttttgaatttttttttttttttaaggtttgttaattgagtatggtaatgtagttaagtgttggaagaagtgttgtttatatttagtatttaattatgtggtgggggtgtggggtgggtagagttatgatgatgattttttttatgtgaatggtgtttttttagttttaataggaattatgtttaagtgtgttgttgtatgtttgttatggagtgtggtttttgaagaatattttttattttgatttt

SEQ ID NO: 3291 - DNA, 492 bp, Artificial Sequence
  chemically treated genomic DNA (Homo sapiens)
ttaaatgtttttttttttttaagttgtaagggatggatagtattatttgtggtttttgtggttggtattttttttgtagtgtttttttgttaggagtttttttagataataagttgtagaagagagtaggagatggagtaggtattgtgtgtattggattgaaatttttaagtgttttttgtatttgttttagtgttagttatagtttaggtttttaatgttttttggttttttatgttggaagtttttttagtagatggttttatggttagagttggttttttgtgagttttgttgttgttttaattgtagtgtttattatttgagtttttttttgtgagttatttttatttgttaaagtgaatttaggttgattttgtttttgttgtgtttggtttgttatttattttttgttatgagtgattttaaatatgttttatgattgaagagttttgagtagagagaatttagtagttttttaggagttatatt

SEQ ID NO: 3292 - DNA, 492 bp, Artificial Sequence
  chemically treated genomic DNA (Homo sapiens)
gatgtggtttttgaagggttgttgaattttttttgtttagaattttttgattatagggtatatttgagattatttataataaagaatagatagtaagttagatatagtaaaaataaagttggtttaaatttattttagtgagtgaaggtggtttgtgagagggggtttagatgataggtattgtagttagggtagtaatagagtttataggaggttagttttggttatgaggttatttgttaaggagatttttagtataagaggttggagggtgttgaaggtttgggttgtggttggtattggggtaggtgtaagagatatttaggagttttaatttgatgtatatagtgtttgttttattttttgtttttttttgtagtttattatttgagagaatttttaataggaagatattgtaggggaaatgttaattataaaggttatagatagtgttgtttgttttttgtggtttgagggaaaaggagtatttgg

SEQ ID NO: 3293 - DNA, 489 bp, Artificial Sequence
  chemically treated genomic DNA (Homo sapiens)
gaatagaatttagggttgaggttagttttgagtttgtaggttttgtttttttataaaggtgagtagatgggtttggagagggttgtttatgttatggaagggtttttatgttattgaggttaaaattaaagtaggagtaaattagttttgttagtgtgtatagttggtattaaagaggtaataatggtagagaatattttttgaaagatatatatgaaattagtaatggtgatggtttttggaagaattaggttagaagtagatttaatttgtattgtgtatattttttggtattttttttaattgaatgtatgtgaatgtattatttatttaaaaataaatgtgtaaaaatatgtgttatgataaagtaaaatgaggagatagtataaaaaagataaggataattttaaattttttttaataaaatgttgtttaaaaatttaagaggaaaaaagggtaggttttagttagtggagagaataattgaaa

SEQ ID NO: 3294 - DNA, 489 bp, Artificial Sequence
  chemically treated genomic DNA (Homo sapiens)
ttttagttgttttttttattagttggagtttatttttttttttttttagatttttaaatagtgttttattaggagaaatttaaaattatttttgttttttttatattgtttttttattttgttttgttgtggtatgtgtttttatatatttatttttgaataggtaatgtatttatatgtgtttaattaaaaaggatattaaagaatgtatatagtgtaaattaagtttgtttttgatttaatttttttagagattattgttgttattggttttatgtgtgttttttagaaaatattttttattgttgttgtttttttgatgttgattgtatatattagtagggttgatttgtttttgttttggttttagttttgatggtatagaggtttttttatagtatgaatagttttttttagatttatttatttatttttgtgagagggtagagtttgtagatttagggttgattttagttttggattttgttt

SEQ ID NO: 3295 - DNA, 417 bp, Artificial Sequence
  chemically treated genomic DNA (Homo sapiens)
agtgtagagaggttattgttgtttttaaaatttatgtgtattggagtattttgtttttgtgtgttagtattttatttattttttttttagttatttttatttttattattaattttggtaattttgttttgtaattaaaatagtttttagtatatggtataattggagagtttttgatatttttttttggagatttatgtttgtgttttgggggtatttggtattagtgatgggtagttttgtttgttgattttttggttgtttttaattggatttgagtattttaagagaaattgtaaaatgttttaagatagaaaggttttatgaggttttatttttagagttaaggttgtagtattttttattaagtagatttttaattggtgtataggaaggagttgagaagagtgagtatat

SEQ ID NO: 3296 - DNA, 417 bp, Artificial Sequence
  chemically treated genomic DNA (Homo sapiens)
gtatatttattttttttagtttttttttgtgtgttggttaagggtttgtttgataggaaatgttatagttttggttttaaggataggattttgtggggtttttttgttttggagtattttatagttttttttagaatatttagatttaattagaaatagttggggagttagtaggtagggttgtttattattagtgttgaatgtttttaagatgtagatatgaatttttaaagaggaatgttaaaagttttttggttatgttatgtgttaaaggttattttagttataggataaagttgttagggttgatggtgggggtggaggtggttggaaggaaagtggataaaatgttagtatataggggtaagatgttttagtgtatatgagttttgggggtaatagtggtttttttgtatt

SEQ ID NO: 3297 - DNA, 2844 bp, Artificial Sequence
  chemically treated genomic DNA (Homo sapiens)
ttgtattagagaaaagttagagtagtggagaattgtagaggaatgtggggtatttatataaatgttttgaatgaatgagtgtatagagtgatagataaaaagaattagagggttgggttttgtggtttatgtttgtaattttagtattttgggaggttgagttgggtggattataaggttaagagattgagattattttggataatatggtgaaattttgtttttattaaatatataaaaattagttaggagtggtggtgtttgtttgtagttttagttatttaggaggttgaggtaggagaattgtttgaatttgggagatggaggttgtagtgagttgagattgtgttattgtattttagtttggtgatagagtaagattttgttttaaaaaaaaaaaaaaaaaaaaaaaaaagagagttagggttttttttgaagtgaagagggtaaagggtaaaggggaagtataggggaattttgtggtgttttttgaagtttttttttgaatataattgtaatgaaaaggttaatgattagaggttttgtgaggttgaggttgggttttgggaggggattgttttgagaggtttgggaggatttgttgtggaatttaagtgattgtgggttttgagggaattggggggtaagatatttatttagtatttgtggaatatttttttgaattattttggggaggggtgaggttggggtagggtggggttttttttggagggggtgtggtttttgagtaattaattttgtttttgttgtgttttgttttttttttgtttatttagtagggttagtttagggtgtgttaagagtttagagagtttgtttttatggtgatgggttttgtgaaggtttttttggggtgaagaggtagggtgttgaataattgttatggtgatagtagtagatgatggtgttttttttgagtgtttttatttagagttaagggatatttgagggtaagtaattgagtgatgaaataaagaaggtggggtttgaggatagaatgttaaggttaggggaatggagttaggtaaatgaggggtggggttgtagatgatttggttgggagagggttatggtttgttgggggagtggtttgagattgtgttttagagaggaattagagagagggtttttaatttaaatataaatgaatgattggatttttgaagaatttggaatggtttgttgattggatagatggatggatggatggatggatggatggattgatggatggaaatttggttattattgatgtttgagttttttatttttttgggttttttatttttggagtttttatttgtttgtgatagttgtatgagaaatatatgttttttttaggagtaaatttttaatttaaataggtagtatagagttagtttagtattttatattggaggtatttagggtggagtttaggttgatgagatggtgtaggatgaggttttttggtttagttgggaattatttttttttagattttttgtttagagtttaattttttttttttttagtgttattttttttgttagtttgtttagttttttagggtgtttggatttttaggttttattttgtgtttagtatagtagggtttagtgttttagtaattgggaaggtttgtatttttgttgattattttttggaattgttggaattttgttatatagggtgaggagtggataggggtttgtttttatttttgggtggggattagttttgaaaataaatatagttgttttgaattttattgtatagggagtaatttgaagtaggttgaggtttttggatgggggggtttagaatttatatgttgagtttatttttttttttttatttaattttaggtatttaagggttttttaggttatttattgttgtttataattatatgtagtaagatgggggaaagtggtagtaggggtagtttagtagagtttttaatggttatgtttagggaggggtgttttttgtttttagggtatgggaggtgagattgggtatttttatttgttttttttttttttttttgagatagagttttattttgttatttaagttggagtttggtggtatgattatagtttattgtagttttaatttattgtgatttttagttaagtgatttttttattttagtttttagagtagtttggaatatgggtgtatgttattatgtttgggtaatttttaaattttttgtattgatggagtttttttatgttgttttgtttagttttgaatttttaggtttaagtgatttttttgttttagttttttaaagtgttgggattatagatgtgagttattatgtttagtttttttttgtatttaaggagttttttttagttgaataaaaatttagtttttaggggattaatttttttgttggatttgggaggatgggatttagaattgtgtagttggttttagagttttatgttttatattttttattgtttgtttttttggaatgggatagaggagagggtattagtattagttatttatttgtttgttaatggtggagtattatggagttgtggttatttgttttttttaattttaaattttaggtattatattatttgattaagttttagatttttatttttagtggagatttagtatatttttttttaaggagttgtagtgttaatgggggtatatatagtttttgttttggggttttaagaagagttttatgtattgggtttggagaagatatagaaatttagttagagattttatttaggatattagaatattgttgtttatgttaagtattttgtttaaaagaatggagttggttgggtgtggtgg

SEQ ID NO: 3298 - DNA, 2844 bp, Artificial Sequence
  chemically treated genomic DNA (Homo sapiens)
ttattgtgtttggttaattttatttttttgagtaagatatttaatgtgggtgataatgttttaatgttttagatggagtttttggttaaatttttgtgttttttttaaatttagtgtatgaagttttttttgaaattttagggtagaggttgtgtgtgtttttattagtgttgtaattttttaagggaagatatattgagtttttattggaagtggagatttgagatttaattaggtgatgtgatgtttgaaatttggagttagaagaggtaggtgattatagttttataatgttttattgttagtaaataggtggatagttgatattggtgtttttttttttattttattttaggggggtaaatgatgggaagtgtggaatatgaagttttggagttagttgtatagttttgaattttatttttttagatttaatagaagagttaattttttgaaaattaaatttttgtttagttaagggaagttttttaaatgtaaagaggagttgggtatggtggtttatatttgtaattttagtattttgggaggttggggtaggaggattatttgagtttagaagtttaagattggatagggtaatatagggagattttattagtataaaaaatttaaaaattatttaggtatggtggtatgtatttgtgttttaagttattttggaggttgaggtaagaggattgtttggttgaggattatggtaggttgaggttgtagtgagttgtgattgtgttattggattttagtttgggtgatagagtgagattttgttttaaaaaaaaaaaaaaaaagtaaataggggtgtttagttttattttttatattttggggataaaggatatttttttttggatatggttattagggattttgttgaattgtttttattgttatttttttttattttattgtatgtaattgtagataatagtggatgatttgaggggtttttagatatttgaaattgggtagggaaagaaaggtaggtttaatatgtgaattttgaatttttttatttaggggttttagtttattttagattattttttatgtaataaggtttagagtagttgtgtttgtttttagaattaatttttatttaggggtggaagtaggtttttgtttattttttattttatatagtaaagttttagtagttttaggggatgattagtagagatgtagatttttttagttgttggggtgttggattttgttatattggatataaggtgaggtttgaaagtttaggtattttgaggagttgggtaaattagtagaaaagatggtgttgggagaaaggaaagttagattttggatgggaaatttggaaagaagtggtttttagttgggttaaaaagttttattttatgttgttttattgatttgggttttattttgagtgtttttagtgtgaggtgttggattggttttgtgttgtttgtttgggttgagggtttgtttttaggagaggtatgtattttttgtatagttgttataagtgagtgagggttttggaggtggagggtttaagagggtggggagtttaggtgttagtgatagttagatttttatttattggtttgtttgtttgtttatttatttatttatttatttaattaataagttattttggattttttaggaatttagttatttatttatatttaggttaaagattttttttttggtttttttttagaatgtaattttgagttgtttttttaataaattgtggtttttttttgattgggttatttatagttttgttttttgtttgtttggttttatttttttaattttggtgttttgtttttaggttttgttttttttgttttgttatttggttgtttatttttaggtattttttaattttaggtaggagtatttagaagggatattgttatttgttgttgttgttatggtgattatttaatgttttgtttttttattttaggaaaatttttgtggaatttgttattatggaaatgaattttttggatttttagtgtgttttgggttggttttgttgggtggataggagaggagtaaaatgtaataaagatgggattaattatttggaggttgtgttttttttgaagaaggttttattttgttttggttttatttttttttgaaataatttgaggaaatattttgtgaatgttgggtgggtgttttgttttttggtttttttaaggtttatggttgtttgaattttatagtaagtttttttggattttttagggtaatttttttttgaagtttagttttagttttgtaaagtttttagttgttggtttttttgttgtgattatatttgagagggagttttagagggtgttgtgaagtttttttgtgttttttttttgttttttgttttttttgttttaagaggagttttggtttttttttttttttttttttttttttttttgagatggagttttgttttgttgttaagttggagtgtagtggtgtgattttggtttattgtaatttttgttttttgggtttaagtgatttttttgttttagttttttgagtagttgggattataggtaggtgttattatttttggttaatttttgtatgtttagtagagatggggttttattatattgtttaggatggttttgattttttaattttgtgatttgtttagtttggttttttaaagtgttgggattataggtgtgagttatggagtttggttttttgattttttttgtttattattttgtgtatttatttatttaagatatttatgtaggtgttttgtgtttttttgtagttttttattattttggtttttttttaatataa

SEQ ID NO: 3299 - DNA, 2457 bp, Artificial Sequence
  chemically treated genomic DNA (Homo sapiens)
tgttattataattttttataaaataggagtttttgttgttgttgtttttgagatagggtttggttggttttgttgtttaggttggagtgtaatggtttgattatagtttattgtaattttgattttttgagtttaagtgattttttttttttagttttttaagtagttgggattataggtgtatttgaaaagttaagtaggttaaagtatttgtgtaaatggtttgagtatatattttaagtgagaattatttgaagattttgagtttgtttgtgaggatttttaaagggatttgggtagttggtggttttgtttttttttttattggagttttttagtttttttgttttttttatgtttaatttttttttggtttttttttaattggttttatgttgttgatttgtttgtagtttttttttattatattttaattatggttgtgtttttgtagttgttattgttgttgtttttgagggtttaagggaattttgggggtaagtgatttttgggagagttgtgatagatgtagaggggttgaagtaagataagggttgtttagtagggtgggttgtgtgtgggaagatttaggatggttggagtgtagaatagagaagagaaagaggagatgggatggagggttgttttgttttgtggatgtgttttaattatagtttttggttttttttagtttttttggatggttgttttggggattgggtgaattttttttgtggaggagttttttattttatttgttgggtttgggtatttagttttttggtttgtaagggtttgtttaaaggatgttgattgattttgtgggtttttttgagtgggatttttattgtgttttttttttagttttttgttggttgtttatgttttttggattttggtatttggtggttggagttttttttgagtgtgggagatttgggtatttttttttgtaagggttgttatgaggatgagagttgtatagtgttttatgtgttgggggataggatttattgtaaggtttttgggtttatttatggtaggtgtaggtttgtgtgtataagggtatttaattttgatatatatttggaggagggaagagggttttggttgggggtttttgagtgggattgttggttgttttttgttaaatttttgattttagtatttttttttgttatgttttttttttagggtttgtgtatttttagtttttgattttgttgttgggtgttgggttggtgtttggattgggagttttgggtttggtttggtggttgtataggtgagtaggagggatttggttttgttaaatggggagtgattagaggtggaaggggtaggattagaatttttgtaaaagaaagagttagatttagagttttggttttggtttggtgaagaatgggagaggttaaaggtgggagtgaggttgttggttggtgagtagagttttattagagtagatgagttggaagtgtagtagagttagagtttgggttggattgttggtggggtagagtttaagttgtttttggtttgagtttttaagttgttgggttgtttttggtgtggtgagttttaggagaattagtgagataagattggtggtttttaaagatttatatgttttttataggtgtttgtttttgtaattgatttgattattttttagatttggtgagattaattttattttatttttttttttttatatgtttattttttattttttaatttttgagtttgagtttttgttgggagtagatatgttggttattttttttttattttttagttttgttttttttatatagttttatttgtgaaaattgagttttagaggttagtaaaggaggaagagtttaagattttaggggatttggattaggaattggtaagggtatggggatgggaaggggatagttagaatttttgaggaaaatggattaaaaaaaaaaaggtttgaattttaaggaagattgtggagattattttgtttttttttttttttttttttagagtttgttttatgtggatttggattatttagtttttagtaggttttgttggttgtttatagtggattttgttgatgtttttattatttatgtagttgtagtttgaagggaagtttttattttaaattttttaagttaggggattttagttttttataattttttttttttttttggttttttatttggaagaggaaggtattatggtatagaaataagtgttagattgggagttgggagatttgggttttaggttgtttttgttattggttttatttttaaatttatttttattttttttataatttttatgttttttttattattagtgttttttttatatttaattaagttttagttttttttttttttttttttgagatggagttttgttttgttgtttaggttggagtgtagtgatattattttttttatt

SEQ ID NO: 3300 - DNA, 2457 bp, Artificial Sequence
  chemically treated genomic DNA (Homo sapiens)
agtgagggagatggtgttattgtattttagtttgggtaatagagtgagattttgttttaaaaaaaaaaaaaaaaggagttagggtttgattgggtatagagaggatattggtggtgagggagatatggaggttataggagagatgggagtaagtttagaagtaagattagtggtagagatagtttggaatttaggttttttaatttttagtttagtatttatttttatattatggtgttttttttttttaggtgaggaattaaggaggggagagggattatggggagttgggattttttagtttgggaggtttggagtaagggtttttttttaaattataattgtatagatggtggaggtattagtagggtttgttgtggatagttggtggggtttgttgagggttagatggtttagatttgtatagagtaggttttggaggaggaaggggaggaagataagatggtttttatagttttttttggggtttaggtttttttttttttggtttattttttttagagattttggttattttttttttatttttatgtttttattggtttttggtttaggttttttggaattttgggtttttttttttttattggtttttggggtttggtttttataagtggagttatgtgggggggatagagttgaaggatggagagaaggtgattaatgtgtttgtttttagtaagggtttagatttaggaattgaggggtggggagtgggtatgtaggagaaagaaaatggggtggaattagttttattaaatttagggagtggttgaattggttgtgggggtaggtgtttgtaagggatatatgagtttttgagaattattagttttgttttattggtttttttgggatttgttatgttaaggatagtttagtaatttgaaggtttagattggaaataatttagattttattttattgatagtttagtttaggttttaattttgttgtatttttagtttatttgttttggtggggttttatttattagttagtggttttgtttttatttttgattttttttattttttgttaagttaggattagagttttaggtttagtttttttttttgtgaaggttttggttttgttttttttatttttggttattttttatttaatgaggttgggttttttttgtttatttgtgtagttattagattaggtttaaagtttttagtttgagtattaatttagtgtttagtagtgggattaggagttggggatatatggattttgggggaaaggtgtggtggggagggatgttgaggttaggggtttgatgagggatagttagtagttttgtttaagaatttttagttaaggttttttttttttttttgggtatgtgttggagttaagtatttttgtgtgtataggtttgtatttattatgggtaggtttgggggttttgtaataggttttgttttttagtatgtgaagtattgtatggtttttgtttttgtggtggtttttgtagaaaaaagtgtttgagttttttgtgtttaagaggagttttagttgttggatattagagtttagggagtgtaggtggttgatgaaaggttggaggggaggtatggtgggggttttgtttgaagaggtttataggattggttggtgttttttggataggtttttgtaggttgggaagttgggtgtttagatttagtggatgggatgagagatttttttgtaggagagatttatttggtttttagggtggttgtttagagaagttaggagaggttggaggttgtggttagggtatgtttatagggtaagatgattttttattttgtttttttttttttttttttgttttgtattttagttattttggatttttttatatataatttattttattaggtggtttttattttgttttagtttttttgtgtttattataatttttttagggattgtttatttttagggtttttttgggtttttgagagtagtagtggtagtagttgtagaaatatagttatggttaggatgtggtgaggagaagttgtgagtgaattagtggtgtggggttggttggggggggattggagggaagttaggtgtggggagaatggaggggttggggggttttgataagagagggggtggggttattagttgtttagatttttttgggaatttttgtaggtaaatttggagtttttaaatggtttttatttaaaatgtgtgtttgggttatttatataaatgttttggtttgtttaattttttaggtgtgtttgtaattttagttatttaggaggttgaggagggaggattgtttgagtttaggaggttgaggttgtagtgaattgtgattaggttattgtattttagtttgggtgatagagttagttagattttgttttaaaaataataataataaaaatttttgttttgtaggggattgtgataatg

SEQ ID NO: 3301 - DNA, 2898 bp, Artificial Sequence
  chemically treated genomic DNA (Homo sapiens)
tatttagtgtttttatttaagtaggagagtatagttttttaggttggttattttatttgttagatgatgatgatgatattgttttttttttagggtttttgggagaattaagtgagattaattatgtttatttaaggttttttagtttttggtttttatgattggttttttttgtgtttgtgtagtttattttattgtttttttttggtggaatttaggaggtaggggataaataagattggttttttagggttagtttagtaggtttgaaagtaagtggtgggaggtttagggttttttgattatatgtggattttaagtttagttttaggtatgtaggtttttatattttgggtagttgggtggggtatgaagggtttggttgggagataggatgtttggttttaggttagtttttgttttttatttgttgtgtgattttgggttgtgtttagtttttagttgttttttatgtgtaaggggagggttttttatggtttttgtttaaagtgtttgggttttatgttttttagtggattttttagggttgggtatagagtttagtttttagattaggattggtttttgttttgttttgttttttttttagatagggttttttttttgttgtttaggtttaagtgtagtggtatgattttggtttattgtagttttgattttttaggtttaagtaatttgtttattttagttttttgagtagttgggattttaagtgtgtgttattatggttagttaatttttgtatttttgttgtagagatgggattttattatgttggttggttttaaatttttgggtttaagtgatttatttattttggttttttaaatttttgggattataggtgtgagttattgagttaggttgttttgttttttaaggttagtgggagtggagaaggaataaagaaatttgtaattggttatgattaattagttgttaatattattgtatttggattagtttagattagggttttgatggaggaaggggatggtgtgggaaatgtttatttaggttatatattttggttttatttgttttttggattttgagtggtattttgataggatagtttgaggtagtatggtgtttttgtagatgttgggtttgttgttgggttttaatttgtttggtttgtagtttgtttagtttttgtgtagggtttattagtttttgaagttgtaggtggatggagtagtgattagaagttagagttatagtgtaattttggggggtgggagtttttagggttagaatagttattatatttgtgttggttagggtttgtatgtagtttgatattgttgatgttagggtgtttgtggttttatttgttatttttaggaaatttgttagggagggagaaaggtgaggtttagttttatggagataggaaattaagtagttattgttggatattgggttttagagtaggttgaggggatagtgggatggggtggatatgggggtttgaggtttatagttaggttggatttgggtgaggttgtagttggtttgtagggagtgtatggtttgtgtgatgtttagtgttagtttaagggtggtttttgttttggggtttttttaggagtattgtggggtggaggagggggtgagggggtttggagggtaggttagatttttttttttaggttatgttatatttttgagggttttgggtagggggtaatatagaggttagggggagtttgtggtattttttggggtagtttttggaatagtttttttgttatgaagggtatgaagggtgagagtagttgtaggttaatgtttaggtaagtgtatagggtttggtgggtatatttagttgttatttggtttattttatttagtataggttttaggtatttttaggggatgagaggtatagggtttatggttggaggtttagttttgagtttttgttgtgtttgtgaggattgggaaggggatgggttggtttaggttttaaggttaattttggtaaaattgagtttagggttttgttgtttatttgtttttattattttttgttttgttgtgtttttttttattaagtagatattatagagtttatagagttagaagttgtattgggtagtggtgatggttgggaagttgtaggtttggaagttttgattgttgagttttatagtttttgttaggtggttgtggatttagtggtttattaggtttttatggtttttgggtttggggagagagggtgtattagttggtgggttaggggagggtgttagaattttatgggggtaggagttatgggtaaatttttatttagagtttgatgagtttaaagtaattatttatgtgttaggatttgggaagaagtgataggttttagtttttaatgtgttgggttttttttttaattgtttgtttttgtgtttatttgtttttttagttatatggaggttgttttggataggggtatagtttgtgtgagtgttgttagttttgttgtttattaggtttttatttgggaggtgggtgagggtataaaattttttttaaggttatgaagggtaaatttggtggtattttagagtttgttgtagaagtggtggtaatttagtatttggtttatatttaggttgatgttatgatttgggttgggggtgagatgtgagtttttattattttttttttagtttatgtttattagaggtttagggtggagaagagggatgggttttatagaaggaggaaggagtggttgggagggatgttttgggggttatattttgggatatgtaggtatataatttaaattggagagtattggtgttatatttaggaatttttgttgggaagttagttttttatagggaagaggtagggggaggagtgttttta

SEQ ID NO: 3302 - DNA, 2898 bp, Artificial Sequence
  chemically treated genomic DNA (Homo sapiens)
tgaggatgtttttttttttgttttttttttgtagaaagttgattttttagtggggatttttgaatgtggtattgatgttttttggtttggattatgtgtttatatgttttagggtatggtttttaaagtgttttttttagttatttttttttttttttgtgaggtttattttttttttttattttgagtttttggtgggtatgggttgggaagagggtgatgaggatttatattttatttttgatttaggttgtgatattaatttggatgtgaattggatattgggttattgttatttttgtaataagttttggaatgttattaagtttgttttttgtggttttgggaagggttttgtgtttttatttattttttaggtaagggtttggtgggtagtaaagttggtagtatttatataggttgtatttttgtttggagtagtttttatgtagttggggggatagatagatatagagatagatagttaaagggaaagtttagtgtattgggggttggggtttgttatttttttttagattttggtatataggtggttgttttggatttattagattttggatgaagatttgtttatgatttttgtttttatggggttttggtatttttttttggtttgttggttgatatattttttttttttaagtttggaggttatgagagtttggtggattgttggatttgtagttgtttgatagaggttgtgaggtttagtaattaaggtttttaggtttatgattttttggttgttattattgtttagtatagtttttggttttatgagttttgtgatgtttatttggtgagaaggagtatagtggggtaggggatggtgggggtaggtgggtagtagagttttgggtttagttttgttagagttggttttgagatttaagttaatttattttttttttagtttttataggtatagtgagggtttaaggttagatttttagttgtgagttttgtattttttgttttttaggagtgtttgaaatttgtattgaatggggtggattaggtggtagttgagtgtgtttgttagattttgtatatttgtttggatgttggtttgtggttgtttttattttttatgttttttgtgatggaggagttgttttagaggttgttttggaggatgttgtaagttttttttagtttttgtgttattttttatttggagtttttagaggtatggtatggtttggagaggggagtttgatttgttttttaggtttttttatttttttttttattttatagtgtttttggaaggattttgaggtagaagttgtttttgagttggtgttaagtattatgtgagttgtgtgttttttgtgggttgattataattttatttggatttggtttgattgtgagttttaggtttttatgtttgttttattttattgtttttttagtttattttgggatttagtgtttggtagtgattgtttggttttttgtttttatggagttaggttttatttttttttttttttggtaggttttttggaagtggtggatgaggttatgggtgttttggtattggtggtgttgggttatgtgtaggttttggttagtgtaggtgtggtggttgttttggttttgggggtttttgttttttagggttgtgttgtggttttggtttttgattgttgttttatttatttgtagttttaggggttggtggattttgtatgggagttgggtaagttgtaagttaagtgagttgaggtttagtggtaggtttagtgtttgtgggaatgttgtgttgttttgggttattttgttaaggtgttgtttgaagtttaggaggtagatgaagttaaggtgtgtggtttgggtgggtattttttatattattttttttttttattaaaattttggtttgggttggtttgagtgtagtggtgttgataattaattgattgtaattagttatagatttttttgttttttttttatttttattagttttaaaaaataaaatagtttggtttagtggtttatatttgtaattttagaaatttgggaggttaaggtgggtggattatttgagtttaggggtttgagattagttaatatggtgaaattttatttttataataaaaatataaaaattagttggttatagtggtatatatttggggttttagttatttggggggttgaggtgggtggattgtttgagtttgggaggttaagattgtagtgagttgagattatgttattgtatttgagtttgggtaatagagagaagattttgtttggaaaaaaaataaaataaaataaaaattaattttggtttggaagttggattttgtatttaattttggggaatttattggggagtatggagtttaggtgttttgagtagggattatagaaggttttttttttatatatggggagtagttgggggttgggtataatttagggttatataataggtgggagatggaggttgatttagaattaggtattttattttttagttagattttttgtattttatttagttgtttaaaatgtggaaatttgtatgtttggggttgggtttggggtttatatgtagttggggagttttgggttttttattatttatttttaagtttattgggttgattttggaaggttagttttgtttgttttttgttttttgggttttgttagagagaagtagtggagtaaattgtatagatatagagaaaattagttatggaggttaagagttagagagttttgagtggatgtggttaattttatttggtttttttaagagttttgggaggggggtaatattattattattatttgataaatgaagtgattggtttgggagattgtgtttttttgtttaggtggggatattgaatg

SEQ ID NO: 3303 - DNA, 3108 bp, Artificial Sequence
  chemically treated genomic DNA (Homo sapiens)
tagatatatatttgttagatattgtttatggtattttttaggaagaatagtatgtgggaaaggttgttaaaattgtttatgtaaaaattatattaatgttgttttttttggtgttgtttatgtagttggtagttatttttttttttatattatggttttttttagattttttatgaaggataagatttttaaaaagaggattaataagtttatgaggtattaattagattgaaatgttaaaattaagtataattggtggaaatttagaggttttaatagtagggtttgtagaaggtttaagggttagattttgatgtttaatattgtttatgggagtaataataataataaaaaaaatatgttgtttagtggtttttagaagtttttggtttatagttttaaggagttgaaagtgttgttgatgtgtaataaattttattgtgttgagattgtttataaaattttttttagaattgtaaagttattatggaaagagttatttagttggttattagagttattaattttagtattagggtgtatagttaagaaaatgagtagaaagtttatgtttatgttttgtgtgtaaataaaattataaaaattgttaaaaaaaattatattaatgtttttaaatttaaaggattttatttttataggtttttggttgttgtggtgatttttattgtgtaaaatattttttatattttttgatattaagtttttttgtagttatgtttgaaaattaatttttaggttatagagttttttttatattaaagttgaagaaagttttaagaaatatatttttatattttttatatgtaaaataataggagtaagttgaggaatttttaagaaattggttgagaagagagagtgtttagttatggaaaagagaaagaaggaagggagggttttttggaggaggtggtatttgaattaggattgatattaggatggaaatgttagttagggagttaagtagggggagtagttttgttttttatgtttttagttttttttgtttttgtttttttttttagtgattttatgtgaaatgtttttgttttttttagttattagtagaagggattgttttttttttagtgtttgtttttttttagtgattatttagtgtttttgagtttattttttttagtaaattttttttttgtgtggtgagaaaataggtttggagaggttttgtgatttgtttaggattatagaatttggtattaggaaaatttttattttaaaatttagttttgggtgggaagatttgggaagaattgttaatattgagagagagagggagaaagaggattagatgagagtggtgtttttgtttatgtttgttttttttttgtagagaattattttttttagggatggtaggaatgttatgtgtttaatgggatatagtgttttttggagagatatatttataattgggaggagtttgtgtgttttgatagtgatgtgggggagttttgggtggtgatggagttggggtggtttgttgtggagtattggaatagttagaaggatattttggaggagaagtgggtagtgttggataggatgtgtagatataattatgagttgggtgggtttatgattttgtagtgttgaggtgagtgagggttttgggttggtggttttagggtagttttgtgggtttgtgtttagggtgtaggagtagttgggttggtttaagggattttagtgttgggtggaaaggggattttgggttggggatttatggggggagtttatttggagtttgttaggggagtgagtgtggggatttggattgggttgagtatggagtgaggaggatgagagtagagagatttttgggattttattaggtttggtagttgattgtatgtggggtgaaaaaaggaagttataggatagtgtataagggtatggtgtggagatggaggtggagatggtatagtaggttatatagagaagaaatttatagggaggtagttgggtttgaggtgtttgaggggtagatgggtggtttgatgggtaggtagatagaagggtttgtagttggggaggagattgagatatatgagattatttagggagaggggatttagggggaagagtaaaggattggattttgggaattggatagttgtgatttggttaagatagaaaagtttgtgaaagagattaaaaaaatttaagtgtagtgtgaggagaggtttgtagagaagagttttggaagttgaggggaggtgattttagtagtatagtggatagtggtgttagtgatttgggaaggttagaaaatagaagatggaaagtgggtttggaaattagggagatttggggagagtaggttggttgtagtggtaggagttggaatgggagggggtgtatgaggttgagtgtggtgtattttttttggggttgagatggattttatttgttttgggttttttatggttgttatagggtagtgttttagtttatttgttttttttttttaggaagtttgggtgtaaagggatggagagaggtgaggtgtgtgtagtaagaggattttttaaggatgggataggaaggttttggagttttggtttttttttgtgaatttgtggggtggggagtttggtgtattaatttgagggatttgagggagtagtattaggatgtgggattgagttttggattttttttttagaaagaggaaaaaaatgaagggaggaggaggaggaagttggggagattatatttttgatttttttgtttttggaaagtgaaaggaagtttatttgttatgagtgagaaggtggatatattgggtggggatgaggtgagtgatatgagtttaggaaagttgttgaggtaattggttgagagaggtgtttaaataaaaataatgtaattggtaaaaattgttattaagattttgtagaggtattaattagtgatatggtagtatttttttttatagtaattaattgttagattgtagatagttttgatgttagtttaaggagtgtgggttttttttttaggtttgtaggtttttaattttatttttttgaagatttttttggagattttttgtgatgtatagat

SEQ ID NO: 3304 - DNA, 3108 bp, Artificial Sequence
  chemically treated genomic DNA (Homo sapiens)
atttgtgtattatagaggatttttagaagagtttttagaggagtgaggttggggatttgtgggtttggaggagaaatttatattttttaggttggtattagggttgtttgtaatttggtagttgattattgtgaaagaaaatgttgttatgttattgattggtgtttttataaagttttagtaatagtttttgttaattgtgttatttttatttgaatattttttttaattaattattttagtaatttttttaagtttatgttatttattttatttttatttagtgtgtttatttttttatttatagtaggtgaatttttttttattttttaggaataagaaaattaaaggtgtgatttttttagtttttttttttttttttttttattttttttttttttttagaaaaaaggtttagggtttaattttatattttgatattatttttttaagttttttaggttggtgtattaggttttttattttataagtttataggaggaagttaaagttttaaggtttttttgttttatttttgagaaatttttttattgtatatattttatttttttttatttttttatatttagattttttgaaggaaaaagatgaatgaattgagatattgttttgtgatagttgtggggaatttaagataagtaaaatttattttagttttgaggaggatgtgttatatttagttttatgtatttttttttattttagtttttgttgttgtggttaatttgttttttttaggtttttttggtttttaaatttattttttattttttgttttttgatttttttaagttattggtattgttgtttattgtgttgttgaggttatttttttttagtttttaagatttttttttgtgggtttttttttatattgtatttgggtttttttggttttttttataggtttttttgttttggttaaattataattgtttagtttttaggatttggttttttgtttttttttttgggttttttttttttggatggttttatgtattttagttttttttttggttgtagatttttttgtttatttgtttattagattatttatttgttttttaagtattttaaatttagttatttttttgtaggttttttttttgtgtggtttgttgtgttatttttatttttatttttatattatatttttgtgtgttgttttgtggttttttttttttattttatatgtagttagttgttaggtttgatgaagttttgggggtttttttgtttttgttttttttattttatgtttagtttagtttaggtttttgtgtttgtttttttgataagttttagatgggttttttttatgaatttttaatttaaagttttttttttgtttggtattaaggttttttaggttaatttggttgtttttgtgttttgggtatgggtttgtggggttgttttgggattgttggtttaaagtttttatttattttggtgttgtagggttatgggtttgtttagtttgtagttgtgtttgtatattttgtttggtattgtttgttttttttttaggatgtttttttggttgttttagtattttgtagtaggttgttttagttttgttattgtttggaatttttttatgttgttgttgaagtgtgtgaattttttttggttgtagatgtatttttttaggaagtgttgtgttttattaaatgtgtagtatttttgttgtttttggaaaaggtaattttttgtggggagggggtggatatgagtggaggtgttatttttatttaatttttttttttttttttttttttaatattaatgattttttttaaatttttttatttagggttggattttaaaataggagtttttttagtattgagttttgtggttttaagtgggttgtagagtttttttaggtttgtttttttattatgtagagagagaatttattgaaaagaatgagtttaggggtattgagtgattattagggaggggtgagtattgaggggaaggtagttttttttgttggtggttggaggaggtggagatgttttatgtggggttattgggagaaaaaataggggtgggaggagttggggatgtggagggtggagttgttttttttatttaattttttgattgatatttttattttgatgttagttttggtttaaatgttattttttttaggaagttttttttttttttttttttttttttatagttaagtgttttttttttttgattagttttttgagaattttttaatttgtttttgttgttttgtatgtaggagatgtagaaatatattttttaaaattttttttaattttggtataagaaagattttgtagtttgaaagttaatttttaaatatggttgtagaaagatttggtgttaaaagatgtggaaagtattttatataatgaaaattattataataattagggatttgtgggggtagagttttttgggtttagaggtattgatgtaattttttttggtagtttttatggttttatttatatataaaatgtggatatgaattttttatttatttttttagttgtgtattttggtattggggttggtgattttgatggttggttgggtgattttttttatgatgattttgtagttttggaggaaattttgtgagtgattttagtatagtaagatttgttgtatattagtagtatttttagttttttgaggttgtggattagaaatttttggaagttattgggtagtatgttttttttgttgttgttgttgtttttataagtaatgttgggtattaagatttggtttttggattttttatgaattttattgttaagatttttgggtttttgttagttatgtttaattttgatattttagtttgattggtgttttatgaatttgttggttttttttttgaggattttattttttatgaggagtttgagggaggttatgatgtggaggaagagatggttgttagttgtataggtagtattgaggaagatagtattgatgtaatttttatatgaataattttggtagttttttttatatgttgttttttttagggagtgttatgagtagtgtttggtaggtgtgtgttta

SEQ ID NO: 3305 - DNA, 2897 bp, Artificial Sequence
  chemically treated genomic DNA (Homo sapiens)
gattgtttgagtgtgggaggtagaggttgtagtgagttttgattgtattattgagttatagtttgggtgatagaggtaggttttattttaaagagaaaaatattattttttttagtggattttatagtgttaaggatttgtgtaagttttagagatttttggaaatgatgataatatagttggggaaaaatagagagaaatgggaggaagaggtaagtagatatggttaattaaggaaagttgagggtatgatgggtgaatttatgaaattgaggataagattgtagtaagataatgagtttttaggatttgtttattgatttttagttttatgagatgtgaataatgtttatattgttttggtaattttatatagtatatagtttgaatattattaaatttttgatatttgattatttttgatttataaaaatagaattttatataatttatattatattagttaaattttttttgttatgtttagttagagtatgtaggagatgtaggagaaataagtatagaaaggttaaaaagatttataataaatattaatttgggttagttttttagaggatgttttaagttttttaggtattaaagaatattttataagtgttttgtatttgtaaggtgattttaagtattaatgattttagttttagttttagggatttttttttataagaaagaaagagtattaagtataatttttgttagataatttatatatattatagggatataggttttataaatattggagtttagaaagaaaagaaaggagatattagggaggttattgggtttatttttatatatgaggaagaggggttaatattataggttttgtggaggatataatttaggattgtttaggagagattttttgaatttttttgatttttataaaatttttagtaaaaatttttttttgtttgatataagttaatataataaagggaattgttgtatggggaatttattttagtatttttatttttaaattttttaaagattttgagtatatgtgatgtaaaggttttattggtggagatttgagaagaaatggtttgtataaaggttttttatataagttttatggagagggtaagtagttaagttttttttgtggaggaaataatttgtgattttttgataaagatgagtaatttttgaagaaaattttataattttttaagggatatggtttgggtataatgttaatataattttttatatttttttattttatagtagtttagtatttttaatgtgtttttatgttgggtgtttttagtgaaagttagttgggagtttagtattattagtgttattgttaatgttgttaagttggagtttttagggagttttagatatattatgttggagaagaggataggattaggggttagaggagtaggtaagttttatttagggagaattatgatttttttttatttatattttaaattatagggaggaagttattgatttttttgtttttggattgggtaattttgtgttggagaattaattagtatttgagtttaatagtattattagttgttgtttagagatgttgtatgaaggtttttttttgaaataattttattttttaaaggattgttttaatttagtatttgaaaggtttgaattagttgtatgtaaaatattttaattggggagttattgtgagttagttttgtgttggttagtgatgtgtttataagtttgagttttgtaagagtatttattttttatttgataagataattgtttgtagaagtgagtgtgtgagtgtgtttaagagtaaaggagatggagggaatatggttgtaaatttggagttttttaattttgtttttattgtattatattttaatgttatagatttgggaaaattattttatgttttatagttgaaatgaaggtattgtgattttttaggttttttaatattggaaaattttgtgattttttagatgttttaaggagtggtagttttaggtatttgataatatgatagaatgatagttattgattagagagtgtaatatgtatttatttttaggtagtgatgtttttaataagttaaaggaaattgaaagtttgttaataatttaatttgagtaaaaatattttttttaagtgtgttttttgatgttgtttttaggtttagtggtatttttagaatatatataggaatgggttaataggggttatttatgtgtaatggagggtttgaaggtgtttttgtatggtatttattttaataatgtgataaggttaagtgtgtaatttaggtatttgtgggtttgagagattgattaaagatttttaaagttagttgtttatagaataattttttttttttttttttttttttgagatagagttttgttttgttgttttggttggagtgtagtggtatgattttggtttattgtaatttttgtttttttggtttaaataatttttttgttatagttttttgagtaattttgattataggtatgtgtttttatgtttggttaattttttgtatttttagtggagatggggttttattgtgttagttaggatggttttgattttttgattttgtgttttatattagtagtgtaattttaaattgttggggttattggtgtgagttattatgtttggttataattttgttttaaaataatgaatattttatatgaagagtgtttagttttttatttttggtttttattatgatttttttatttgattgaggttatagtattttattattatgttttttttgttttattataagggaggatataagatgattttgttaattaatatatttttgaatgtttaggaaagagaatattagggaaaattatgaattatattagttgatg

SEQ ID NO: 3306 - DNA, 2897 bp, Artificial Sequence
  chemically treated genomic DNA (Homo sapiens)
tattaattgatgtaatttatagttttttttagtgtttttttttttgaatatttaaaaatgtattagttagtaaagttgttttatatttttttttatgataaaataagagaaatataatagtaaagtgttatagttttaattaaatgaggaaattataatgggaattaggaatgagggattgaatattttttatataaaatatttattattttaaaatagaattgtgattaggtatgatggtttatgttagtaattttagtagtttggggttatattgttggtgtagaatatgaagttaggagattgagattattttggttaatatggtgaaattttatttttattaaaaatataaaaaattagttaagtgtggaggtatgtgtttgtagttagagttatttgggaggttgtggtaggagaattgtttgaattgaggaggtggaggttgtagtgagttaagattatgttattgtattttagttagggtaatagagtaaggttttgttttaaaaaagaagaagaaaaaaaagagttgttttgtgaatggttgattttgagagtttttgattgattttttagatttatgaatatttggattgtatatttgattttattatattgttagggtaagtgttgtataaaggtatttttagattttttattgtatataggtggtttttgttagtttatttttgtgtgtgttttggaggtgttgttaaatttgggggtagtattaggagatatgtttgaaaaagatatttttatttagattaaattattaatagatttttaattttttttaatttattaaagatattattatttggaaataggtatatattatattttttagttaatagttgttattttgttatattattagatatttggggttgttgttttttgaggtatttagagaattatagaattttttagtattgaaagatttgaaagattgtagtgtttttattttaattgtgagatatgaagtaatttttttaaatttgtgatattaagatatggtataataaagataagattaaaggattttggatttataattatgttttttttgttttttttatttttaaatatatttatatatttatttttgtaaatagttgttttgttaagtgggaaatgaatgtttttataaggtttaaatttgtgaatatattattgattagtatagagttggtttataatagttttttaattaaagtgttttatatgtaattggtttaaattttttaagtattaaattaaaataattttttaaagaatgaaattattttagaagaggatttttatatagtatttttgagtagtaattgatgatgttgttgaatttagatgttgattggttttttgatatgagattatttaatttaggagtaaggaaattagtaattttttttttataatttggaatgtgggtggaggggggttatagttttttttgagtgagatttgtttgtttttttggtttttggttttgtttttttttttagtatggtgtgtttgaagttttttggaggttttagtttggtagtgttgatagtgatattgatggtgttgagtttttgattggtttttgttggggatatttgatgtaagagtatattgagggtgttgagttattatggggtgggggaatatagggagttgtgttaatattgtgtttaggttatgttttttaagaaattgtgaggttttttttagagattgtttatttttattaagggattgtaaattattttttttataaaaggaatttggttatttgttttttttatgagatttgtgtaaggggtttttgtataggttatttttttttaaatttttattaataaaatttttgtattatatgtatttagggtttttagaggatttggaaataaggatgttaaaataaattttttatatagtaattttttttattatgttgatttatgttagataaaaggaggtttttattgaaaattttgtgggagttaagggaatttaaagggttttttttagatgattttgggttatgttttttataggatttgtggtgttggttttttttttttatatgtgaggatggatttagtggtttttttagtatttttttttttttttttttgaattttaatgtttataaagtttgtatttttgtagtgtatgtaggttgtttgatagaagttatatttagtgtttttttttttttatggggaaaaatttttggaattgaagttgagattattagtatttggaattattttatagatatagagtatttatgaggtattttttggtgtttaaagaatttaaggtattttttgaaaaattggtttaggttagtgtttattatgaatttttttaatttttttatatttgttttttttatattttttatatgttttaattagatatgatagaagagatttaattaatgtagtataaattatatgaaattttatttttgtaagttaaaaataattaaatattagaaatttaataatgtttaaattatatattgtgtggggttattgagataatgtggatattgtttatattttatagggttgaaagttaatgggtaagttttggaaatttattgttttattgtggttttgtttttagttttataggtttatttattatgtttttagttttttttaattagttatgtttgtttattttttttttttatttttttttatttttttttaattatgttgttattatttttagaaatttttaaagtttgtatagatttttagtattatgagatttattgaaagagataatatttttttttttgagatagggtttgtttttgttatttaggttgtagtttagtggtgtgattgaggtttattgtaatttttgttttttatatttaagtaatt

SEQ ID NO: 3307 - DNA, 2884 bp, Artificial Sequence
  chemically treated genomic DNA (Homo sapiens)
ttatagttttttgttttttagtttggtggttagttattttgattttttgaggttttgggtattttagaggtttttgaggtttagagggattttggaagataaaagagaggtatttataaaggggttttagagtgttattgtgggggtttttaggggtggaagaaatggaagtaataatattgttgtttgggtagggttatggggtataggaattgagaatgtggtagagttatatgaataatgagataagggaattttaaggattttgaggttttagagtttgagtggagatttttttaggggataaagatatggaagattttatttggttttttttggttttagggggattttttttttttgggtgattttgggagtaagggatagaaaatgtgattagtggtttttgttattttttttgtatttttttttatattttttttaatttaaattttttgtgatttagtgaagttaattgtttatggataagtattattagtgattttttagtgtaagggttattaaaggagttttgaggttatgtattggggtggaaggttaaggggaattggatttggaagtggggttttatttattgggggtttgtttgagttaggtatgttggggagttttggttttttttgaggattttgtaggaagataaagaggtttagggttattagaggggttatgtttggatatagataaaattttagtagatatttagggttttttttatatttttattttaaattttttgttttttaaattatttagttatttattttttttttatgagggttgatggtattttggggtttgggaagattttatatatagggaaagagaagttataggggttttttagggttttttttatttagttttttggatttaaagtatgagtaataagggtttgaaatttttaattttttgtatttttttagggttttatttattgtggaagtttaagggaagttatgaaaattggggaatggagtaggggtattgtttatttgggttttaggggtgttttgttgtttaggaggttttggttttttttggggtttttagaaataggtgattaggtataggttagaaggagatggagatagaatatatttagagtatggagttgagttttagtagtgatagttaagaaggtaagagtaggaagtaggtaggggttaaaatggtggttaataggatgttggtagggattttgggggataagaatgggggtgggattttttatttattatttattaagttttttttggggttttggggattatttatgttttggatgttttgaaatataagatgggtgtgagtagtttgaaggtggtttggagggatttgtggtttttagaggtttggttatttttgagggtgtgatggttagatttttaatttattttaaatttaagtaaatatagttggtttaggtttgtagtgtgtgggattgtggatttgtgggtttgtgggttttggttttgttttttttgaagatttattttttatgtttagagtttttagggtattatgttatatggttttttttgtgtatggggagtgaatgttgaggtagggtagtgtggggttagagtagggggagtttatagggaatgggaagtatgttgagagaggagagggagtaggaaggtagttagaaaggtggagagttggagaggttaaggggttattttagggttagaagttagggagttatttatagggggtttaggaatattaggtgggtttttggggttaaggagattttgaggtttttgtatttatggtgaggggaggagatggtatgaatggataaaattgtgtttttttagtgtttatgttttttttttggtttttttagagtttttttttttagtattagtttttggatatttattgattttttaggtagtttttgaggtttaatttttttgttatttttttggaggaggaggatatggtaaagttgttgtgttttttagattttttttgtatttagtttttatatttgttattatatttattttttttttatttttattagggggattaggaaggttttgggtattagtattattttgtaaaatgggggaatttataagaggggttttagagtttttaatataggtagatattgaatttttgtatttagtttatttattatttttattgagtttttgttaagtttttagttttttttttttatttatttttatttttatagaagatttatttttaattataatatatatttattaatgtatttattttatggtttttttttttagggagttttgggagtttattaaaattttggttattttaggaggaggaaggatagttagagtgaggatatgattttgtttaagtttatttttttttattgtattttgagttgggggggtgttgattttggggaagtttggagaattaggttatttttaagaaataattgagtttagtgtgggttgaaggttataggttttagggaggggtttaagtttgttatttttattttaggatttttaggtattttttgggttttattagtatttgtttggttttgggagaataagggaagtgttagaataagtagggttgtagttttttattttgtaggttttgtttttttataatatttatttatttttggggtatttattttttgtttagttttgttaggagggtttgtgaggttttgaggttttttggggttttggtgagaggagagatggggtggggttaggaggtatagggaggggagtgagggagattgagttggtgaatagatatgggggtgtagtggaggaaagtggttatttgaggttttaagtttttagattttttttttaggttagggtttttaggt

SEQ ID NO: 3308 - DNA, 2884 bp, Artificial Sequence
  chemically treated genomic DNA (Homo sapiens)
atttgggagttttggtttgaaaggagagtttggagatttaggattttaggtgattatttttttttattgtatttttatatttgtttattagtttagttttttttatttttttttttatgttttttaattttattttatttttttttttattagggttttagaggattttagggttttataggtttttttggtaaggttgggtgaagggtgagtgttttaggggtggatgggtgttgtggggagatagggtttgtagggtaggggattgtggttttgtttgttttgatattttttttgtttttttagggttgggtaggtgttgatggagtttgagggatgtttggagattttggagtgaaggtaataggtttgggtttttttttgaagtttgtagtttttagtttatgttgggtttagttgttttttggggatgatttagttttttaggtttttttaggattagtatttttttagtttagggtgtagtagggaggggtgggtttggatagggttgtgtttttattttggttattttttttttttttagggtgattgaggttttgatggatttttagggttttttggagagaagggttatagggtgagtatattagtgggtgtgtgttgtaattggggatagattttttatgggagtgaggataggtagggaagggaggttggaggtttggtaggagtttagtgaaagtaatggatgggttaagtgtagaggtttggtgtttgtttgtgttgggggttttgaagttttttttatgagtttttttattttgtagggtgatattggtgtttagggtttttttggtttttttggtgaggatggagagagggtaagtgtagtggtaaatgtaggggttgggtgtaggggaggtttagaaggtatagtagttttattgtgttttttttttttagggagatgatggggagattgggttttgagggttgtttggagagttggtgagtgtttaagggttggtgttgggggagggggttttggggaagttaggagggggatatgagtattaaagggatatagttttatttatttatgttgttttttttttttattgtgaatgtagggattttgaggtttttttggttttaaaggtttatttggtatttttggattttttgtaagtgattttttgatttttgattttgaggtgattttttgatttttttaattttttatttttttagttgtttttttgttttttttttttttttggtatgttttttattttttgtgagttttttttgttttggttttatattgttttgttttagtatttgttttttgtgtatagggagggttatgtggtgtggtgttttgagggttttgggtataggaaataaatttttaagaaaaataaaattaaagtttataagtttatagatttatagttttatatattgtaggtttgggttagttgtgtttgtttgggtttgggatggattggaggtttgattgttatatttttgggaatggttgggtttttgaaaattataggtttttttgggttatttttaggttgtttatatttattttgtgttttagggtgtttgaggtatggatggtttttagggttttaaagggagtttggtgagtgatggataggagattttatttttatttttattttttgaggtttttgttagtattttgttggttgttattttgatttttgtttgttttttgtttttgtttttttggttattgttgttgggatttagttttatgttttaaatgtgttttatttttatttttttttgatttgtgtttggttatttgtttttagggattttagggagagttaggattttttggataatagggtatttttgggatttaggtgagtggtgtttttattttgttttttaatttttatgattttttttgggtttttataatgggtgagattttggaaggatataggaaattaagggttttaggtttttgttgtttatgttttgaatttgggaggttggatagaagagattttgggaggtttttgtgatttttttttttttgtatgtagggtttttttgggttttagggtgttattggtttttatggagagaaggtaagtgattaagtgatttggaggatagggggtttagagtggggatgtagggagaattttaaatgtttgttgggattttgtttgtgtttagatatgatttttttagtgattttgagtttttttgtttttttgtagggtttttaagggaagttagggttttttggtatgtttggtttagatggatttttggtgagtgggattttatttttgaatttagttttttttggttttttattttagtgtatgattttagagtttttttagtgatttttgtattgaaaggttattggtggtgtttgtttatggatagttggttttattaggttataggaaatttgggttggaagaagtgtagggaggggtgtagagagggtgataggggttattggttatattttttattttttatttttagggttatttagggaaggaaggtttttttggaattaaaggaaattaggtgagattttttatgtttttattttttgagggagtttttatttagattttagagttttaaagtttttgggatttttttgttttattatttatatggttttgttatatttttaatttttgtgttttgtaattttatttagatagtaatgttgttatttttattttttttatttttggaggtttttatagtgatattttgaggtttttttataaatgttttttttttattttttagggtttttttggattttagggatttttaggatatttaggattttgaggggttaaggtaattgattattaggttgggagataaagggttgtgg

SEQ ID NO: 3309 - DNA, 2476 bp, Artificial Sequence
  chemically treated genomic DNA (Homo sapiens)
tggagagtagaggaggttgggggtggggagtagatgggggtggggaaggaggggagatgggggtggggaaggggggtgggaggagggttaggaatgggggaaggaagatagggtgggggaggggtgggtatgggggaaggaagatagggtgggggaggggtgggtatggggaaagggagatagggtgggggaggggtgggtatgggggaagggagatagggtgggggaggggtgggtatgtgggaagggagatagggtggggaattgagaagaaagatagtggggggggatggaggaaggaatatagggtggggtggggggttgggatgggggaagggaaataaagagtggtggaggtgtggggattaggaatggagatagagggtgggggaggggtggggtgggggaagggagatagggtgggggaggggtgaggatggtggaaggtagataaggtgggggaggggtggggatgggggaagggagatagaagggggggaggggtggggatgggggaagggagatagaaggtgggttagggtgggaatgggggaagggaaatagggtgggggtggggatgagagaagatagaggttgggggaggggtggggatgtgtaagaaaaataaagggttggggagggggagggaaaagaggtagagagtgggggagggggtggggatgtggaaagaaagttagaaggtggggggtgaggggtggggatgggtgaatatgtgatggttgtggttttttttattagatagtagggtgggggtagggtggaaaaagggggtgtggtgggtgaatggggaggtggggggttgattgggagtgtgggatggggtgttttgggattatggagatgtttaagtttggattttgttttgggtttgtgtttttggtgattttttttttttttagtgggatgtggggtgtaggggttggttttaggttttttgagtttaagttttgttttattttgttttgtaagtttagaaaagatgtttttgtttttggttgggtaatttttggatttatttattgtttgtaattttttgggttgaagagattattttttgggagttaattaatttattttttggagtgtgtgtttttttttgtttttaggagttggttttttaaaattttttgaggtttgtgtatgttttttttgattttttgtgtttttattttttatagaaatttatgtatttatgtttttttttttttttgagtttgtagaggattttgttttgttttttttatatttagggttgttttttttgttgttaatataaatttgttgataggttatgtttgggaagtgggtggggtgttttggagtggtgttgaggtgttgtaggtttggtttttggttgtgggggagttgtattttgaagttttgttggaatttgtgtttggggttagtagggggtattagagttaatagggattgtatgtaaaatttatttttttttaggttttttagggggatggttaggtttttgtagagatggggaggatttttttttggtaaggggagagggatgggttaggagttaagtggaaggattttgtgtttaaggttttttaagggatgggataggtgaggaatttttttgagttttttgaattgttttattagttaggtttgggaagtattttgtttttataaattttgtttttttgaaaggggttgggggggggattttaatattttttgttataggttatgatgggtatggtggttaagagtaataggttgtgtggtgaggttggttttttgtggttttgttttgttattttttgaggtatttttatgttagtgaatagagttgtgggtttttagttgtatagatgaatgtatgaataaaatataggtttatataaaggaagttattgtattgatttagatttgatttgggattgttgtataaaatagggttgataaaaattgttgtgtttttattttggaaatagagatttagtttttttttttttgtttgaggtatttagtaaaggtttgtttttgagtggttgtggatgtttaaggatttatgatttttgattttataaagtttagggtgaaaataaaaaataaaataaggagattattgttttaaagtggttgttgtagttaattattttaagaaagtaaataggttggtattgaaagttatataggtgggtggttttttgggagggttgtttagttttttttttttgagatttgagtagggagtagttagaggagtttgaagggatggtgtttagggtatgggaataggttgtatatatttttatggagtatggtgtttgtttagtttgagaagggaaagaaatgggagtagagggttgatgagaaggtagtagatggatagtgtgggattgaaaaggggatttatttgaagattggttattattatttatttttattatttgattgttgttgttttattgagattgatgtgtggaga

SEQ ID NO: 3310 - DNA, 2476 bp, Artificial Sequence
  chemically treated genomic DNA (Homo sapiens)
tttttatgtattgattttaatggagtaatagtaattagatgatgaaaataaataatggtggttagtttttaaatggattttttttttaattttgtattatttatttgttgtttttttattagttttttgtttttgtttttttttttttttaaattggataagtattgtattttgtgaagatgtgtgtagtttgtttttatgttttgaatattatttttttaagtttttttggttgttttttgtttaggttttagaaaaggagagttgggtaatttttttagggagttgtttgtttgtgtaatttttagtattagtttgtttgtttttttgagataattagttataatggttattttaaaataatggtttttttattttgttttttgtttttattttaaattttataaagttagaaattgtaagtttttgagtatttatagttatttaaggataaatttttgttgaatgttttaagtaaagagggggaggttgagtttttgtttttagggtgaaaatatgatggtttttattagttttgttttatgtgataattttaggttgaatttggattaatgtaatgattttttttgtatggatttatgttttgtttgtgtatttatttgtgtagttgggaatttgtagttttgtttattggtatggggatgttttggggaatggtagggtagagttataaaaagttagttttattatgtggtttgttgtttttagttattatgtttattatagtttgtggtaggagatgttggggttttttttttgattttttttaggaaaatagagtttgtggaggtggagtattttttaggtttgattgataaaataatttaaaagatttaaagagattttttgtttgttttgttttttgaagggttttgaatatggggtttttttgtttggtttttagtttgtttttttttttttattaggaaaggattttttttatttttgtagaagtttgattatttttttagagggtttgggaggaagtgggttttgtatatagtttttgttgattttagtgttttttgttggttttagatgtgagttttggtgaggttttagggtatagtttttttgtagttagaagttgggtttgtagtgttttagtattgttttgggatattttatttgttttttaggtgtgatttgttaataggtttgtattggtgataaaaggagtagttttgaatgtagggaaagtagggtggagttttttgtaggtttgggggaggggaggggtgtgaatgtgtggatttttgtggagagtggaaatatggggagttgaggggagtatgtgtgggttttagaaagttttgggaaattgatttttgggagtagggaggaatgtgtgttttagagagtaagttaattgatttttggggggtggtttttttagtttggggggttatagatagtaggtaaatttagagattatttagttaagggtaggggtattttttttagatttgtggggtggggtggggtgagatttgagtttaggggatttggaattggtttttgtattttgtattttattgaagaaaagggaggttgttagaagtatagatttaggatagagtttagatttggatgtttttgtgattttagaatattttgttttatatttttagttagttttttgtttttttatttgtttattgtattttttttttttattttgtttttattttattgtttggtgggaaaggttgtagttattatgtatttatttatttttattttttattttttattttttgattttttttttatatttttatttttttttttattttttgttttttttttttttttttttttaattttttgttttttttatatatttttattttttttttaatttttgtttttttttatttttatttttattttgtttttttttttttatttttgttttggtttgttttttgtttttttttttttatttttattttttttttttttttgtttttttttttttatttttattttttttttgttttgtttattttttgttatttttattttttttttattttgtttttttttttttattttattttttttttattttttgtttttgtttttaatttttatgtttttattattttttgtttttttttttttattttgattttttattttattttgtgtttttttttttatttttttttattgtttttttttttggttttttattttgtttttttttttgtatgtttattttttttttattttgtttttttttttttatgtttattttttttttattttgtttttttttttttatgtttattttttttttattttgtttttttttttttatgtttattttttttttattttgtttttttttttttatttttaattttttttttgttttttttttttatttttattttttttttttttttatttttatttgttttttatttttagttttttttgtttttta

SEQ ID NO: 3311 - DNA, 2391 bp, Artificial Sequence
  chemically treated genomic DNA (Homo sapiens)
ggatgattttgtttagtgtttttagtttgtttttttaggttatggttttaagtgaaatgatagagtttatagttttggttttggttgaggtttaggttatagtaagggtatgtttttggggtttttgatttgaattttgattttttgggtagggaagaggaggttgttttttttggttgttttggttttggagttttttgtaaaaatattttgggttttttgttattggttgtagaaatggtttgatggggtgtgtggggatagatatttagaaggaatgtatttttgtggttttggtgtttgatggggttgggggagagtgttttttattgatttagtagtatatttatgtgtagtgtgtttgtatttgtgtgggggtagttatattttttggttgttgtttttttgggttgtttttttgggggtatgtgattggatttatgaggtttgtattgagttttatttgaatgatattttttttattttattttttttatggaagtattgttttagggttatttagttttttgttttatggttgaaattgtttattttgtttgtagatgtttattattttgtttatttaatgtattattatgtattgattttttatgagatagagagagagagagattattagatagtttatatttaaagggtaggtttttgtatatttttttagttttttttattaaggggaaggggagagtttaaaaatttaaattgttgtggttttaaggtgttttatttttaaaagggagagagaatttatttaaagttattttagattagggattgttatttttttttgtttaatgtattttttgttttttaaaaaaattttttttagaggaaattaatattagtttttgtgtttattaatttttttggttatttgtatttatttatttatttatttattagatatttgttgttatttgaaagaattggtttagtgggtttgaaagtttgtttgagaataggaaatttgagatttggttttttgtgggtaggagaataaggattatttgggttttttagttttgaatgagaattttatttttattagaatgttttttttaattttagtgtatgatgaggaaatttatttatttttagttaggatttgataaattttaatattaaatgattaaaatatttgttattgaggttttattggtgagatttgttttttgtttttgggtgtagttttttgggggttgttttttggattgtgttttgtatatttgttattgagggtgtgagaagtgtttaagttggtgatatgtgatttgggatgtttttattttttgggttaggagtagtagttgttaaggatagtagtttgtattgtgtggttttagggaagtagggtttggtttttaatatgaattgtaaaaagtagttttttattgatatttttttgttgttgtttttggggggtttttttgttttgtttttaatgtttttgagtgtatatttttttttttgtttgaaattgaatttttaaagtggttttttttagttttggttggaaaattattttttaatagttttaagtaataaatagatgagtagagaatgtggttttaattgggtttattaaagtaagtgtgtttagtttttatttgaataagtgatagttgtagatggtgaaagaaatttatttaatttttgtagtttataggtggtagaaataaaaatgtaattttaaaattttaaatattaaatattaattattgttttttttttttttgagatggaattttgtttttgttatttaggttggagtgtaatggtgtgattttattttattgtaatttttgttttttgggtttaagtgatttttttgttttagttttttaagtagttgggattataggtatgtgttattatatttagttaattttgtatttttggtagagatagggtatttttatgttggttaggttggttttggatttttgattttaggtgatttgtttattttggttttttaaagtgttgggattataggtgtgagttattatgtttgtttagtaatattaattattgttttttaaatttgtgttggttttttagatagggagattattggaataaaataattgatggttttattttgttatatgtaaattaaaagaaatgttttttttgaagttgtaagattttattaatgatagatattttttttggtggattttgagtggtgtgtagtggttttatagttatggaaattaggagtattttattttttattgagaatttttgtttttaatttttttaagttggggtgtggtagttgggtagggttaagtgatttagttttggttgtaggatagttatatatagtgaagagttttagaattagttaaaaatggaagtttgggt

SEQ ID NO: 3312 - DNA, 2391 bp, Artificial Sequence
  chemically treated genomic DNA (Homo sapiens)
atttaaatttttatttttagttggttttagaattttttattgtatatggttgttttatagttagggttgggttatttgattttgtttaattgttatattttaatttagagggattgggggtaggggtttttagtggaaagtgagatatttttagtttttatggttataaaattattatatattatttagagtttattgaaaagggtgtttgttattggtggagttttataattttaaagaggatattttttttgatttatgtgtgataaaataagattattggttattttattttagtgatttttttgtttgagaagttaatatgaatttaaaagataatggttggtattgttgggtaggtatggtggtttatgtttgtaattttagtattttgggaggttgaggtgggtggattatttgaggttgggaatttaagattagtttgattaatatggagatattttgtttttattaaaaatataaaattagttgggtgtggtggtgtatgtttgtaattttagttatttgggaggttgaggtaggagaattatttggatttgggaggtagaggttgtagtgaggtgagattgtgttattgtattttagtttgggtgataagagtaaaattttattttaaaaaaaaaaaaggtaatggttggtatttggtatttaaggttttaaaattgtatttttgtttttattatttgtaagttataaaaattaaatgggttttttttgttatttgtagttattatttgtttaagtgaaaattagatatatttattttaataagtttagttgaagttatattttttatttatttatttattgtttaaggttattgagaggtggttttttagttagggttaaagaaagttattttgggagtttggttttagatgaggaagaaaatatgtatttaaaggtattaaaaataaaataaaaaaattttttagaaataataataaaaaaatattagtgagaagttgttttttgtagtttatattaaaagttagattttgtttttttaaaattatgtaatgtaagttgttgtttttagtagttgttatttttggtttgagaaatgaaggtgttttagattatatgttattagtttaggtgttttttatatttttgataataggtgtgtggggtgtagtttgaggagtagtttttaagggattgtatttgaggatggagaatggattttattagtgaagttttagtggtaaatgttttgattatttgatgttggaatttgttaaattttagttagagataagtaaatttttttattatatgttgaggttaagaaaaatattttgataagagtgagatttttgtttaagattggagaatttaggtggtttttgtttttttatttatagggggttaggttttaagttttttatttttaagtgagtttttagatttattgggttagtttttttagatggtaataaatatttgatgaatgaatgaataaataaatataagtgattagaagagttagtgaatataaagattaatattagttttttttaaaaaaaatttttttaaagaataaggaatatattggataaaaaaggatgataatttttgatttgaaatagttttaaatagatttttttttttttttaaaaatgaaatattttaaaattataatggtttgggtttttaaattttttttttttttttaataaaaaaggttggaaaaatatataaaaatttattttttgggtgtaaattatttgatagtttttttttttttttgttttatggagaattaatatataatagtgtattaggtagataggatagtagatatttgtagatgagatgagtaattttagttatgaggtagaggattgaataattttgaagtggtgtttttgtgggggaaatgggataggaaaggtattatttaaatggagtttagtgtagattttgtaggtttagttatatgtttttagaaaggtagtttaaggaagtagtagttaaggggtgtggttgtttttatatagatgtaggtgtattgtatatgggtgtgttgttgggttagtggagagtatttttttttagttttattggatattaaggttataaaagtatattttttttgggtgtttgtttttatatattttgttgagttatttttgtagttagtggtagggggtttaaaatatttttgtaaaggattttaaagttaggataattaaaggggataatttttttttttttgtttggagggttagagtttaggttgagggttttaagaatatgtttttattatgatttggattttagttaagattagggttgtgaattttgttattttatttgggattatgatttgaggggatagattgaggatattgggtagaattgttt

SEQ ID NO: 3313 - DNA, 2483 bp, Artificial Sequence
  chemically treated genomic DNA (Homo sapiens)
aaaagagaaattttgatagttttttaattatgtgggatatggtattattttattagaaaattgtatgttgaaaatattgtattgttgtgtatagatagagtggtatggatttaattttgtatgtataaattaaatttgtaatgtttaagtagtggattagaattttaatatgtttttattttatttggttttgttaggtaagtaagggattttgtgtgttggaaaaagaattattttggtgtagttgtttaagaggagtttggggaggatgttggtttgtgaggtttgttgtagataaggtggtggtgatgtttgggagttaggttagtgttgtggtggtagtgttggggttttttgtgtggtagggtggtttgggttttggttttttgttggttttttggaagtgggtttgtggttagtgtgggagtagtagtagagatggaggttttagtgttttttttttttttttgtttgtttgagttaggggaggttaggtggtttgggtgtttggagttgggggtttgttgtttgagaatgagaattttttttttttagaatgtggagattgtttgattattaggagtataaagttattattgttgggttggataatgtagggaaaattattattttttattagttttttatgaatgaggttgtatatatattttttataataggaagtaatgtagaagagatagtgattaataatatgtgttttttaatgtgggatattggtggttaagaatttttttgttttttttggaatatttattatattaatatagagttgataatagttgtggatagtatagatatatgatttttgtaattagagaagaattttataaaatgttagtgtatgaggatttaaggaaagttggattgttgagttttgttaataaatgagatgttaaagaatgtttgattgtagtggaaattttttagtttttgaagttattttttattaaagataatagttagtggtatatttaggtatgttgtgttttaattggtaagggattgtgttaaagatttgaatggatgatgttatgattttagattatatgattttttttaattttatagattttgtataaatgaagtgttggattttatttgaaagttgtaaaaattaatggtttagatatatttataataaattgatttaaattttttttataagaagaaaaattaagattatttatttgaaaagaaagatggagagggaggaggaagaagagaaaatggttgggtggtggtggttgtaggttgtgtagtggtagtggtttttttttgtggtggatgatggatagttaggataggaaggtggtggtgtataataatagtattgggtttgtgaagtgtggttatatgtaggttttaattttttagaagatatttttttagttttggttggaagatttattattagattaattattaaagtgggaaatattgaataaggattttatggttggtgatgaggtaggtgaattatgattaatgttggaagttaattattttatggaaaatggtatagtaagaaattaggatgatgtgaaaaatttgtgggattatatgtttggattagagaaatttaatatagatattagaaattgtaaaattttatttatagaattttttatgaatttaattaaaaatatagagaagattgtagaggtaatgtttgaaatttagtagttttttggtgtatatgtagttatttagatggttttgattttgtatgtttaaggtttattgattggtgtagtggtagattttggagatagtgtgagttatatttgtttagtatatgaaggttttttttttttttattttattaggagattggatattgttgagagggatgtaattagatattaggttgtttttattgtgaggatatgtttttaattattttgttgattttgaaatggtttgtatgattaaagaaaaattgttatgtgggatataatattgagtaagagtagaaattggttttagaaattaaagtattagttgaattttatatatttttagatggatatattattaaagttggaggggagagatttgaagtattagaaattttattttagttttatttgattagtgttgaaggagttggtgttgttgaattgtttttgaatataatttaggtagttgatattgatatttgatttgaattttataaatatattgtgttttttggagggtttattatgtattttggtttgttattaaggttggaatgagaatttaaatagttttatttagaatgagttttaaagggtgatgtggaaaaattttttaaatttaagatttgtattgaagatttattttttagaaagtatatgggtggtgtagttttagtagatattatgaaagataaagataatttttggatgatttgataagagtattaagaaaggggtgtttgtgtgttagagaaatttggtgtgattgtttgataaatttta

SEQ ID NO: 3314 - DNA, 2483 bp, Artificial Sequence
  chemically treated genomic DNA (Homo sapiens)
tggagtttattgaatagttatattaagtttttttagtatatggatattttttttttggtatttttgttgggttatttaaaagttgtttttgttttttatggtatttgttagaattgtattatttatgtgttttttgaggggtaggtttttgatgtggattttaaatttaaaaagtttttttatattattttttaaaatttgttttaagtaaagttgtttaagtttttgttttaattttgatgataggttaggatatatagtagattttttagaaagtataatgtgtttgtaggatttagattaggtattaatgttagttgtttgaattgtgtttaaaagtaatttagtaatattaatttttttaatattgattaagtgaggttgaaataaaatttttggtgttttaaattttttttttttaattttgatgatatgtttatttgggaatgtataagatttaattaatattttggtttttaaggttagtttttgtttttgtttaatattatattttatgtaatagtttttttttaattatgtaaattgttttaaaattagtagggtggttgaaggtatatttttgtaatagaagtaatttggtatttagttatattttttttagtaatatttagttttttggtaagatgagggagagaaaagtttttatatattgggtaaatatgatttatattatttttagagtttattgttatattagttaataaattttgagtgtataaagttagaattgtttggatggttatatatatattggaaaattgttaagttttaaatattatttttatagttttttttgtgtttttggttgggtttataggaggttttgtgagtaagattttataatttttggtatttatattaagtttttttggtttaaatgtgtagttttataggttttttatgttattttaattttttattatgttattttttatagggtaattaatttttaatattgattgtaatttatttgttttattattaattataagatttttgtttaatgttttttattttggtggttgatttgataataggttttttaattaaagttgggaagatgttttttggaaagttagagtttgtatataattatattttataagtttggtgttgttgttgtatattattatttttttgttttggttgtttattgtttgttgtgggggagagttgttattgttgtataatttatagttgttgttgtttggttgttttttttttttttttttttttttttatttttttttttaaataagtggttttaatttttttttttatagaaaaagtttaaattagtttattataaatatatttaaattattaatttttgtagtttttaggtaaagtttagtattttatttatataaagtttatgaggttagaagagattatgtaatttaaagttgtgatattgtttatttaagtttttggtataattttttgttagttagagtatagtatgtttggatatgttattaattgttatttttaatagaaggtagttttaaaaattgggagatttttgttatagttaggtattttttaatgttttgtttattaataaaatttagtaatttagttttttttaggtttttatgtgttaatgttttatagagtttttttttagttatagaaattatgtgtttgtattgtttataattattattaattttgtgttagtatagtaagtgttttaggaagaatgaaaagatttttggttattaatattttatattaggaaatgtgtattattaattattattttttttatattattttttattataggagatgtatgtataattttatttatagaaaattggtaaagaatggtagttttttttgtattatttagtttaataatgataattttgtgtttttggtgattgaatagtttttatgttttgggggaagaaaatttttatttttggatagtagatttttggttttagatatttgggttgtttggttttttttggtttaggtggatggggaagagagagaggtgttggagtttttatttttgttgttgtttttgtgttagttgtgggtttgtttttagggaattggtgggaggttgaagtttaggttgttttgttgtgtgaaaggttttgatgttgttgttgtggtattggtttggtttttggatattgttgttattttgtttgtgatgagttttgtgggttagtgttttttttaagttttttttgggtggttgtattaaagtaattttttttttaatatataagattttttgtttatttaataggattaaatgaagtgaaagtatgttaaaattttaatttattgtttaaatattataaatttaatttatgtatataaaattgaatttatgttattttatttatatataataatgtaatatttttaatatatagttttttgataaaataatgttgtgttttatataattaaaaaattattaagatttttttttt

SEQ ID NO: 3315 - DNA, 2431 bp, Artificial Sequence
  chemically treated genomic DNA (Homo sapiens)
tttttatttttttttttgagtttttaaagtttattatattatttttaaatgtatttgtatttttatagtttagtttttatttataagtgagaatatatgatatttggttttttatttttgagttatttagaataatggtttttggttgtttttaggttgttgtaaaggttattattttattttattttatggttgagtagtatattattgtgtatatatattatattttttttatttatttgttggttgatgggtatttagttgatgggtatggttgatgggttttttatttttgtaattgtgaattgtgttattatgaaaatatgtatatgtatttgttttttatgtaatgatttttttttttttgggtagatatttagtagtgtgattgttggattgaatggtagttttattttgagttttttgagaaatttaggagttattttaatatagataattgaattgtagttaattttttatttagttttttatattggttatttattattattgatttgaggttattttttatttatattatttgattattttatttagttatatttttaatagtatatgttgtttttaaagtatattatgtgaatagtttaaaatttttaaagtataattttttgttgaagtatttgtaagttttatataagtttttatatgatttgttttgatttttaaattattattttttttattttatttatatttatttttttttttgtgagatgtaattttatataaattttatagataggaagatgttgggaaattattatatggtttgttatgttgtgttattttaataggttaaattatttgatgaaaagagaaattttgatagttttttaattatgtgggatatggtattattttattagaaaattgtatgttgaaaatattgtattgttgtgtatagatagagtggtatggatttaattttgtatgtataaattaaatttgtaatgtttaagtagtggattagaattttaatatgtttttattttatttggttttgttaggtaagtaagggattttgtgtgttggaaaaagaattattttggtgtagttgtttaagaggagtttggggaggatgttggtttgtgaggtttgttgtagataaggtggtggtgatgtttgggagttaggttagtgttgtggtggtagtgttggggttttttgtgtggtagggtggtttgggttttggttttttgttggttttttggaagtgggtttgtggttagtgtgggagtagtagtagagatggaggttttagtgttttttttttttttttgtttgtttgagttaggggaggttaggtggtttgggtgtttggagttgggggtttgttgtttgagaatgagaattttttttttttagaatgtggagattgtttgattattaggagtataaagttattattgttgggttggataatgtagggaaaattattattttttattagttttttatgaatgaggttgtatatatattttttataataggaagtaatgtagaagagatagtgattaataatatgtgttttttaatgtgggatattggtggttaagaatttttttgttttttttggaatatttattatattaatatagagttgataatagttgtggatagtatagatatatgatttttgtaattagagaagaattttataaaatgttagtgtatgaggatttaaggaaagttggattgttgagttttgttaataaatgagatgttaaagaatgtttgattgtagtggaaattttttagtttttgaagttattttttattaaagataatagttagtggtatatttaggtatgttgtgttttaattggtaagggattgtgttaaagatttgaatggatgatgttatgattttagattatatgattttttttaattttatagattttgtataaatgaagtgttggattttatttgaaagttgtaaaaattaatggtttagatatatttataataaattgatttaaattttttttataagaagaaaaattaagattatttatttgaaaagaaagatggagagggaggaggaagaagagaaaatggttgggtggtggtggttgtaggttgtgtagtggtagtggtttttttttgtggtggatgatggatagttaggataggaaggtggtggtgtataataatagtattgggtttgtgaagtgtggttatatgtaggttttaattttttagaagatatttttttagttttggttggaagatttattattagattaattattaaagtgggaaatattgaataaggattttatggttggtgatgaggtaggtgaattatgattaatgttggaagttaattattttatggaaaatggtatagtaagaaattaggatgatgtgaaaaatttgtgggattatatgtttggattagaga

SEQ ID NO: 3316 - DNA, 2431 bp, Artificial Sequence
  chemically treated genomic DNA (Homo sapiens)
tttttggtttaaatgtgtagttttataggttttttatgttattttaattttttattatgttattttttatagggtaattaatttttaatattgattgtaatttatttgttttattattaattataagatttttgtttaatgttttttattttggtggttgatttgataataggttttttaattaaagttgggaagatgttttttggaaagttagagtttgtatataattatattttataagtttggtgttgttgttgtatattattatttttttgttttggttgtttattgtttgttgtgggggagagttgttattgttgtataatttatagttgttgttgtttggttgttttttttttttttttttttttttttatttttttttttaaataagtggttttaatttttttttttatagaaaaagtttaaattagtttattataaatatatttaaattattaatttttgtagtttttaggtaaagtttagtattttatttatataaagtttatgaggttagaagagattatgtaatttaaagttgtgatattgtttatttaagtttttggtataattttttgttagttagagtatagtatgtttggatatgttattaattgttatttttaatagaaggtagttttaaaaattgggagatttttgttatagttaggtattttttaatgttttgtttattaataaaatttagtaatttagttttttttaggtttttatgtgttaatgttttatagagtttttttttagttatagaaattatgtgtttgtattgtttataattattattaattttgtgttagtatagtaagtgttttaggaagaatgaaaagatttttggttattaatattttatattaggaaatgtgtattattaattattattttttttatattattttttattataggagatgtatgtataattttatttatagaaaattggtaaagaatggtagttttttttgtattatttagtttaataatgataattttgtgtttttggtgattgaatagtttttatgttttgggggaagaaaatttttatttttggatagtagatttttggttttagatatttgggttgtttggttttttttggtttaggtggatggggaagagagagaggtgttggagtttttatttttgttgttgtttttgtgttagttgtgggtttgtttttagggaattggtgggaggttgaagtttaggttgttttgttgtgtgaaaggttttgatgttgttgttgtggtattggtttggtttttggatattgttgttattttgtttgtgatgagttttgtgggttagtgttttttttaagttttttttgggtggttgtattaaagtaattttttttttaatatataagattttttgtttatttaataggattaaatgaagtgaaagtatgttaaaattttaatttattgtttaaatattataaatttaatttatgtatataaaattgaatttatgttattttatttatatataataatgtaatatttttaatatatagttttttgataaaataatgttgtgttttatataattaaaaaattattaagatttttttttttattaaataatttggtttattaaaataatataatataatagattatgtgatagttttttaatatttttttatttataaagtttgtatgagattatattttataagaagaaaagtaaatataagtaaaatagaagagatgatgatttaaaaattaaaatagattatataagggtttgtgtaaaatttataaatgttttaataaagaattatattttgagaattttaaattgtttatatgatatgttttggaaatagtatatattgttagaaatgtgattgaataaaatgattgagtaatataaatgaaaaatggttttaaattggtggtagtaagtaattagtgtggaaaattggatggagaattaattgtaatttaattatttatattaaaatgatttttagattttttaaagaatttaaagtagaattattatttgatttaataattatattattgggtatttatttagaggaaaagaggttattatatggaagatagatgtatatgtatgtttttatagtagtataatttgtaattgtaaaaataggaagtttattaattatatttattaattaaatgtttattagttaatgaatggatgaagaaaatatggtatatatatatagtggtatattatttagttataaaatgggatgaaataatggtttttgtagtaatttggaggtagttagaggttattattttaagtaatttaggagtggaaaattaagtattatatgtttttatttgtaagtggaagttaagttatgaggatgtaaatgtatttaagaatgatataatggattttggggatttggagagaaaggtaggag

SEQ ID NO: 3317 - DNA, 2412 bp, Artificial Sequence
  chemically treated genomic DNA (Homo sapiens)
ggtagaggttaggaggatgatgttagtagttaggaagtttgggtagtggtttaggaggggtatttgttaagaatttatgtgggttttagtgaagttgtggatgttgtggttgaatatagagtttaggtagttattttaggtatgggttatggtggtgttattgatgatgtatttgaggagaatattttagttgatgaggaaggtttatagtttgtttatggatatgtaggtgaataggtaggtagagtttgtgtgtggtatatgtgttttaaattttgtatagtatagggttgttagtagggaggttatagtggttatattgaaggataagagtatagtagggttagttatttttttggttatggtatttgtgagtatgtagagatttgagtttattatgttatttatgtttagaagagttaggtttagtgtggataggtagtgttgtagtgatgtttttatggtggagttttttagtggttttaggtggtttagtttttggtataagtgtgttaggttagtaatggtgggtagtttttgggttatggtaggtggttgagaagagtattgagttagttattggaatttgttagggttagaggggaatgataggatgtgtagttggggtttgattagttttttattttttttggtttgattatttttagttttttttttgtttttgatttggggatttggatatttttattaggggtttgttggagagttggaatggggtaggtgttagaatttgtgggtaggaggttataggaagtttggaggttttgtttgtattttaggtagtaaaggaggtttggtgaggttttatttgtttatttgtttggtggttttgaggggtggggagggagtagttttagggggagtagggtgagaggttgggaatggtttagtggtggggttttagagttaggtgaaattgaggtttttttagagttgagttggatttggaataggagttgtggttttgtgttggggtgggtgtggtttaggtagttatttggttatagatagatagtggtggttatatatatttttgtttttgtatttgtggttaggttggggtatttgtgtgttaggtggaatgtaggggtgttttgggtttgtatatttttttatgtttgatatgttgttgttgttagagtttgttttgttgtgtttttgtttttggatatttgtgtttttgtttgtttttgggtttgagtttgttttagtttttgtttttgtaggatttgttgtaatttatttgttgttgttgtagttgttgtttttgttttgagtattgagtttgtttagtttgttggtgttgagtgtagggtttgtttttattttaggttttttgtgtggttttatttgttgttatatatttagatattttattttgtttattttgtttgattttgtaaggttgttattggagtttattggggtttagggaagttttgtgattgtgatttagttatagatggagaaggttagattgttggttgattgattagtttaggttagtttggggaggttaagggttatgtttgaaagtttgtagtttattttttttttattgtagtggatattttttttgattttttattttagtatatgaattttatttagttgggttttagataggttttatagtattgttatgtgagttttaggtatagtgagttagatgaagatatgggtttggtagagtggtttggggtggtttttgatttttatttttataatggaagagattgtagttttttgagagagttttgtgaattgagggaatgtattttggttgttttgagtttgtagttattatgttttgtaaggaagtaagtagtttttgggattagtttgtagtttttttgtgggggagtagagttttttagattttagtggtagttttttttagtttaggtatttttggtaggttgggagggttttatgggattttaatagtagatttttatttgtgtttattagtgatagttattgtgttttgagtattgtattttagtgttttatgttttaggtaggtagttatgtaataatatatttggttaattttttaattttaatttttttagagattgggttttattatgttgtttgggttggttttgaatttttggttttttaaaaggttgtgattatatttatgaattatggtttttggtttttttagaatgttatattagatatgtgtttaggtttatatgtggtttgtggaatggaattttaggagtatttgtagtttatttagtttattgggttggtgataggatgatggatttttagataagatggtgttaatttggaatattttgttttggttagaatgttaatattttttaatatttggttggtattgttttgaggaattttttagatggtttttatttt

SEQ ID NO: 3318 - DNA, 2412 bp, Artificial Sequence
  chemically treated genomic DNA (Homo sapiens)
gaagtgggagttatttgagaagttttttaagataatattagttaaatattagaaggtattggtattttggttgaggtagaatgttttaaattggtattattttgtttgggagtttattattttgttattagtttaataggttggataggttgtagatgtttttaagattttattttataaattatatgtaagtttgaatatatgtttagtatagtgttttggggaggttaggagttatggtttatgaatgtaattatagttttttgggaggttaagagtttgagattagtttgggtagtatagtgagatttagtttttaaaaaaattaaaattaaaaaattagttaggtgtattgttgtatagttgtttgtttggggtgtggggtattggaatgtagtatttaggatatagtggttgttgttgataaatataagtggggatttgttattggggttttatagggtttttttggtttgttagaggtgtttaggttaggaagggttgttattggggtttgaggagttttatttttttataggagggttgtaggttggttttagaagttgtttgtttttttgtaggatgtggtagttgtaggtttaaaatagttagaatgtatttttttaatttgtagaatttttttaaaaggttgtagttttttttattgtaagagtagaggttagggattgttttaggttattttgttagatttatgtttttatttaatttattgtgtttgaagtttatatgatggtgttgtggggtttgtttggggtttagttgggtggggtttatgtattggggtgagggattaagaagggtgtttgttgtagtagaaagaaggtgggttgtggatttttagatgtggtttttaatttttttgaattgatttaggttagttagttagttggtggtttgattttttttatttgtgattgagttatagttatagggtttttttagattttggtgagttttggtaatgattttgtgaggttgggtagagtgggtagggtgaaatatttgggtgtgtggtagtgggtggggttgtgtggggggtttgggatgggggtgggttttgtgtttggtgttggtgaattgggtgggtttagtgtttagagtggaggtagtggttgtggtagtagtaggtgggttgtagtagattttgtggggatggggattgggatgggtttaggtttaagaataggtgaaggtgtaggtgtttggggatgggggtgtggtggagtaggttttagtagtagtggtgtgttggatatggggaggtgtgtgggtttagggtgtttttgtattttgtttggtgtgtggatattttagtttggttatgggtgtaggggtgggggtgtatgtagttgttattgtttgtttgtggttaggtggttgtttgggttatatttgttttgatgtagagttgtggtttttgttttgggtttggtttgattttggggaagttttggttttatttggttttgggattttattattgagttgtttttagttttttattttgttttttttggagttgttttttttttattttttagggttattgagtgggtgagtaggtggggttttattaggttttttttgttgtttgggatgtagatagggtttttaggttttttgtgattttttgtttataggttttgatatttgttttattttagttttttagtaggtttttggtgagggtgtttaggtttttaggttagggatagagagaggattgggggtggttagattaggagggatggaaggttggttaggttttggttatgtattttgttatttttttttggttttagtaggttttagtagttggtttggtgttttttttggttatttgttatggtttgggggttgtttattattgttagtttggtatgtttatgttagaagttgaattgtttgaagttgttggaggattttattatggagatgttattgtggtgttgtttgtttatgttggatttgatttttttgggtgtgggtggtatggtgggtttgggtttttatgtgtttataggtgttgtggttaaggaggtggttggttttgttgtgtttttgttttttggtgtggttgttgtggtttttttgttggtagttttatgttatgtagaatttggggtatgtgtgttatgtatgggttttgtttatttgtttatttatgtatttatgggtgagttgtgggttttttttattggttggaatgttttttttgaatatattattggtggtgttgttgtggtttgtgtttggagtggttatttggattttatgtttagttatagtatttgtaattttattgagatttatgtgggtttttggtaggtgttttttttgggttattatttggattttttggttgttggtattatttttttggtttttgtt

SEQ ID NO: 3319 - DNA, 2475 bp, Artificial Sequence
  chemically treated genomic DNA (Homo sapiens)
tttttgagatagagttttttattgtttaggttagagtgtagtggtgtgattttagtttattgtaatttttgttttttgggtttaagtaatttttttgttttagttttttaagtagttgggattatagataattattattttatttagttgatttttttttttttttttgagatggagtttttttttgttatttaggttggagtgtagtggtgtgattttggtttattgtaagttttgtttgtagttgggattataggtgtttattattatgtttggttaattttgtttttgtatttttagtagagatggggttttattgtgttagttaggatggttttaattttttgattttgtgatatgtttattttggttttttaaagtgttgggattatagatgtgagttattgtgttaggtttaaagtatttttttatagtttttagtttgttgttgtgtttgttttttttatggtttgtatagtttgggtttgaattttggttttttatggttttgggtaagttggttaattttttgtgttttaatttttttatttgtaaagtggggttggggaaaaattttattttatagggaatattaagtgagtttatgaaagtttttggtgtgtggtatgtgataattattatttaagtataaggtatgtttatatgtattggttgtttattatgatgtattagtatttatttaagttatttttttttagagtttgtttggaatgtagaattggttagtttttttttttaaatagtttttgtaatttttggttatttgtgtgggtagaggtgggagtgtgggtgtgtggttttgttttgggatagggatgatgagagagtatgtgtttgtgtttagagttgtttttttttttgtttaggggttattaaatatgtttatggtttttgttgtttggttaatggttattttgggttgttgttttttggttagatttggagtttataagttaattttagaaatgattggttgatttagttgttgttattatattggtttagaaggagggtggggggaggatgggttggggaggggtagtaaggggaagggatgtgtgttggtgtgtgtggagagggtgtttttttgtttttgtttttttggtttggtggggtttttttgtggttatttggggagatgttttagatagttgtggtttttgtgatttgtgttttttttgtagaaggtattattgggttgggttttagatgggtattttgtgagtggattggtgagttttaattttttggaatgtgttgttgggggttgtggtggtaggtttttggttttttggtttattttaggtttttttggtgttgagagtttttgaggtttgatttttttgtttgttgtttgtgttgtttattttgaaaataagagtgttttggtggaaggatttgagaataaaatgttggggtaaatggatatttgtaagaattattttttttaggttttagttgtttgttaataatttttaaaaatgtgtttagaattatgagttaatttttattgtgaatttttgtttgtagatgttagggtttatatttttttttaattattagtaatttttgttttattggtgtttagttatggttggggaagagttaggtttttttttttgtgttaataatgttgttgagttgaaatgttaattttaatgtttttttttaaattgtaaattaagtatgtatgagtgttgggggaagggtaatggaagtttatggttgaaggttttaattttatgttattttttttgagttttgtttgagggaaggtgttttatttggtattttggatagtaggtatttttttgaatgaagaagatttataggttttagtggttttatagtggggtagaagggggttatgttttgatatggagtttttttttaggagaggagaagattttattagttataggtttttgggttgttgtttttttgtagtttttttatggaggaggttaggagtggggaggtttggaatggggagtttagttggtttttagttggttttaagttgtttagtttggttttaatttgtaagtgtggggatttgggtttttattttgtagggtttggaatatgatgaggttgttatttttattttgtggttgtttaaaaagatgttgttttatttagtgtattagtttatggaggttgagtgttttattagggtttttagattttaataaggataatggtggttttgggtgttgtatttattgttgatttaagttgtatttttttatgtttgggtattatgtttagtgtgtattttgggagtagaaaagagaggggtttatatatttttaggttatggatgagttttagaaaataatagtggagaggagagagagaaaagaaggaagaggaggaggagaaggagaagaagagaaggaggaggaggaaaaaagtaggaggagaaagagaagaaggaggagaagaataata

SEQ ID NO: 3320 - DNA, 2475 bp, Artificial Sequence
  chemically treated genomic DNA (Homo sapiens)
tattatttttttttttttttttttttttttttttttgttttttttttttttttttttttttttttttttttttttttttttttttttttttttttttttttttttttttattattattttttagaatttatttatagtttaagagtatatagattttttttttttttgtttttaaggtatatattggatatggtatttaggtataggagaatataatttaggttagtaatggatatagtatttaaggttattattatttttgttggagtttagaagttttagtgggatatttagtttttatgagttggtgtattgaatgaggtagtatttttttggatagttataaagtgaaagtaatagttttgttgtattttaggttttataggatagaagtttagatttttatatttgtgggttgaggttagattggatagtttggagttgattgggagttgattgggttttttattttgggtttttttatttttggttttttttatggaaaagttgtaggaaggtagtagtttagaggtttgtagttggtgaggttttttttttttttgggagagagttttatgttaaagtatagtttttttttgttttattatggggttattgggatttgtgaattttttttatttagagaaatgtttgttatttggggtgttagataagatatttttttttagatagagtttaaggaaggtggtatgaaattgaaatttttagttatgaatttttattgttttttttttaatatttatatatgtttaatttgtagtttaaaaaagaatattaaaattaatattttgatttaatagtgttgttaatatgaaaggggaagtttggtttttttttgattataattgaatattagtgaagtagaaattattggtagttgaggaaaaatataaattttgatgtttgtgggtaaagatttatagtggagattaatttatgattttaaatatatttttaaaaattattagtgaatagttggggtttgaggagagtgatttttatgaatgtttatttgttttagtattttgtttttaaatttttttattgaaatatttttgtttttaaagtgagtagtatgggtaataggtaaaggaattaggttttggaagtttttaatattagaaaggtttaaaatagattaaaagattggaggtttgttattgtagtttttagtagtgtattttggaaaattaaaatttgttgatttgtttgtaaggtgtttgtttaaaatttagtttaatagtattttttgtaaagaggatatagattataggaattatgattgtttaagatgtttttttgggtggttgtgaagggattttattgagttgggaaagtaggagtgaaggagtattttttttatatatattgatatatattttttttttttattgtttttttttgatttgttttttttttattttttttttgggttaatgtgatagtagtagttgagttgattagttatttttaaaattagtttgtgagttttaggtttggttaggagatggtagtttggggtggttgttgattaggtagtagagattatggatatatttggtggtttttgagtagggaaggggatagttttggatataagtatatgtttttttgttatttttgttttagggtagggttatatatttatatttttgtttttgtttatatagataattagaggttgtaggaattgtttgaggaggagagttggttggttttatattttaggtagattttggaagaaaataatttgaatgaatgttggtgtgttgtggtaaataattagtgtatgtaaatatattttatgtttaggtagtggttattgtatgttatatattgagggtttttatgaatttatttaatgttttttatgaggtagggtttttttttagttttattttataagtggggaaattgagatataaaaagttaattaatttgtttaaggttatggagagttagaatttaaatttaggttgtgtgggttgtagaggaaatagatataatagtaaattaggggttataaaaaagtgttttgggtttggtatggtggtttatgtttgtaattttggtattttgggaagttgaggtgggtatattatgaggttaggagattgagattattttggttaatatagtgaaattttgtttttattaaaaatataaaaataaaattagttgggtgtggtggtgggtgtttgtagttttagttataggtggagtttgtagtaagttgagattgtgttattgtattttagtttgggtgatagagagagattttattttaaaaaaaaaaaaaaaaattagttgggtggggtagtggttgtttgtgattttagttatttgggaggttgaggtaggagaattgtttgaatttaggaggtggaggttgtaatgagttaaggttatgttattgtattttagtttaggtgataagagattttattttaaaaa

SEQ ID NO: 3321 - DNA, 2443 bp, Artificial Sequence
  chemically treated genomic DNA (Homo sapiens)
gtatttgatttgtggtatgtgttaatttattattgttaattgtagggatttagtgatttttttgaatttttgttatttttgttatggtttttgttttgtggaggtttgtggaatgggaagtggggaggggaaggagaagggggtggagttagttggagttttttggttaggtttggagttattttgttttgttatagtttttatgggtttagagtgggttttggggtagagggtttgtaaggataggggtgggtggttttgttgagggtggtgttttgagtaggttttattttttagtttgtttagtttggttttattttagttttgttgttttgttattttgtttttttgtgtttattttttattttttgttggggatattttaaggtttgttaaggttggagtaggggtgggatttagttatttaataaatgtttttttggttatgtagggttgggtattggggtggggggttgatttggattttttaagatattagattgtttaattgtttagtttttattggggtaagtgttttgttgagggtgaagggggttgtgagtgtttattagggagtttggataggttttgttttttatagttgttttattttttggagttgttttggtggtagatggtattgttttagaaaggtgaggttggagttgttttttttattaggggtggttaaggatgtttttagggttttttatgtaggtttttagggttattttgggtgtggttgagggtatgtagattatgttgtgtttttttttattttttatgtttgttgtttgtttgatatgttttttagttgttttgttttgtagaagttgtgtggttttttttgtgagtagagttgggttttatgattttttggagtagtgttagggattttttttaggtataattttaaagggggttttaggatttgttaggtttatggaagtggtttttgtaattttttttttggtggtagtttttggtgtattttggtaggggtagtttttttttattatagggattttgtgtgttaggttttagttgtgttgttgttgaattatggatttaatagtagagaagttttgtaggttgtttgtgttggtttgggaaattggggtttagttggggtttgttatggttttggtgttgttttgttttttgttggtgttatggagtaagtggagagatttatttttttggttttaagaggtattaatggaggaggttgagaggtaggagttgaataattgatggttttttttggtttaggatttgttgaaaatgatatggtgtaaggtagaggggttgagagtgttgattataaaatgttgagaagttattttagggtggttatggttagaaggaggatttttatttaggatggggttataggtatttggggtgggtgttagaggtttttgttttgggttattttagggggttaggatatttagaagttgggtttagaggtttatagggttggtttatttttattttttttttatatgtttgttattattggtgttttagtttagtaattttatggtttgttggttttgtttatagtttttattgttttttgtgtgttgggtgtgggtttttgagttttatttttagtttttttagttttaggagaggagtggaggataggggtttaatgtggggtgtggtgtggagtggggagggttgtggtgtttttttagtttttttttttttaatagttttagttttttttttggagaattttttatttgttgggtatatttggtttttttttattattttgtttttagttgggagatttttatttagtgaaatagtgaaataggaagggttttttggttattttgtgtagggtgtagggtatgtagtgggggagtggtttgtttttttagtgttttattgtttatatttttaggggagtatatagatgggtaggttgtggggttttgattttatggtagtgtttgggggtgaatgtttatagtttttgaaattttagtgggagtgtgttattgggtggttttttagtttagtggtttgtaggtggttggtgagagtgagtttaattagatttttgttttataataaggatagaggaatttttgtattttagggttttttgttttggtgtattaaaaaattggattatatgtgggtttggagaatgagtgtaaggttttattgagtggaagtagtttttagtagatgggggagttagaggggagatggtttttttttggagttaggtaatatttttgggatgtttagtagtttgtttttttttattagtgtgtttttttttttatatagaggtttttgtttttgttttgttagggttttgggtttttataggtataggatggaggtatggtaggttagggtggttttgggaaatgtaatatttgggtaggaaatgtttgtttttatttaggtttgt

SEQ ID NO: 3322 - DNA, 2443 bp, Artificial Sequence
  chemically treated genomic DNA (Homo sapiens)
atgaatttaggtgaggataggtattttttgtttaaatgttgtattttttaagattattttggtttgttatgtttttattttatgtttataaaaatttaagattttagtaaggtagagatagaagtttttgtgtggggagaggaatatattggtggaagaagataagttgttggatattttgagaatgttgtttgattttaggggaaaattattttttttttggtttttttatttgttgagagttatttttatttaataaaattttgtatttattttttaagtttatgtgtgatttaattttttggtatattaaggtaagaaattttgggatatagaaatttttttgtttttgttataaggtaggggtttaattgagtttatttttattagttatttatagattgttagattaaaagattatttggtaatgtatttttattggggttttaagagttgtaaatatttatttttagatattgttatggggttagagttttatagtttgtttgtttgtatgtttttttagaggtgtgagtggtggggtattgaagaagtgagttatttttttgttgtatgttttgtgttttgtgtggggtaattagggaattttttttgttttattgttttattgggtagagattttttggttggagatagaatggtggggagaggttagatgtgtttagtaggtaggggattttttaggggggaggttgaggttgttaggaaaggaggggttgagggggtgttatagttttttttgttttgtattatattttatgttaaatttttgttttttattttttttttggggttaaggaggttgagagtagagtttagaggtttatgtttagtatataggaggtagtgggggttgtggatggggttaatgagttatggggttgttgggttgaagtattggtgatggtaggtgtgtgagagggaagtgggggtgagttagttttgtgggtttttaggtttagtttttgggtattttggttttttggaatgatttagggtaggagtttttgatatttgttttaaatgtttgtgattttgttttgagtgggggttttttttttggttgtgattgttttggagtggttttttagtattttgtggttagtatttttagtttttttgttttgtattgtgttatttttagtagattttgagttagagaaggttattaattatttagtttttgttttttagttttttttgttagtattttttaaagttgggaagataaatttttttgtttgttttgtggtgttgataggaagtagggtggtattaggattgtgataggttttggttgggttttggttttttgagttagtataggtggtttgtaaggtttttttgttattaaatttataatttagtggtaatgtagttggggtttggtatatagggtttttgtgatgaggaggggttgtttttgttggaatgtattagaggttgttattagggagagagttataaggattatttttgtggatttggtaggttttagggttttttttaaaattgtgtttggggagagtttttggtgttgttttggaggattatggagtttgattttatttataggggagattatatagtttttgtggggtaagatagttgaggagtatgttaggtaagtgatgggtatggggggtgggggggagtatagtgtggtttgtatgtttttagttatgtttagggtgattttggaggtttgtatggaagattttggaagtgtttttggttatttttggtggaagagatagttttagttttatttttttaggatagtgttatttgttattaaggtagttttagagagtgggatagttgtgagaggtgggatttgtttaggttttttgatgggtatttatagttttttttatttttagtgaggtatttgttttaatgaaaattgagtagttggataatttgatgttttggagggtttaggttagttttttattttaatgtttagttttgtataattaaggaagtgtttgttgaatggttgagttttatttttgttttaattttggtaggttttggagtgtttttggtaggaagtggagggtgaatatagggggataaagtaatagggtagtagagttggggtggggttaggttgggtagattggggaatgagatttatttagaatattgtttttggtagagttatttatttttatttttgtaaattttttgttttagggtttattttaaatttatgagagttgtggtaggatagggtgattttaggtttggttaggaggttttggttgattttgttttttttttttttttttttttattttttattttataggtttttatagggtaggggttgtgataggggtgatagaagtttggagaggttattgagtttttgtaattagtagtaatgagttgatatatgttataggttaagtgt

SEQ ID NO: 3323 - DNA, 2892 bp, Artificial Sequence
  chemically treated genomic DNA (Homo sapiens)
gtttttttaattttagaggtgtgagtatgttggtttttttggtaagtttttttgggttttttgtaaattttaaatttataagatattttgtggggagatgagtttttgtttttttgttttttattttaaaatttaatatgtgattgggtatggtgatttatgtttgtaattttagtattttgggaggataaggtgggtggattatttgatgttgggagtttaagattagtttgattaatatggagaaattttgtttttattaaaaatataaaatttgttaggtgtggtggtgtatgtttgtagttttagttatttaggaggttgaggtaggagaattgtttgaatttgggaggtggaggttgtagtgggttgagattgtgttattgtattttagtttgggtaataaaagtaaaatattattttaaaaaaatagaaagaaataatatgtatttagaaaagggtatgtattataaatgaatagtttaataaatttttataaattgagtttaattttgtaattaatatttagagtaagaaagttgaatttaattagtttttgaaagtttagtatgtttttattttaggattattatttttttgatttttgaattgtttttgtttttttttttttttttttttttttttgagatggagttttattttgttgtttaggttggagtgtagtggtgagattttggtttattgtaatttttgttttttgggtttaggtgatttttttgttttagttttttgagtagttgggattataggtgtgtattattatgtttggttaatttatttttatttttatttttagtagagatagggttttattatgttggttaggttggttttgaatttttgattttaggtaatttgtttattttatttttttaaagtgttgggattataggtgtgagttattgttattggtttgtttttgttttttatgtaaatggaattatgtagtgagtgtttttttgtggttgattttattattttgatttatgtttgtgagatttatttgttatgtgagttgtggattatttatttttgttttgtttgttgtgtttttaagtttgaatattttatgatatttatttgttttgatgatgttaggttttttaattggaggaattatgaatgtgtggttatatgtttttttgttttttggagtatatgttgtatgtgtttttgttgagtgtaaggttgggtggggtgttggtggtttaaggggtttatggtgaatttataggaatattgttttgagttgtttagtggtgtttttatgtgttttatttagtttttttgtatttttatttgtattattttattttttttttttggaaaataaatttatttgtggttttaaagtttaatttatttttagtaattttggtagttatgaatttttatataagaggtttttgtaggtttagtgttaaagttgttttttttgtagttttggtgattttttgggtttttttttttggttttggtgttttgggtgagtttagtatatgttgggattttggttgtttgttggtttggtttgattgtttttgtttttgagggtagagttgggttttattttgggatatgtttggggttagttattgatttgtagttttttggttgagggtgtggggttggtggtaaggtttgttttagtgttttttagtagttgggtttttgattgtaggtttgggtttttgtttttttgtgtggagttgggtggggataatttttgattttgagttttttttttgagagggggtggggggaggaggggattgggttttatggagtgttgggggataggattgggggtatttggtttgaaggtgttttttttgtgttttttttggggaagtttgggatttaggtttttgtttttagttgtgggtgtgtgttttttgtagttggggtttggggagggagggttttggtagggggtgttggggagggaggattaggagatttgtggttttgtttttgttgtgttttttttttgggtgggataattgaatggtgtggttttggtttagtgttggttgttgaggtttggttggagtgtggagtttgtgttgttgttttaggattgtgtttgtgtttttgtttgttgttgtttattgtttgttgtttgttgtttatggagtgtgttgtgttgttgtgttgggttttgtttttgttgttgttgtttggtggttttgtgttgttggtggttggaggtaggggtgttttgggtttgttgttttagtttagggttttgatttttttggttttgtgttttttgtgagttttggaattatggggatttggagtttgtgtgttgttttgtgtggtgtttttggattgttagtgttgaggttttggtgatgttttttttttttatggttagttttggtttttattttttttttggtttggggatttgttttaaaattggatttttttattttttaaatatattgttttattttagttttagtaaatttagttggttttgggggttgtattttgggttttgggggtttaggggtgttagttgggttgggggatgttggttgggggttattgagtttagggtgttttgtatttgatgttggaagtgtttttggttatttttttttattgttttttgtttttatttttaggtaggagttgttgtatttagtttgtggatgtgaaatttgagtttggagggtgggaagtagttttttttttaggagatattagtggttttgggataggggttggagaggaagaaatgagaaagttagggagtagtttggaggtttttggggtgtagttgggaggatggaggggatgtggatttggttattttttttttgttttttttttgggatagagggtttaaggtagtggttt

SEQ ID NO: 3324 - DNA, 2892 bp, Artificial Sequence
  chemically treated genomic DNA (Homo sapiens)
gaattattgttttgggttttttgttttgggagggaggtagggaggaggtggttaggtttgtattttttttatttttttagttatgttttaaaaatttttaggttgttttttggtttttttatttttttttttttagtttttattttaggattgttagtgttttttggggaaaagattgttttttattttttaggtttaagttttatatttgtaagttgggtataatagtttttatttgggggtggaggtgggaagtggtgaggaaagatagttgagggtgtttttagtgttaagtgtaaggtgttttgggtttggtaatttttagttagtgttttttagtttagttagtgtttttgaatttttagggtttgggatgtggtttttggagttggttggatttgttaggattggggtaggatggtgtgtttgaggggtgggggaatttggttttgaaataagtttttaggttggggaggagatgaggattggagttggttgtgggggaggggggtgttgttgaggttttggtgttgatagtttgggggtgttgtgtagggtaatgtatggattttgagtttttgtggttttgaaatttgtagggagtgtgaggttgagggggttgggattttaagttggggtggtggatttgggatgtttttatttttggttgttagtagtgtaaggttgttgagtagtagtagtggaagtgggatttggtgtgatggtgtggtgtgttttatgggtggtgggtgatgggtggtgggtggtggtggataaaggtgtgggtgtggttttggggtagtggtgtgggttttatgttttggttgagttttggtagttaatgttgggttagggttgtgttgtttaattattttgtttgggaggagggtgtggtggaggtggggttgtgggttttttggttttttttttttggtgttttttgttgggattttttttttttggattttggttgtgaggggtgtgtgtttatggttgggggtgagggtttggattttagatttttttggagggggtatagagggggtgtttttgggttggatgtttttagttttattttttaatattttgtgaaatttgatttttttttttttttatttttttttgaggggagggtttgggattaaaggttatttttgtttgattttgtgtggaggagtggggatttgggtttgtagttggaggtttggttgttggggggtattggggtaggttttattgttaattttgtatttttggttgggaggttgtaggttggtggttaattttaggtgtgttttgggatgggatttgattttgtttttagagatagggatagttgggttaggttaataaataattaaaattttaatgtgtgttgggtttatttgggatattagggttggagggagagatttgggaagttattgaggttgtaggggaggtagttttggtgttgggtttgtgggagttttttgtataggaatttatagttattggggttattgaggatgagttaggttttggaattataagtagatttattttttaaagaagaagaataaaatggtgtaggtgaagatgtggaggaattggatgagatgtataggaatgttattgggtagtttaaagtggtgtttttgtgagtttattatggattttttgagttattgatgttttgtttagttttatatttagtagaaatgtatataatatgtgttttaaaagatagaaagatatgtagttgtatatttataatttttttaattgggaagtttagtgttattaaggtagatgaatattgtggagtatttgggtttaggagtatgataaatggaataggagtgaatgatttgtaatttatataatgggtaaattttatagatgtaagttagagtaatagagttagttataaaggaatatttgttgtatgattttatttatataaaaggtaagaataggttggtggtggtggtttatatttgtaattttagtattttgggaggatgaagtgggtggattgtttgaggttaggagtttgaaattagtttggttaatatggtgaaattttgtttttattaaaaataaaaataaaaataaattagttaggtatggtggtgtatatttgtagttttagttatttgggaggttgaggtaggagaattgtttgaatttgggagatggaggttgtagtgagttgagattttattattgtattttagtttgggtggtggagtgagattttgttttaaaaaaaaaaaaaaaaaaaaaaaaaggtaagaatagtttagaggttaggagagtggtgattttggagtgggagtgtgttgggtttttgggggttggttaggtttagtttttttattttgggtattggttataaggttgggtttagtttgtgagaatttattgagttgtttatttatggtatgtgtttttttttgaatatatgttgtttttttttgtttttttgagatggtgttttgtttttgttgtttaggttggagtgtagtggtgtaattttagtttattgtaatttttattttttgggtttaagtgatttttttgttttagttttttgagtagttgggattataggtatgtattattatgtttggtaaattttgtatttttagtagagatggggtttttttgtgttggttaggttggttttgaatttttgatattaggtgatttatttgttttgtttttttaaagtgttgagattataggtgtgagttattgtgtttggttatatgttaaattttaaaatgaaaaataaaaggataagaatttatttttttatagggtgttttataagtttgaagtttgtagagagtttaggaaagtttattaaggggattagtatgtttatgtttttgaggttaaggaggt

SEQ ID NO: 3325 - DNA, 2588 bp, Artificial Sequence
  chemically treated genomic DNA (Homo sapiens)
tattgattttattaagtttttttttaagtgttagtttttattttttttttttttgtttagaggagaaatttaaaattgaaatttttaatgtggatgggggtatagagtttttggttttttttggtgttttttgatttgggtatattttttttatgattatgtttgagatgttttttttttttttaggttttttttatagtggggttttttggaatgtttttttttaaatttatttatgtaaattttgttttttggaggttttagtttagttttggtattttttaggagtttgttttgtagagattttttggttttttgttttgtattttgtgtaggaagtttgattttttttttagttttttttgagttaggtttagtagtttgaggaagtgagggttgttgtatttgaagtggtgtttgtaggtgagggaggtgattatgttgtttatggttttgtttaagaggttgttggggtgaaaggggtgttttgggggtgggagatgtgggtaaggggttgttttttttgttttttgtttttttagtttttgttttgtgtttttttgtttattatttattggtttggttggtgaaggtggtataaaggtaggtggtttttttggttatttattgttttagtgattttttgtttaggtttaagttgtgtaaggtggatatggagaagtgtttttgtttgtgttatgtgggtttatagtgtgataggattatttttgggggtgggatgggtatgtgggtgttgttatgaaggttttggttttattttttgttatttattttaattttggtgttttataaggttttttgtagtttttagtttggtttagttgggtatagggtttattttttgtttatttatattgtttttttgtttggggtggggtttggttttattttgtttttgtttattttgattatttttttatttaaggaagattttgtttgttttgtttatattgagtttgtagtataggtgtggtttttgttattgttattttgatgtattagttttgtttattgggtttttggtgggtttgggtagtagttttgtttttttttagtttatagatttgtattttttttgtgtaggtggttttttggtttattgtttttagtttatttgttggtttttatttttgttttatgtttaggattttatgttttgttggtgttgtttgggttatggttattgtttatttggggtttatggaaatgtggtttttgttttttattgttgtttgttttgggaatgtggtttgaagtttaggatttggtagatgggtgtaggtgggtggttggttgtgtttttgttgtgggttattattgttttgtgtatggttgttagtttattgagtatgattattggtgtttaggttagttgtaggttgaatatgtttttgaagtggtgttgtaattgtagagggagggttagggttttttgttaagttaggattattttagattataggttttagttttatttgaattttggatgatttttggggttattaggagtgagtaggtggaaggaggagatttagttttttgattttggggtgggggtgggggttatattttttgtgatggaggaatttagtttggatgtgttatttaggtatgattttgtaagagttattaaaattgttgagaggttttagttagtattttatttttagatgatggtttatgttggtgagtagtgaggtttgaggatttatagtgtaaaaggtttgaattgggttattgtattttttttatttttgattttgtgatttaaatggtatttaggattaatttattttttatttttaaggtttttttttttggtgttagtagaagggattttgtattttataatatatgttgtttaatgggtttgtatgtttattgttaagtttagttttatttttaggtttttgttttatttttttttggtttttggaaaatttagttttttatgttatgtataaatgtttttttttaggatgttttttaaatttgttttttttttttagtttggtttttgatttagtttgtggtttaatttattatttatgtttgttggtggtggggtatttttaggatttttgttgttttttaggatttttttttttatttggttgaagtagtatggtgtgttttggaagtttatatgtagtaaggttgtttagtttgggtagtggtaggggatttggtgggtagtgtgtagtttagtgttggtgttggtgtattaggtttattaggagtaggaagatggttattattatggttaggggtattagtgtttttagttttatggttgttttattattaattgggtttttttggatatatttggtatttttattttattaggtatagaggattaggtaggatatttttggtatattgagtgtgtgattttttttttataaagggagttgatgatggtttttgttttttgttgtgagtgaatttgttgtgttgattgtgttgttagtggtagagttaggttagggtaggtatgggttgttttagaggtttttgttgttgttttttgttttaggtttttatttagggtagggtggtagaaa

SEQ ID NO: 3326 - DNA, 2588 bp, Artificial Sequence
  chemically treated genomic DNA (Homo sapiens)
tttttattattttattttgggtaagggtttggagtaggaagtagtggtaaggatttttggagtagtttatatttgttttggtttgattttgttattggtagtatagttaatatagtaggtttatttatagtagagggtgaaggttattattagttttttttataagggaagggttatgtgtttggtgtgttgagagtgttttgtttggttttttgtgtttggtggggtgggggtgttaggtgtgtttagaggagtttagttggtagtgaggtagttatggggttagaagtattggtgtttttggttatgatagtggttatttttttgtttttggtggatttgatgtattggtattaatgttgggttgtatgttatttgttaggttttttgttattgtttgggttgggtaattttgttgtatgtggatttttagaatatattatattgttttgattaggtgagggaggaggttttggagggtggtagaggttttgaggatgttttattattagtaaatatgggtggtgggttaaattataggttggattagaagttaggttgagaaggggaagtaggtttgggggatgttttggggaaggatatttatatatggtatgaaggattggattttttaaaggttaaggaagagtagggtaagggtttggaggtggagttggatttggtagtgggtatgtaagtttattgggtaatatatgttatggagtataaagttttttttgttgatattagaaggaaaggttttgggaatggaagatgagttagttttgagtgttgtttaaattatgaaattgaggatgaagggggtgtagtgatttggtttaaattttttgtattgtgggtttttgggttttattgtttattggtatggattattatttgggaatgggatgttaattggggttttttggtaattttggtgatttttgtaaggttatatttgggtgatgtatttaaattgagtttttttattatagaaggtgtgatttttatttttgttttaggattaggaggttgggttttttttttttatttgtttatttttggtagttttgggggttgtttaaggtttaaataggattaggatttgtagtttggggtgattttggtttgataagaggttttgattttttttttgtagttgtggtgttgttttggggatgtgtttagtttgtagttggtttggatgttggtggttgtgtttaatgggttggtggttgtgtgtgaggtgatggtgatttgtggtgaggatatggttgattgtttgtttgtgtttatttattaggttttgggttttgggttgtgtttttaaggtaagtggtggtgggggatagagattgtgtttttgtgggttttgggtggatagtgattgtagtttaagtagtgttgatagggtgtggggttttggatgtgaaatagagataaaggttagtgagtgggttgaggatagtgggttaggaaattatttgtatgggggaggtgtgagtttgtgggttgggagggggtggggttattgtttagatttgttagaagtttggtgggtgaggttgatgtgttgaagtggtggtggtggggattgtgtttatgttgtgggtttagtgtgggtgggatgggtgggattttttttgagtggaaaggtggttagggtgggtagagatgaggtggggttaaattttgttttaggtaggggagtaatgtgggtgagtaaagagtgggttttgtgtttagttggattgggttagggattgtgggagattttgtggagtgttagggttggagtgggtggtggagggtggggttaaggtttttatggtaatgtttatgtgtttgttttgtttttaggggtgattttgttgtgttatgggtttgtgtggtgtgagtagaggtgtttttttgtgtttattttgtgtaatttgggtttgggtaagaagttgttggagtagtgggtgattgaggaggttgtttgtttttgtgttgtttttgttgattaagttggtgggtgatgggtagaagggtataaagtgggaattgggaaggtgggggatggagaaggtaattttttatttgtattttttatttttaggatgttttttttgttttaatggttttttggataaagttgtgagtaatgtgattgttttttttatttgtgggtgttgttttgagtatgatgatttttgtttttttaggttgttggatttagtttaggagggattgaaggaggagttgggttttttgtgtgaggtgtggagtgagagattgaggagtttttgtagggtgagtttttgagaggtgttggggttggattggggtttttgaagggtaggatttgtatagatgggtttgggaaaggatattttaggagattttattgtaagaagggtttggaggaggaggggatattttagatatggttgtgggagaggtgtgtttgggttagggggtattaggagaggttaaggattttgtatttttgtttatgttggagattttgattttaggttttttttttgggtaaggagagagagggtggaggttggtatttggggagggatttggtgaggttagtg

SEQ ID NO: 3327 - DNA, 2282 bp, Artificial Sequence
  chemically treated genomic DNA (Homo sapiens)
ggttgaggtgggtggattatgaggttaggaggttgaggttattttggttaatatggtgaaattttgtttttattaaaaatataaaaaagtagttgggtgtggtggtgggtgtttgtagtttgagttatttttgaggttgaggtaggagaatggtgtgaatttggtaggtggagtttgtggtgagtttagagattaggttattggaatttagtttgggtgatagagggagattttgttttaaaaaaaaaaaaagaaaaaaaaaaaagattttgattttgttgtttaggttggagtgtagtggtgtgattttggtgtattgtaatttttttttagtttttgggtttaagtgattttttagttttagttgttggagtagttgggattataggtgtgtgttattatgtttgattaaatttgtatttttattagaaagggggttttattatgttggttaggttggtttttaatttttgattttgtgatttgtttgttttgattttttaaagtgttaggattataggtataagttgttatgtttggttttttgttttttttttttttttttttatttgaagattgagttttgtatttgttgtttaggttggagtgtaatggtgtgattttagtttattgtaatttttattttagtaggagagtaggaatttttagtgatttatgggtagatttgttgttattgtgggtatttgttttttttgtgatttttgtgtttgtttttttttttttagtatttattgtatgattttttatgtttgttttttgttattgttagtaagtgttttgtgtgggtatttggttgtgtttattaatttgttaagtttgttttgttatgggtgttgtgatgtgtttatgtgtttgtttttttaggtttaaaaggtgtgttgtttggtaatagaagaaattgttggtttagttgttggttgagttggtggttggatgaggatgtttagagtttagtttttgagagtttaagtaattgatggttttttattgtttttaggagtggttatttgggtattttgtgttttttttttttgtttgggtttaggttgaggatttgttagtagggtttagttgtttggagtttgtttagtttattttttagtttattttgtttgtgggatttttttgttgtttttgtttgtggattgagtggtaggttattttataagtatttggatatttgatatttgtggtgttaagataattttaagaaggttttttgtgattttgtaagttttgtttttttttttgggattttgtttttaatttgattgtataggtattatagtaagttagtgttgtgtgttttgagttttagggtgttttttagtttagttattgtattgagaatatggattttttgtggggtttaggagttgggagttatttttttggggtttataatagttggttgtttttagatttgtgtttagggaagatagtgttgagggtttttaaggagagtggggtagggatgtttgagtaggataaggattttagagtttaagagaattttggtgattagagaagggtttttgaggttattggggatgtattgtttgtattttggtttttgtgggataatggaggtttttttttttttgtgtttgggtttgggtttttgtagatagatttttatgtttagaggttagaaattagatatgattagttattttagattttttggatgagtttgtgtattaattgaaatgttatttttagtttttatagttttatgggaggtttgttggggttaaagtggaggagggggttagttttattttattgttagttgatttttagttttttaaagatagtgagtgaggataggttttaggttgtttttttgggttatatttagtgtgaaaaggtggtagagaaagtattagggtagatatttgtttttaggaatgatttttttagatttgaggtttttaggtttagtatatgtaagttttttttgttgttatataggtgaggggagtttttgatgttgttattttttgtagagttggggtattgggttattgttgaagatttggattgggagaaggaggtggtattttagtgtattaagagtgtattgtaggttgaggataaggttattttagattgtagatttttatggtttttttatattttgtttttatttgtaataggggtttttggtttgtttgttgtttttaaagtatttagtatggatgtatagtaggagagatataagttttaagattgtttgggtttagtggtttttttagtat

SEQ ID NO: 3328 - DNA, 2282 bp, Artificial Sequence
  chemically treated genomic DNA (Homo sapiens)
atgttaggggggttattaggtttaggtagttttgggatttgtgttttttttgttgtgtatttatattgggtgttttagaaatggtaggtagattagaagtttttgttgtaagtgaggataaagtgtgggaaggttgtgagggtttgtagtttgagatggttttgtttttaatttgtagtgtatttttgatgtattggaatgttgttttttttttttagtttaggtttttagtagtgatttggtattttagttttatgggaggtggtagtattaaaggttttttttgtttgtgtggtagtaggggaaatttgtgtgtattgggtttagaggttttggatttggaggagttatttttgagggtgagtgtttgttttggtgttttttttgttatttttttatattgggtgtgatttgaagagatagtttgaggtttgtttttatttattgtttttgaggaattgagggttagttggtagtgggatgaggttggtttttttttttgttttagttttggtaagttttttgtggagttgtaggagttggagatggtattttggttggtgtatgagtttgtttaggaggtttgggatgattggttatatttgatttttgatttttgggtatggaggtttgtttgtagaggtttgggtttgggtataaagggagagaggtttttattgttttgtaggggttgaaatgtagatggtgtatttttggtgattttggggatttttttttgattattaggatttttttggattttagggtttttgttttgtttaggtatttttgttttgttttttttgagggtttttaatattattttttttggatataagtttggggatagttggttgttgtggattttaaaggggtgatttttagtttttgggttttatagagagtttatgtttttagtgtagtggttgagttggaggatgttttggaatttggagtatatagtattggtttgttgtggtatttgtgtaattaaattgaaggtaggattttagaaaggaaggtagggtttgtaggattatggaaaatttttttagagttgttttgatattatggatgttaagtgtttgggtgtttgtaggatggtttgttatttagtttatgggtaggagtaatggggagattttataggtaaagtgaattgggggatgggttgaatgggttttaggtaattgagttttattggtaggtttttggtttgggtttgaataggaaggaggggtatagagtgtttaggtaattgtttttgggagtagtggggaattgttggttgtttgaatttttgagagttgggttttgagtgtttttgtttagttgttaatttggttaatggttaagttagtagttttttttgttgttgggtaatgtgttttttaaatttgagggagtgggtgtgtgagtatattatggtgtttgtgatagagtgagtttaatggattaataagtgtagttaggtatttgtgtgaggtatttgttggtaatggtgggaggtggatgtggggggttatgtaataggtattggaaggagagaggtgggtataaaggttgtgggaggaataggtgtttataatggtggtagatttgtttgtggattattgaagatttttgtttttttgttgaggtggagattgtagtgagttgagattgtattattgtattttagtttgggtaataagtgtaaaatttagtttttaaataaaaaaaagaaaaagaaaaataaaaggttgggtgtggtggtttatgtttataattttagtattttgggaggttggggtggatggattatgagattaggagttggagattagtttggttaatatagtgaaattttttttttagtaaaaatataaatttagttagatatggtggtatgtgtttgtagttttagttattttggtggttgagattggagaattatttgaatttgggggttgggaagggattgtgatgtgttgagattgtgttattgtattttaatttgggtaatagagttagagttttttttttttttttttttttttttttgagatggagtttttttttgttgtttaggttggattttagtggtttgatttttgggtttattgtaagttttgtttattgggtttatgttatttttttgttttagttttgggagtagtttggattataggtgtttgttattatatttggttgtttttttgtatttttagtagagatggggttttattgtgttagttaggatggttttgattttttgattttgtgatttgtttgttttggtt

SEQ ID NO: 3329 - DNA, 2731 bp, Artificial Sequence
  chemically treated genomic DNA (Homo sapiens)
gggttaggtattgttagtttatgttgagttttttggtggtgttgttttgtttatttttttttttgttttgtgtagtaaattgatttaggatagttgtatggagagttttattttgattttgttgttgtttattttggatgttgagattgagaagtttattaggatgaaggatgaggaagtatgtggggtggtgggggtggtggaggtgggtgttagggatgtttttttgtggtgttgtttatttgttgggttgtttttgtttgtagttgaggtgtatgtaggagatgttgtagaggatgaagtagtagatgtaggattagtgatgtttgttgtggatatattgtttgtttttgggatgtttttgtatttttggatattagattggattgtttttgatttggagatgtggggttatagtttttagttgattttaatttatttttagtattatttttttttaggttattgtgtttgtttttgaggggtttggattgtagtttttgtttagttggttttttttgattttgggggattaggagtgaagttgggtgggattttagagatttgttttttttgttttttttttgtttttggatggttatagtatttaaattgtaggttttgttttggtaggtaggtaaagttaggtagaagaggatttttaggattttgggtttgttttttgttttagtgttgtagaatggatttgggagtttttttttgtttgtttttgtgggttatttagtgagtgttgagattttattttttgttgaggtgggttgagtttttttttatttttagatgtttagtgggtagggttgggttgaattaaatgggagttttttagatataaggaggttagaggttgtaaggagtggggttgtgattgtttatattttttttttatagtttggtttgatttggagggtttttggggtattgggtggtgagttattttttggtaatttttggtgttgttttttgtttttgtttgaggttttttttttttagtattgttgtggtgtgttgggattttgagtttaggttttttgatgtttttatttgtatgatttttttttgttatatgatgttttgtttttttttgttgtgaatgttgtgttttgttttggtgataggagaataatgttggtgaatgttgtagtgggtgtttgagtgttttgtgtgtttttgagagtgggtgggagtggaagtttgagtggtttgtggtttttggtgatagtgtgttatttgttgttgtagtgtgtgtttgtgtggtttttgggttatttttggttaggttgtagtattgtggttggtgtgggtgtggtaggggtggggtggttttattgtttggtttttttgtttatgttttttgttgtagagtaagttgggttgttgtttttttgttatgggttttggtgagtttggagtttggttgggtttttggttgttttttaggttgatttgggttgagaggagttttggttgtttggttgtagttgggagagatttgggttagatttagaggggatttttagttggtgtgtggggtggttagggtggagaggttggtgggttattgggatgttgggtattaggggttggatggagttgggttggtagtttgggtatttagagatgttgtttaggtgtttgttgattgtttggtttattgtggtgttttttttgtagggttgtgtggggtgttgagtttattgtttttgttgttggttttgttgagttgtttggttgtaggttgtttggtgttttgtagttgtgtggggatgtttgtggattgtgggtgttgtgggttgatttgggttttgttgttgattgttttttttgttgatataattgagttggtgttgattggtaataatttgatggtgttgttgttggggttgttggatgtgttgtttgtgttgtgtattgtatatttgggtgttaatttttggtgttgtgattgttgttttgtgttgttgtgtgtttggttggttggttgttttgagtgtgtgttttattgtgatttgtgttgtgtggtgtttttagtgttgtgtggttgtttgttgttttatttggttgaggatgagttgtgtgttgtttgtgtttttggtttgttttgttggggggtgttggtggtgtagtttgtgttgttgggttttgggttgttgtatgtgttgttgttggtgttgttgttgtgttgtttgtggaggttgtgggtttgggtttgtgtttgtgttgtagtttggttgttgttgattgatttgttggtggttgagtgagttggaattgatgagttttgaggagagaattggtgtgttttgaggagagaattggtgttgggtaatatgggtttgtaaatttgataggattttgtttgaggggtttttgtgttaatttggattggtttttgttttttttgttgtttaattttttagatttattttatttgtaggtttagattatgtgggatagaatttttgtttattttattttgagggaggtgaatttgtatttttaggtttgggaggattatggggtataatgtggtttagattttgttgtgttttttttttaaattttggtgttgaataaatttttttgatttggttttttttgtatgattgatttggaaattttttttgttaaatttaggaaaaggttttaggaggtggtttaaggggatataaatatatttttatatgtttattttaattttaggggtagatag

SEQ ID NO: 3330 - DNA, 2731 bp, Artificial Sequence
  chemically treated genomic DNA (Homo sapiens)
ttgtttgtttttgaggttagggtgggtatgtgaggatgtgtttgtgtttttttgaattgttttttggggtttttttttgagtttggtgaggggaatttttaggttagttgtgtagagaagattagattagaagggtttatttagtattagagtttggaagggagatgtagtagggtttggattgtattgtgttttatggtttttttaagtttggaagtgtgggtttgttttttttggggtagggtgggtaggagttttgttttatgtggtttgggtttgtaggtggggtgggtttgagagattgggtagtggaggaggtggggattggtttaggttggtgtgagggttttttgggtagggttttgttgagtttgtaggtttgtgttgtttagtgttggttttttttttaggatgtattggttttttttttaggatttgttggttttggtttgtttggttattagtgggttggttagtgatagttgggttgtggtgtgagtgtgggtttgggtttgtagtttttgtaggtggtatagtagtagtattagtagtaatgtgtgtagtagtttaaggtttagtagtgtaagttgtgttgttagtgttttttagtagagtgggttgggagtgtaagtggtgtgtagtttgtttttggttagatagggtagtaggtggttgtgtagtgttgggggtgttatgtaatgtaggttgtggtagggtgtatgtttggggtggttggttagttaggtgtgtagtggtataaggtggtagttgtagtgttaggggttggtgtttaggtgtgtggtgtgtagtgtgggtagtgtgtttagtagttttggtggtagtgttgttaggttgttgttggttagtattagtttggttgtgttgatagggaaggtggttggtagtgaggtttaagttagtttgtggtgtttgtagtttatgagtgtttttgtgtagttatagggtgttgggtaatttgtggttgggtggtttggtggggttagtagtaggagtagtaagtttagtgttttgtgtggttttgtaagggaagtgttgtagtaagttgagtggttggtgggtatttgggtgatatttttgagtatttagattgttggtttggttttatttagtttttgatgtttggtgttttggtagtttgttagtttttttattttgattattttgtatgttggttggaagttttttttaagtttgatttaagttttttttagttgtagttaaatgattagagttttttttaatttgggttggtttagggagtagttgggggtttgattggattttagatttattggagtttatggtgagaagatggtagtttggtttattttgtagtgggaggtgtaggtgggagagttgagtgataaggttgttttgtttttgttatgtttgtattgattatagtgttgtggtttggttagaaatagtttagaggttgtgtggatgtgtgttgtagtggtagatagtatattattgttggaggttgtaggttgtttaggtttttgtttttatttgtttttaggggtatatggagtatttggatatttgttgtgatgtttattaatattgtttttttgttattaggataggatgtggtatttataatggaagaaaatggagtattgtgtggtgggaagggattatgtgggtgggaatattgggaggtttaggtttaggattttggtatattatagtggtgttggggagaagaggttttgagtgagggtaggggatggtattgagagttgttaggaggtggtttattgtttagtgttttgggggttttttaggttgggttgggttgtggagaaggggtgtaagtggttatgattttgttttttgtagtttttggtttttttatgtttggagggtttttatttgatttagtttaattttgtttgttaggtgtttggggataagggaagatttggtttgttttgatagaaaatggggttttagtatttgttgggtgatttgtgggagtaggtaaaggagggtttttaagtttgttttgtagtattggggtagggaatagatttaggattttgggaatttttttttgtttagttttgtttgtttgttagagtagggtttgtggtttgggtgttgtgattgtttgggggtgggggaagggtaagggaggtggatttttgaagttttgtttaattttgtttttgattttttaaggttagagagggttagttgggtgggggttatggtttaggttttttggaaatagatataatgatttgggagggggtggtgttgagaataaattagggttagttgggggttgtggttttgtgtttttgggttgggaatagtttggtttggtgtttaggggtgtgagggtgttttggagatggatggtgtgtttgtggtgagtgttattggttttgtatttgttgttttattttttgtagtattttttgtatgtgttttagttgtgggtggagataatttggtgggtgagtagtattgtggaggagtatttttgatgtttgtttttgttgtttttgttgttttatatatttttttattttttattttgataagttttttagttttggtgtttggggtgggtagtggtaggattgggatggggttttttatgtggttgttttgggttagtttgttgtgtggggtgggggggaggatgggtggggtggtgttattgggaggtttagtgtgggttggtgatgtttggttt

SEQ ID NO: 3331 - DNA, 2284 bp, Artificial Sequence
  chemically treated genomic DNA (Homo sapiens)
aggaatattaaatttattagtttgtttttttttttttttggggtagagttatattttgtgtaatatgtattatatttttatttgttttttgattagtataaaaattaaaatatatatatatatgtatatatttatatatagatatatatatttattaagagagattaaataaagaagaaaattatgtttattggttagtagaaagatttgttattattaaggaatatgttttggtgtatgtggggataaaaagatattttgtggtttaataggttagtaagttttgtattgataaaagtaaatgggtgtttattttggttaatatggtgaaattttgtttttattaaaaatataaaaaaaatttagttgggtatggtggtgggtgtttgtagttttagttatttgggaggttgaggtaggagaatggtatgaatttgggaggtggagtttgtagtgagtagagatggtattattgtattttagtttgggtgatagagtgagattttgttttaaaaaaaaaaaagtaaatgggtgttttttttataaggtaggttgatttttagtatgagatgtgtattgtaaagtaataagaagaatttagatatttggtgttttttttttttttttttttttaatttatgtggtggtgaatgttttgtatggggtatttttttggattaagtttttagggtatattattaggggttggggtagggaattaaaaattgtagtagttagtttttaagagtttttttaatttgtgaaagttgatgtttttattttagttgttttatttgtttttttttttaataatttttttatgtaatttttttttatttttgtttgtgtttgttttgatgtggtttataattatggttttattgattttgtttttgtgttataaaattattttgtgtttgtgatttgttttatggtattttttaagaagtggttttaattttttttgggataggtatattattatgtattatagggtaggttaggttgtaggaggagtttgtagttttggaggtttttggttttttttttattttgttgtttgttttttagtgattagttggaatttaagatagtaatataagatgtgttgttggtgggagtgatggagtgtttgttgagtgggttgtagataagtattgtgattttggaggatgttttattattttgttgtaagaatatgttaatgggtgattgtttgaatgtttttagttaataggatattatttataatattttggttagttggaatggaagatgataagaaattaaatttttaatggttttttttaagggaggattttttttaggggaattaggaattttgggaaattgttttatgtattttggtaatatttatatggagagaattggttttaaatgaatttttgagggttatataaagggtaaaagaaagagaataaaaagtaattgatattaattgggtttttattatgtgttaagtatttagatattttatttatattatgttattttattttggttttgtttttgttgtgataaggtattattaagtttattttagaattgggaaaattgaggtatatagaggtgagttgatttggttaaggttttatttttggtgttggagttatgatttatattttaaagtaatattttttttgtgaaatgaattatggagagagaagttgtttgggagaagtagtttttatatgtaatttgaaaggtggagaagttatagttgtatagaggtagttgtagtaggtgtagagggaaggtgagggttgtgtaggtggtttttattgatgtttgggaattatttattttttggatatttgtagttaatattatttatgaatattttttgtggtttttgagtttttgtattttttggaagtttttttgagttttgttttttttgtttttttaataagtaaggaagtttttgattttatgtattaaatttttttttgtttgaaatattgagaagaatgatagaattttgtttgtaaagtattttgtgtaagtattatatatatgtatggtatatatatatatatatttaatttataaaggtaaatttttaagaatagaattataggttatatatgttggggatataagatattataatgataatagtaatagtatggtttttttttttaatatggaaattatttttggaataatttttataagtttgggaagaaagagattatattattttttattaataattgttttttatatataatgaaattttttttttagataaataggatag

SEQ ID NO: 3332 - DNA, 2284 bp, Artificial Sequence
  chemically treated genomic DNA (Homo sapiens)
ttgttttgtttatttagaaggaggattttattatgtgtaaaaagtagttgttggtaaaaagtagtgtggtttttttttttttaggtttgtagaaattgttttagaaatggtttttatgttggaaaaaaaaattatattgttattgttattattgtaatattttatgtttttaatatgtgtgatttgtaattttatttttgggaatttatttttgtgagttgagtatgtgtgtgtgtgtgttatgtatgtgtgtaatgtttatgtagggtattttgtaagtagggttttgttattttttttagtattttaagtaggaggggatttgatatatagagttagaagtttttttatttgttggaaagatagggagagtaaagtttagaaaagtttttaggaaatgtggaagtttagggattgtaggaaatatttatgggtaatgttggttgtaggtatttaggaaatagatgatttttaggtattaatagaagttatttgtataatttttgttttttttttgtatttgttgtagttatttttatgtgattatggtttttttattttttaaattgtatgtgagggttattttttttagataatttttttttttataatttattttatgagaagaatattgttttagaatgtaaattgtgattttagtattagaaatgagattttggttaagttagtttatttttgtgtgttttagtttttttagttttgaaatgagtttaatagtgttttgttataatagagatagggttaggatgaagtaatgtgatgtaggtaaaatgtttaagtatttggtatgtagtagggatttggttaatgttaattgttttttgtttttttttttttattttttgtgtaatttttagaggtttatttaaagttaattttttttgtatagatattgttagggtatatggagtgattttttagggtttttggtttttttgggaaaagtttttttttaaagaaagttattaaggatttaattttttattattttttattttaattagttagagtgttatgaataatattttattagttggagatatttaaataattatttgttaatatgtttttatggtgaaatgatgaagtgttttttgaaattatggtgtttatttgtggtttatttagtaggtattttattatttttattaatgatatattttgtattgttgttttggattttaattaattattgaggggtgggtagtggggtgagaggagagttagaagtttttaggattgtaagttttttttgtagtttggtttgttttgtggtatatagtaatgtgtttattttagaggggattgaagttattttttgagaaatattatgaaataaattataaatatagagtgattttgtaatatgaaaataaggttaataaaattatgattgtgaattgtattaagataagtatagataaaaatgaagaagagttatgtagaggagttattgaaaaaaaaggtaaatgaaatagttaaaatagaggtattaatttttatgagttagaggagtttttagagattggttattgtagtttttaattttttgttttagtttttagtagtgtgttttagaggtttagtttagagagatgttttatatagagtatttattgttatataggttggggaaaaaaaaaaaaagaaaatattgaatatttaagttttttttgttgttttgtaatgtatattttatgttaagggttaatttattttatgggaaagatatttatttatttttttttttttgagatagagttttgttttgttgtttaggttggagtgtagtggtgttatttttgtttattgtaagttttattttttaggtttatgttatttttttgttttagttttttaagtagttgggattataggtgtttgttattatatttagttaaattttttttgtatttttagtagagatggggttttattgtgttagttaggatggatatttatttatttttattagtgtaaggtttattaatttattgaattatagaatgtttttttgtttttatatatattaaaatatattttttggtagtgatggatttttttattagttagtgagtatagtttttttttttatttagttttttttgatgaatatatatatttgtgtgtgaatatatatatatatatatatattttaatttttatattggttagagagtaaatggaagtgtgatgtatattgtataaaatgtagttttattttaaggaaagaggaaaataagttaatagatttggtgttttt

SEQ ID NO: 3333 - DNA, 2519 bp, Artificial Sequence
  chemically treated genomic DNA (Homo sapiens)
gtagaggaaagggaagatgattataggattagtttattttggaatagatttttgaagggttggatttggggttaaggaataggagagaaaagttttttttatgtattttggtataattatagtgatttttaataattattgtttttttagtaaaattgttgaaatttagaataatattttttaaattagttattaggggaaagggtaattaattttttttttttttaaattgtttaattatatgaattaatatatagaaaattatattgtagtgtatattgttttttagtaggtgtggtggtatggaaggatgtgaatgattttgggagtggtgggtgaggagggaaggggagtgagtgggtgtgaggtgtttgtgtttttttggggtttgggagggaaagggagagggtgtgaggtgtttgtttttttggggtttgggagggaaggtgagtaggtttaaggtgtttgttttttttggggtttgggagggaaggagagagggtgtgaggtgtttgttatttttagggtttgggagggaaggggagtgggtgtgaggtttttgttgttttgtgaggttgtggagtttgttgtgtttttttttttgtttattttttgatttgtaggtttatggtgtttaaggtaatagggtttttagttttggaattaattttttgggttttggaatgtaatttatataaatttggattttgttttttattggtggggagttgtttttgtatgtagatgtggagaagttgtttttatttgtagttttttttgtggatttaggttgttttttttatgttttttttggagtttttagattttttgtggtgtttttggtattgtttttattgttttatttataaagagttttagtttttttttggggggtgatttttttagttagttgttgtatagtatgtggttattttttgtgtttttgttggtggggttatttttgggttatgaagataaaggtgtaaatgttgggttaggtgggtatagtttttgggagggtgagggggatggtagggatatgggggttgtagtttatagtgaaggtgggggagatagggtgagagggtgttgttggaggtggggtgtgagggatggtttgtgatattttgggattgtggggtagaaagtgtagttttaggggaggttggggttagaggtgaagtttgtggggagggtgagatttgggtgtaggtgtttataggtgagggtggggtttaggttttagttgggttttgagttttggtttaggtttttatttgtggttttggttttaatttgaggtggagtttgggattaaagtttagatgaggttttttgtttagggtttgtgttggggattggggtggggatttgtattttgggttagtttgggtgtattttattgggattattggggtgggggatatgggttgggtggttttttgggagaagagggatagggagtgtagttggtggagaggataagaatgaggggtgtagtttatttagagggttataatagagttttaggtgttgagttttatgtgttagatgaggaaagataatggaagagtttaggtttttgttggggtttgagttttagtttgggatttggtttatggtttattttttgatttgagttggggtttggggttaaggtttaggttaggatttgagttttgggttgtagtttgggggtggggttaggttttagagtgagggtttgggtttgtttgtgttgtgtatgtttgtgaatgtattgggatgttattgtgtgtatttatgttatgtgtgtgtatgtattagtgtgtgtatgtgtgagtgtttattgagtgtggtattgatagttaatttttttttttttatttatgttttattgttttattttggttggggtgggttttataagttttttttttgggttagttggaggtttttatgttgtttggggagagaagggaaggagagaataggttaaagatgagggtagtttggttttaattagatttggtgttatggggattaagaagttggaggtttttgttttttgtttttggaggagtttggtttgtttttttgtttatatattgtgtgaaagtatagttgggggtatttgatatgtataggatttgtttttgtttttgtagatgttttagagaataggatagataaggggtttttttagtaagttatttttaatgtgtattgtatgttagtttataagaggggtataggggttttattaggtagtagggaggatgtaaggaagagtgtgtggggatgggggtgttgggtggggttaggtgagtgggtgtttggtttttttttagagtaaaggaaagtgttgaagagtgtgaaattgtgtgatatgttatgttttatgttttgagaatggattgtaggaataagtagatatgggggatttgatgagggttaatgggatgtttatagagataagatttggtttgagttggtgggaaaagtggagatggagttatatggaggaaattgtagagttt

SEQ ID NO: 3334 - DNA, 2519 bp, Artificial Sequence
  chemically treated genomic DNA (Homo sapiens)
agattttgtaattttttttatgtggttttatttttattttttttattagtttaagttaaattttatttttatggatattttattggtttttattaggttttttatgtttgtttgtttttgtaatttatttttaaaatataaagtataatatgttatatagttttatattttttagtatttttttttgttttgaggagaagttaggtatttatttatttggttttatttagtatttttatttttatatatttttttttgtattttttttgttatttgatggggtttttgtgttttttttgtaagttgatatgtagtgtatattggggatggtttattgaagaggttttttgtttgttttgttttttaagatatttgtagaggtaagaatagattttgtgtatattagatgtttttaattgtgtttttatataatgtgtgaataaagaagtaaattaagtttttttagaggtaggagataaggatttttggttttttggtttttgtgatattgggtttggttgaggttaagttgtttttatttttgatttgtttttttttttttttttttttttaggtaatatgagaatttttaattggtttagggaaggaatttgtaaagtttattttaattaggataagatagtggggtataaatgggaggagaggggttggttgttagtgttatatttaatgaatatttatatatgtatatattgatgtgtgtatatatgtgatataagtatatatggtgatattttaatatatttataaatatatataatataaataggtttaaatttttattttgaaatttaattttatttttaaattgtaatttggaatttaagttttagtttgaattttgattttaaattttaatttaagttagaaggtaaattatgggttgaattttgaattggaatttaaattttagtaggaatttgaatttttttattgtttttttttatttggtgtatgggatttagtatttgagattttgttgtggttttttgaatgagttgtgttttttgtttttgttttttttattagttgtgttttttgtttttttttttttaaggagttatttggtttatgttttttgttttggtggttttgatgagatgtatttaggttgatttagggtgtaaatttttattttaatttttaatgtaaattttgaatgagaggttttgtttaaattttaattttaaattttattttaaattggaattggaattatagatggaagtttgaattggaatttaaagtttagttggaatttgaattttgtttttgtttgtgagtatttgtgtttgggttttgttttttttatgagttttatttttgattttgattttttttagaattgtgttttttattttgtagttttagggtattgtaagttgttttttatattttatttttagtaatgtttttttgttttgttttttttatttttattgtgagttgtagtttttatgtttttgttgttttttttatttttttgggagttgtgtttatttgatttggtatttgtgtttttgtttttgtggtttggaagtggttttgttggtggaagtatgagaagtggttatgtgttgtatagtggttggttgaggaagttgttttttgagaagaagttgaggttttttgtgagtggggtagtgggggtggtattaggagtgttatggagggtttggggattttgggaggggtgtgggggaggtggtttgggtttatgggaggagttgtgggtggaggtgatttttttatgtttgtatgtgaaggtgattttttgttagtgagagatagggtttaggtttgtgtgggttgtgttttgagatttagggagttgattttagggttggggattttattattttgagtgttgtgggtttgtaggttggagagtgggtgggaaaggggatatagtaggttttgtagttttgtaaaatggtaggaattttgtatttgtttttttttttttttaggttttgagaatggtgggtattttgtatttttttttttttttttttaggttttaaggaaggtaggtgttttaaatttgtttatttttttttttaagttttgagaaggtaggtattttatatttttttttttttttttttgggttttaggaaaatgtgggtattttgtatttgtttgttttttttttttttttatttgttatttttggggttgtttgtgtttttttatgttattatgtttgttgagggatagtgtgtattgtagtgtagttttttatatattaatttatgtggttaaatgatttagaaaaaaagaagattggttgtttttttttttagtggttaatttgaagagtgttgttttaaattttaataattttattgaggaagtggtaattgttaggagttattatgattatattaaggtatatagaagaggttttttttttttgttttttagttttaggtttagttttttaagaatttattttagaataagttgattttatagttatttttttttttttttgt

SEQ ID NO: 3335 - DNA, 2452 bp, Artificial Sequence
  chemically treated genomic DNA (Homo sapiens)
gaatattttatttaaaagaaggtttttttatagagtatattaggatggatttttagaattattggttggttgtattttatttttaggtttttgattggagatttttttatgtattgtttattgatttttgtggttgaaagttttgttgttttagttagatggtaaattatattttaaggatagatatttgttatatatgtttgtgttttttagagttgtatttagtatagagttggttataaagtggtttttttaaatttttgtggttttagtttaataaatatttgtaattttttatagttgaataaagatgaatgattttaatttgtttaagttaggttggattttttttattttgattatatatttggttttataaagtgttgagtgataggaagaaagaatggtttttattggttgagttgaagggttttgagtatattttttttaatagtataatttggttttttgatataaaaggtagggaaaggaaggggtagtggtttttaatgaatagagatggatggtggttgggtttttgttgttattgttgtgtttattgggtagattagttatattttttggtttaggttaaagattagggtagatgatatatggggtatttataggagagttgtgtttagggttttttgttggttttggaattttttagaatggttttttatatattttttgttttttttttttttttttgttttttttggaattttttagagtgggtttttatatatttttttttttttttttttttttgttttttttttttttttagtgaaaggatttttttggtaagagtgttaggttttagttgtttgtgttttgggaaattataagattttttttttttttttttttagttaggattatatatgtagagttatttggtttttttggtttgtgtagttgttgttggttgggttgggggattatgttaggtagtttagttagaggtgagttgggttataggggtgagttgttaggtttgtttatttttttttttggtgtgatttttttaagtttaatttttagggattttttttaggaatgttgagagtattagttgttttggttatgttaggtatttggttattaggtttttttttattttaggggtaattattgttagagggaaaaatggaaatattaggttatttgtgatttgtatatttattttttgtttagagagataagtaggaggttaggggaatagatgggattgtgggaatagttaagggtagagggtgaagggtggtgattagaaggaaagatggaatgtttatatattttttgttgtttttggttttagttgtggaggaagtggggtttggaggatattgtattagataggttttgtttagaaaattggaaaagaataaatattgattataagagtgtaggagaatgggtttttttattattaaaaataggtatttagttaggtgaagtgatttatgtttgtaattttagtattttgggaggtaaaggtaggaggattgtttgggtttaagagtttgagattagtttgggtagtatggtgaaatttagtttttataaaaaatattaaaaattagttgggtgtggtgatgtgtttgtggttttagttatttgggtggttgaggtgggaggattgtttgggtttgggaggttgaattatgtttatattatggtattttagtttggatgatagaatgagattttgtttttaataataatagtaataataataataaaatatatatttattagttatgattttgttttataggataattggggtaaaaatgtttttgggtgaaattgggtaatttaatttgaaaggtttgggaaatatggtttaattttagttttgtttgttatttataggttaagtggaggttgtggtttataatatattggatattagatattattaatgtttttattttataaatgggaaaattatggttgagaggttatttgattttttaagtttatttagagatgtggggatgggttgagttttagagtttgggttttgttttgttttattttatatagtatgaagttttttggttaattaaggaaggagtgtaaggtgattgaagaaaataaaaataaatagaattgatataaaaaataaataaataaaattgagtgttaaagaaggagaatttgggggttgaggttgtggttgtagagtgggagtggggataattaatgttgggtttttgagtgtttttggaagggtgggttttggtgtttagagtgtttggtgtttattttttttttttttttagggtttttgtttgagagtttttttatttatttttggttgttggggtatttgatattttttaaaatataatttttatatttttaatagtgggttgtggaggagttaggattagagtttttagtttagatttttttttttgaaaggatatggttttag

SEQ ID NO: 3336 - DNA, 2452 bp, Artificial Sequence
  chemically treated genomic DNA (Homo sapiens)
ttaagattgtatttttttagggaaggaaatttgagttagaggttttgattttgatttttttgtagtttattattaagggtgtgaaaattgtgttttggaaaatattaggtgttttagtagttaggagtgggtagaagagtttttagataggggttttgggggaaaggggaaggtgggtattaggtgttttggatattagggtttgtttttttagagatatttaggagtttagtgttgattatttttatttttattttgtagttatagttttagtttttaaattttttttttttggtatttagttttgtttgtttgttttttgtgttagttttgtttgtttttgttttttttagttattttgtattttttttttagttggttagggaattttgtgttgtatggggtggagtagggtaaggtttaggttttggagtttggtttatttttatgtttttgagtgaatttgggagattaggtgattttttagttatggtttttttatttgtagaatgaaggtattagtgatgtttagtgtttagtatgttatgaattgtaatttttatttggtttgtgagtggtgagtgaggttgaaattgggttatgttttttagattttttaaattaggttatttagttttatttaagaatatttttgttttaattattttgtaaagtagagttatagttagtgagtatgtattttattattattattattgttattattagaaatagggttttattttgttatttaggttggaatgttatggtgtgaatatggtttgattttttgggtttaagtaatttttttattttagttatttgaatggttgggattatagatatgttattatatttagttaatttttggtattttttgtagagattgggttttattatgttgtttaggttggttttaaatttttgggtttaagtgatttttttgtttttgttttttaaagtgttgggattataagtgtgagttattttgtttggttgaatatttgtttttgatgatggaagggtttatttttttgtatttttgtaattaatatttgtttttttttaattttttaaataagatttgtttggtgtaatgttttttgagttttgttttttttatggttggagttgggagtggtagggaatgtgtgggtattttgtttttttttttgattgttgttttttattttttgtttttggttgtttttatagttttatttatttttttggttttttgtttgtttttttaaatgaggagtgagtatgtagattataaataatttggtgtttttgtttttttttttggtggtggttgtttttggagtggaaggagatttggtggttagatgtttgatatggttgggatagttggtgtttttagtatttttggggaaggtttttggggattggatttgaggggattatattaagaagaggggtgagtaggtttggtagtttatttttgtgatttagtttatttttggttgggttgtttggtatgattttttggtttggttggtagtagttgtgtaggttaggggagttaaatggttttgtatgtgtaattttagttaaaaagagaaaggggaaagattttgtaattttttaggatatagataattgaaatttgatatttttgttaaggaagtttttttattgagagagagagagagatagagaaggagggagggaggggagtgtgtgagagtttattttggaaggttttgggagagatagagagaaggagggagggtggggagtgtgtgagaggttattttggaaggttttggggttagtaggaagttttgagtatagtttttttgtgagtattttatgtgttatttgttttagtttttggtttgagttaggagatgtggttggtttgtttagtgggtatagtagtggtggtagaggtttggttgttatttgtttttgtttattgggagttgttgtttttttttttttttgttttttgtgttagggagttagattgtgttgttgagaaaaatgtgtttgaagttttttaatttggttagtaagagttattttttttttttgttgtttagtgttttgtaaaattaaatgtatgattagagtggaaggagtttagtttgatttgaatgggttagggttatttatttttgtttagttataaggaattgtaggtgtttgttaggttaaagttatagaaatttggggaggttattttgtgattagttttgtgttgggtgtagttttgggggatataggtatgtatgataagtgtttgtttttgaggtgtagtttgttatttggttggagtaataagatttttagttataaggattagtgaatgatatatgaaggagtttttaattaagaatttgaaggtgggatatagttagttagtggttttgggggtttgttttggtgtgttttgtggagaagtttttttttaggtgaaatgttt

SEQ ID NO: 3337 - DNA, 2410 bp, Artificial Sequence
  chemically treated genomic DNA (Homo sapiens)
taagtagggtatatgtgatttttgttagttaaataaataattttttttaggttttttttgtttttgtagagatagggttttgttgtattgtttagtaggagtgtattaatggggatttatagattattgtagttttgaatttttgggtttaagtgatttttttattttagttttttaagtaattgggattataggtttatattattatatttagttaattaaaataaaatgtttggataggtatagtggtttatatttgtaattttagtattttgggaagttgaggtgggtggattatttgaggttaggagtttgagattagtttggttaatatggtgaaattttgtttttattaaaagtataaaaattagttgggagtggtggtaggagtttgtaattttagttagttgggaggttgaggtatgagaattatttgaatttaggaggtagaggttgtagtgagttgagattgtgttattgtattttagtttggatgatagagtaagattttgttttaaaaaataaataaataaaaaaataaataaatttttgtttagtttgggtgtagtggtttatatgtgtaattttagtattttgggaagttaaggtgggtagattgtttgagtttaggagtttgagattagtttgggtaatatagtaaaattttgtttttataaaatgtataaaaattagttaggtatagtggtgtatatttgtagtatttgtagtggaaggtttaggtaggaggattttttgagtttgggaggtagaggttgtagtgagttgagattgtattattgtattttagtttaggtaatagaataagattttgttttaaaaaaataattttttttttttttttttttgtagagatggggttttgttatgttgtttaggttggttttaaattgttaattttaagtaatttttttattttggttttttaaagtgtagggattataggtgttagttattgtgtttggttttttttagggttggtgaaattttttgttgtttattttggtttgaggaggtttaggggttttggagggggattagtagaggtaggtttttggttgagggagagtgagggtgtgtttaggattttgtgggtgtggttagtatttggtgaatgtatagttgatttgtaggtttagtttttggtgagtatttattgagagtgttttgttgtggttaggtttgtttaggtaggttatggtattatagatgtttgtgtttgtgatggagttaaatttggtttggaatatggtttttttgttattatgggttttgtttatgatgggtagaatagtattaagaatttgggggtggggagtggttagttgtgatttattttttagatttttgttatagttttttattttattgtgaagtttggttttttttaggaaagaatatgtgtgtttggtttttttttttgtttttgttagatttttttttatttttttttttgtatttgttagatttttttttatttttttgtttttttagaagttttgagtattttataatattttattatatggttttttttatttttatttagaaatatatttgaatattttttttttatttttgtttttttttttaattttttgtttttatttttattaaattaggaaatgttattgttaagtatatgagggattttttagtttttaaatttattttatgtgatatgattttttgttttttaggagggagggtttggaggggtgggtggaaattttaagaggttgaagaaaagatagggaaggaaaaaagaatgaaggggaaaggaaatgggtaagagtaggaaggttatgggtggttttagtttgtggtgggggtagtttgggttaaagtatagtaggggttttggagttgagatttattaggaaggttgtgtagtgggattagggttgttgttggagtttggttatgtagtttttttattgggaataagtggttttatttttgaagggagaaagttttatgagttgtttttattttttatttttagatgtaaaggtttttagggaggagttgttttgtaggggaggagagggtatttgggaagagatagagtgtgattgtatttgttgagggtgttgtattgtaatgttaggtgttttagttttgttttattgattagtttttgagttatgggtgagagttgggggtataggagtatgggggtgatttatagaataatagtttgaagggtattaagtgagattagtagttatggttattgtgagggtattatggttggggtaagtatggggtatggggtgtgtatagggagtagttgttatttgtttttttgtagggtttttagggttggttggaggtaggaggtattttggatgaggtaggagatgagtagagtgaggtttgtaaaaggagt

SEQ ID NO: 3338 - DNA, 2410 bp, Artificial Sequence
  chemically treated genomic DNA (Homo sapiens)
gttttttttgtaggttttgttttgtttattttttgttttatttaggatgttttttgtttttagttaattttgggagttttgtagagaagtaggtggtagttgttttttgtgtatattttatgttttatgtttgttttggttatggtgtttttatagtggttatgattgttggttttatttggtgttttttagattgttgttttatgggttgtttttgtgtttttgtatttttagtttttatttgtggtttaagagttggttagtgagatagagttgaggtatttggtgttgtagtatagtatttttagtaaatgtgattatattttgtttttttttagatattttttttttttttgtagggtggtttttttttgggggtttttgtatttgggaatggagaatgggggtagtttatggggttttttttttttagaaatgaagttatttatttttagtaaggaagttgtgtggttaggttttggtggtgattttagttttattgtatggtttttttagtgagttttggttttaggatttttgttgtgttttagtttgagttgtttttattataagttaggattatttgtggtttttttgtttttgtttatttttttttttttttatttttttttttttttttgttttttttttagttttttaaaatttttatttatttttttaaatttttttttttagaaggtagggaattgtgttatatgggatgggtttggggattaagaggttttttatgtatttggtagtagtattttttgatttggtggggatgaaagtagaggattagaagagagggtgggagtaagaagggagtgtttgagtatgtttttagatgggagtaaaggaagttatgtggtggggtgttgtggagtgtttagggtttttggaaaggtagggggatagaggagggtttggtaggtgtaggaaaggggatagaggagggtttggtaggggtaggagagggagttgagtatatgtgtttttttttggaaggaattaggttttatagtggggtggggagttgtggtagggatttgggaggtgggttatagttggttattttttatttttaggtttttgatgttgttttgtttgttatgaataaggtttatggtggtgagaagattgtgttttgggttaggtttagttttattatggatatagatatttgtaatgttatggtttgtttaggtgagtttgattataatgaggtgtttttagtggatgtttgttaggagttggatttgtgaattggttgtgtatttattaggtgttggttatatttgtagagttttgggtatatttttatttttttttagttagagatttgtttttattggtttttttttggggtttttaggtttttttgagttaggatgagtaataggggattttattaattttgaagaaggttaggtatagtggttaatatttgtaatttttgtattttgggagattaggataggaggattgtttgaggttggtagtttgagattagtttgggtagtataataagattttatttttataaaaaaaaaaaaaaaaaaaattatttttttgagatagagttttgttttgttgtttaggttggaatgtagtggtataattttagtttattgtaatttttgttttttaggtttaagagatttttttatttgagttttttattataggtgttataggtgtgtattattatgtttggttaatttttatgtattttgtagagatagggttttattgtattgtttaggttggttttaaatttttgagtttaagtaatttgtttattttggttttttaaagtgttgggattatatatgtgagttattgtgtttaggttaaataaaaatttatttatttttttgtttgtttgttttttgagatagagttttattttgttatttaggttggagtgtagtggtataattttagtttattgtaatttttgttttttgggtttaagtgatttttatgttttagttttttaattagttgggattataggtttttgttattatttttggttaatttttatatttttagtagagatggggttttattatgttggttaggttggttttgaatttttgattttaggtgatttgtttattttagttttttaaaatgttgggattataggtatgagttattgtgtttgtttaaatattttgttttaattagttgggtgtggtggtgtgagtttgtagttttagttatttgggaggttgaggtgggaggattatttgagtttaggagtttaaggttgtaatgatttgtgaatttttattaatgtatttttgttgggtaatatagtaagattttgtttttataaaaataaaagagatttaaagaaaattgtttatttagttgatagagattatatatgttttgtttg

SEQ ID NO: 3339 - DNA, 2424 bp, Artificial Sequence
  chemically treated genomic DNA (Homo sapiens)
taaggatttagtaaattttagttattgtttttattaggttgttaatataaatgtttgatgagtgaatgaatgatttttgtttgggatttggttgtaaataaagttgagttgtattttagggaggggtggagattttgtttttgtttgtgttttgaagttagtagggttttgttttaggatatttttatttatttttttgtttagtaagtggaggtgaggggtgtggtttggggttttttgggaggttatggttattgggttatttggagtttgtgtttatatgaggtttggtagagggaggtttttggttatttatttttgtgtttgggtttattattattggtttttgtgttttttggattttgttttgtatgggttgtattttttttgttggtttttgtttatgttttagttttagttttagttttaatagtggtttttttttgttttttttttgatattttttttgttgtttaggtttgtagtttgagtgttgttgttatggttttgttgtagttttgttgtgtgttggtgttggtgtaatgggtggtggaggtgttgtgggttttgtgtgttgggtagtttttgtagttgttggatgttttttggtatttgttgaagttggggtgtgatgtgtgatgtgagtttgaggagtgttatattttgggtgttgttttttttgatattgattagtgtagtgattgtattttgttttatgattatatgttgtttggggttgagtattttgtggagtatgtaggttgtttgggtgtgggtgtggttatttatgttgtgatttatgatgttagtgattagggtttttattttgttttgtgtgtttggtggatgttttgtgtttttggttattatgttgtgttattgtttgatggtggtttttgttattggttgtgttagaattttttgtttagttttggtaagagttaatttgtttttgttgagttttgtgtttagtttgattttgtttttattaagatttatgaggatattaaggagaatttggaattttggtgtttttaggtggtggatttttgagttattggtaggttttgtggtattgagtttgagttttgagatggtaatgtgggggaagggggtaggaggttgttgggggtgtggtttttatgttttgagtagtgttttggatttgattttttttttatttttttaatttattttgtttttattttttttttttttttttttttttttttttttttttttttttttttttttttttttttttttatttttgttttttttttatagggtttggttttattgtttaggttggagtgtagtggtataattatggtttattgtagttttaattttttgggtttaggtgattttttttgtttagtttgattttgtttttaaaggttattgtatgaggtggggaaggagatttgatttttatttgttttggtgattttgtttgttaagtagaattataatattggtttttttttttttgtgttttgggtagtgattttttttagtttattgggaattttggttgtttaaatagtttttaatttaatattagaggtgtggggggttattgtggaatgttggggggtaggttttagtatgagagaaaaatttagagggatggttttgattagggttatttatgtttttgaggatggtggaatgaaggtagagttgggggttgtataaaggaaagttttttttagggattaaagtttggagaattgagggtggaagggggattaaatagaagtgggtagggtagagttttttgtttgtgggttggatttttttaggtaagaagtttgtgggtaagttttgtataatgtgaggaggagtttttataaagtaggttggttagtggttatgttagtgtgagttttttaaatattttgtgtaagtagatattgttattgtatagaggaggaaatggaatttggtttaaggttttaagaaataatttagttgggatttagatttggtagtttgtgtatttaatagttgtgagtaattaggaattttttagtttttttttttgtgtttttaagagtgtaagaaattgattattgtttttagagagttttttgaagagtatttttatggttatagattgggtttggagttgtttgggtttattatgggttagtattgttttggatggtttgagggtaaggattgtttttgttttttatgtattttgaagattagtttagtatttggtatagagttgatgttttagagaggtttggtgaatatagaaggtttttgttgtatggaattttgtaaagtaatgttggtgttattggaattataggaaatagttgatatttaattatttttgaatttatataggtgttagttttatgtggtttagtttaatgagagtattattttaattttgttgggtttttt

SEQ ID NO: 3340 - DNA, 2424 bp, Artificial Sequence
  chemically treated genomic DNA (Homo sapiens)
ggagaatttaataggattaaggtggtgtttttattaggttgaattatatgaaattgatatttgtgtaggtttaaaaatggttggatattagttgttttttatggttttggtaatattaatattgttttgtaggattttatgtaatagggattttttgtatttattaaatttttttggaatattgattttgtgttaggtattgagttaatttttaggatgtatgaagagtagggatagtttttgtttttaggttatttaaaataatgttggtttatggtgagtttaagtggttttaaatttaatttgtagttatgggaatgttttttagagagttttttaggggtagtggttagttttttgtatttttgaaggtataagagaaagggttggggagtttttggttgtttatggttgttaagtgtgtaggttgttgagtttgaattttggttgggttgttttttgagattttgggttaggttttatttttttttttgtgtaatgatagtatttatttatatgggatgtttgaaagatttatattagtgtgattattgattagtttgttttgtggggatttttttttgtattatatagagtttatttataggttttttgtttgaggaaatttagtttataggtagaaggttttgttttatttatttttgtttaattttttttttatttttagttttttaagttttggtttttggaagagatttttttttatgtagtttttgattttgtttttattttattatttttaggggtatgggtagttttgattaggattatttttttgggttttttttttatattggggtttgttttttaatattttatagtgattttttatatttttagtgttggattgagagttgtttgggtaattagggtttttaatgagttagggagagttattgtttaaagtataggaggggaagggttagtattatggttttgtttaatagataaagttattgaggtaagtggaagttaaatttttttttttattttatgtagtggtttttaaaggtaaggttaggttgagtggggagggttatttgagtttaggaggttgaggttgtagtgagttatgattgtgttattgtattttagtttgggtggtagagttagattttgtgaaaagaaggtaagggtagggaaaagggggaaaggagggaagggaaagggaaggaaaggaaagaaaaaaggaaaggaaatgaaagtaagataaattaaaaaaataaaagaaaggttaagtttagggtattgtttagggtgtagaggttgtgtttttgatgattttttgttttttttttttgtgttattgttttggggtttgggtttggtgttgtggaatttgttagtggtttgggagtttattatttggaagtgttgggattttaggttttttttgatgtttttgtaggttttgatgaaggtggggttgagttgagtgtggaatttggtgggagtaggttggtttttgttggagttgagtgggaggttttggtgtagttagtggtggaggttgttattaagtagtgatatggtgtggtggttgaaggtgtggaatatttattagatgtgtggggtggagtagaggttttggttgttggtgttgtagattatgatgtgggtggttgtgtttatgtttaggtggtttgtgtattttgtgaaatgtttggttttgggtagtatgtggttgtagggtgaggtgtggttgttgtattggttgatgttgaagaaagtggtgtttgggatgtggtgttttttgaatttgtgttgtgtgttgtgttttagttttggtaggtattaggaggtgtttagtagttgtagaggttgtttagtgtgtggggtttgtagtgtttttgttatttattgtgttgatattagtgtgtggtagagttgtggtgaagttatggtggtgatatttgggttgtgggtttgggtgatagggaggatgttagaagggaagtagggagaggttgttgttggggttagggttggggttggagtatgggtgagggttggtgggggaggtgtggtttgtgtagggtagagtttagggaatgtagaaattagtggtggtgaatttgggtataaaggtgggtagttaggggtttttttttgttaggttttatataaatataagttttgagtgatttaatgattatgattttttggagagttttaggttatgttttttatttttatttgttgggtaggagggtgggtggaggtattttagggtaaggttttgttggttttaaggtataaataggggtaaagtttttatttttttttaagatgtagtttggttttatttgtaattaagttttagatggaagttatttatttatttattaagtatttatattggtgatttaataggaatagtagttggaatttattgagtttttg

SEQ ID NO: 3341 - DNA, 2313 bp, Artificial Sequence
  chemically treated genomic DNA (Homo sapiens)
ttatttttatttggagggtagtgtggtattttagggtgttatttttttagagttgtttgaggttagtagagaggaagtgttgtaggagttgtgagtgggtggtttggtttattattgggagtagttgttttgttgatgttggtagggtgtatttgttttaaataaagaatgattagagattatatttgtaatttttatgttatgagtagttgaggtaggaggattatgttaggttaggagtttgagattagtttgggtaatatagttaaagtttatttattttttaaaaaaatttaaaaattagttaggtgtgttggtatatgtttgttattttaattgtttaggaggttgaggtggattatttgagtttaggagtttgaggttgagtgatttattattatgttattgtattttagtttgggtgatagagtgagatttatttttaaaaaaaaattgttttagaaatgaatagttaggtttttaaagtttgttagtttttgagggttggggaaggtgggtgtttggagaatagttattttttggtttagtttggttagagtttgtattatagtgttttaggtttagttaggttgttagttttgggttgggaggagggtgaagggttggttaaggagatttttttttatattgtttttttatttttgtttagtagttgtaggagaattagtttttttgatatttagggggagaaatttagaattaagagtagaaggtagaaatgaaaggatttttttagtgaaaggttagagtggttttttttgtttttgtttaaaaatggtttgtgttgaattatgataaggttaaatgtattaaggtagtagaaatagggggagggtagggggagggtatggggatggtttttgagaaatagaggaataggttaggttgtagggttttgggggtagtatgtgttttaaaggtggtgaggggaggggtgatattattagggtagggtttagtttaggtatgttttggtggataggggagttgttaggattaagttggatggagttaggttgttttgtggtttttggggagggtttttagagggttgttgggtgaagggagttttttttaaaatggttttttgagttttgatgtatatatatgtagtttatttttaagtttagtgttttattagtttattgttttgttttttttagtatatttggtgtgtagttgtgattagtttaattgtggtatttttttattggttttgagttttggtgtgtttttttatgatattttttgggtatggagttgtgttgataggtttttgtgattggttgggtatgtttttggggtttgtttgtggggtagtgtgttttagagtttggttgtatgaagtggtgttgatgggtaaatttggttttgtttttttttttggtggttgagggttggttttgtgttttatttgttagtgatgggattgtgttgttgtggatgtttgtgttgaggtttgtgtgtggatagtgtttagattttttggttgtgtgtttgggtgtgtgttgggtttatggattttgtgtttagttttttgaggagttgttggttgtttgtagtggttgtattatatatgtttttgttagtgatgtggagggtttgattttttttgatttagtagtttatggtgtttgtttttagtggttgttggtgtgaggtgggtttgtgttttgtttagttgaggtttatgtttttttggtgtttggtgttttggtatgagtttattggttgtgtgtggtttttttttggagaaatgtttaaaggttttttgtttaattggtttttttttttttatggtggagttgtgggagttttgggtatattttgggtataggattttttagggatgtggtttgagagggagttttgtggtgggttgggtttgtgttttgtttgatttggggttgtgtgggtgttgattggggtggggttggtttttgggggtagtttagaagggtttttgtttattttttatatagtttaggattgtggtatagtagtttgtttagatttgttgtgtgatttgaattttgtgttttttgttttgtgttttttggggtttgtagtgttgtttggaagtttttttttgtttgttttttagttataggaggtttttttttgggttgtagaatttatagagttagatgttttttgggtttttagtgtttttttgtataagtggggaaattaggttatggggtttaggtagtgtggaaggtgttgtaggagttgtttagggtgtggggttttttagttttagtgaagagtggtattggggtttgttatagg

SEQ ID NO: 3342 - DNA, 2313 bp, Artificial Sequence
  chemically treated genomic DNA (Homo sapiens)
tttgtgataggttttagtgttattttttattgaggttggaggattttatattttgggtaatttttgtaatgttttttatattgtttgggttttatgatttagtttttttatttgtgtaggggggtgttgggggtttagggggtgtttggttttgtggattttgtagtttagagggaggttttttgtaattggagaatgggtaaggaggagtttttagatagtgttgtaggttttaggggatatagggtaggaggtatagggtttaggttatatagtaggtttgagtaagttgttgtgttatagttttgggttgtgtggggagtggatagaggtttttttgagttgtttttgagagttagttttattttggttagtatttatatagttttaggttaggtaggatataaatttagtttattataaagtttttttttaaattatgtttttgaaaagttttgtatttagaatatgtttagaatttttataattttattatgaagaggaaagggttgattaaataaggggtttttgaatatttttttagagaagagttatatatggttagtgagtttatgttaggatgttgggtattggggaaatgtgaattttaattgagtgagatatggatttgttttgtgttgatggttattgagagtaaatattatgagttgttgggttgaggggaattagattttttgtgttgttggtgggagtgtgtgtgatgtggttattgtaaatagttggtggttttttaaagagttgaatgtagagtttatgggtttagtatatgtttgggtgtgtagttagggggtttgagtgttgtttatatatagattttggtatggatgtttatggtaatatgattttattattaatagatggaatgtggaattagtttttaattgttggagggagagataaaattgggtttatttgttaatattgttttgtatagttaaattttgagatatgttgttttgtgggtaaattttgaaaatatgtttagttagttatagagatttgttgatataattttgtgtttaggggatgttgtggaggggtatgttagggtttagggttggtggaaaggtgttatggttagattggttgtggttgtgtattgaatgtgttgggaagaatggaatggtagattaatggaatgttagatttgggggtgagttgtatgtgtgtgtattagagtttaggaaattgttttggaaaggattttttttgtttggtagttttttgggaattttttttaggagttatagggtggtttggttttatttagtttggttttggtagtttttttgtttattggagtatgtttgggttgggttttgttttgatggtgttgtttttttttttattatttttggagtatgtgttgtttttgaggttttgtggtttgatttgtttttttgttttttaggagttgtttttgtgttttttttttgttttttttttgtttttgttgttttagtatatttggttttgttatagtttaatataaattatttttaaataaaaataagagaaattattttgattttttattgagaaaatttttttatttttgttttttgtttttgattttgaatttttttttttaaatgttagaggggttgatttttttgtagttgttgggtaggggtggggaggtagtgtgggaagaagtttttttagttggttttttgttttttttttaatttagggttggtaatttggttgggtttggggtattgtggtgtagattttggttaggttggattaaagaatagttgttttttaggtatttgttttttttggtttttagaggttggtaggttttgggagtttggttgtttatttttaaaataatttttttttagagatgagttttattttgttatttaggttggagtgtagtggtatgatgatgggttatttagttttgagtttttgggtttaagtgatttattttagttttttgagtagttggaatgataggtatgtgttagtatatttggttaatttttaaatttttttgagagatagataggttttagttatgttgtttaggttggttttaaatttttggtttgatgtgatttttttgttttagttgtttatgatgtgaggattataggtgtgatttttgattattttttatttgaaataggtgtattttgttagtattagtaagatagttgtttttaatggtaggttgggttgtttatttatggtttttatagtattttttttttgttggttttaggtggttttggaagaatgatgttttaagatattgtattgttttttaggtgggggtgg

SEQ ID NO: 3343 - DNA, 2410 bp, Artificial Sequence
  chemically treated genomic DNA (Homo sapiens)
aattgtttgggaaattttattatagtttttggggataagatttgtggtttgttttgttttgaggggtaggagaaaagggggtaatggtttgtaggggtagatgggtaggagtagagtagggggtgaaggtatatttagaatggtaaggaaggggggttagttgtgagatagtaggggaaggtttgttgttgggttttaaagatgtttggtagaaaaaattttaggttggaaaagtaagtgagagaagttggagggtggtatgtgggagatagttgggggtttatttttgtattgttagttttagttttttatttttatttggatgatgaggtttgagatatttttattgttatttgggagaggttttgggaagggaagattttatagagttatgaggggattaatttttttggtgaattaagttttttgatatttttagagttgtggtgttttgggattttagttttgaaggagaaaggaaggaaggaaaagaggaaaggtttatgtagataatttttttaggttgttgagttttaatagatagtttttgtttttgttttatttaagaagtttaggtttagaagatattaattaaggaaatttttgttaggaagtttggggtagggagagttgttggtttgattagggtatagttggtaaaagtttttataagatagttatttatagatatgtttaagaattagtatatagtttttaattagagatttttaaaatgaaatatttagggttatatataggaaaagtatgtatatatatatatatatatatatatagatatttatttttgtgtttttttggttatgttgatgagtttttttggtgaagtttggggtttatagagtaatttttgtagataattgtggtttttgtttttggtgtttgtaggaggtaggtatgttgtgtttttttaagatagatggtttagggtattttggtaggatttattaggaaatttatggagaagggaaaagggataagattagtaatagtgaagggagggagaatggtgggagaggattttagatgaatggtgggttgttggaggttgagtatgttagtaggatgttagtttttagagtaaagtttatgttaaatagttaatgtttgttttttttgtttttaggattatttttttgtatggggagtattttttatattaatattattatgtttttggtgtttggtattatttgttttttgggtattattgggaattttatggttatttttgtggttgtgaagaagtttaagttgtattggtgtaataatgtttttgatatttttattattaattttttggtagtagatttttttttttttttgggtatgttttttatgatttattagtttatgggtaatggggtgtggtattttggggagattatgtgtatttttattatggttatggatgttaatagttagtttattagtatttatattttgattgttatggttattgattgttatttggttattgtttattttattttttttatgaagttttggaagttttttgtggttattttggtgatttgttttttgtgggtttttttttttattagtattatttttgtgtggttgtatgttagatttattttttttttaggaggtgtagtgggttgtggtatatgtttgtttaatttagatattgatttttattggtttattttgtattagttttttttggtttttgttttgttttttgtggttattatagttgtatatgtgaggattttgtagtgtatgatgtttttagtggtttttgttttttagtgtagtatttggttgtggataaagagggtgatttgtatagttattgttatttgtttggttttttttgtgtgttgggtattttattatgtgttatagttgatttagttgtttattagttgtttgatttttatttttgtttatttatataatgtggttattagtttgggttatgttaatagttgttttaatttttttgtgtatattgtgttttgtgagatgttttgtaaatgtttggttttgttggtgaagtttgtagtttaggggtagttttgtgttgttagtaatgtttagatggttgatgaggagaggatagaaagtaaaggtatttgatattttttttgttattttgtatatttttaagttagggtattataatatgttattgggagagatgttgagaaaaatttaagattgtttgggaaatgtaggaaggttgggttgtgaggggttgttgtaatgaaataaatatattttatggggtttatatgttgttggggaggtttggagttaggtttggggtttttagatattagaaatttttttgggggagtaggatgagatttttggatagaatagaagttgagtaagagaatatgttggtttggataattggttg

SEQ ID NO: 3344 - DNA, 2410 bp, Artificial Sequence
  chemically treated genomic DNA (Homo sapiens)
taattggttatttaaattaatatgtttttttgtttagtttttgttttatttaaaggttttattttgtttttttaaggggatttttgatatttgaaaattttaaatttgattttaggtttttttagtaatgtgtgagttttatggaatgtatttattttattgtaataattttttataatttggtttttttgtattttttgagtggttttgggttttttttagtattttttttggtggtgtgttgtggtgttttgatttggaggtgtgtagggtggtaggggaagtattaggtgtttttgttttttgttttttttttgttagttgtttgagtgttgttgatagtgtgaagttgtttttgggttgtaggttttattgataggattaagtgtttgtggaatgttttatagagtatgatgtatataaaggggttgaggtagttgttggtatagtttaagttgatggttgtattgtataagtagataaaggtgagggttgggtggttgatggataattgggttagttgtagtatatagtagggtgtttagtatataaagaagattagatagatggtgatggttgtgtgggttattttttttgtttgtagttggatgttgtgttgggaggtgggggttattgaggatgttatgtgttgtaggatttttatgtatgtggttgtgatgattataaaaggtagggtaaaggttaggaaaaattggtatagggtgaattagtagaggttagtgtttgggttgggtaggtgtatgttgtagtttattgtattttttgggaaggggatgagtttggtatatagttatataggggtgatgttgatgaaggagagggtttataggaggtagattattagggtggttatagagggtttttggaattttgtggaagagatggggtggatagtggttaggtagtggttaatggttatggtggttaggatgtaggtgttggtgaattgattattggtatttatggttgtgatgagggtgtatatggtttttttaaagtgttatattttattgtttatgagttggtggattatgaagggtatgtttaggagaaagaggagatttattattgagaggttgatgatgaagatgttggggatgttgttgtattagtgtagtttggatttttttatgattgtgaagatgattgtggagtttttgatgatgtttaggaggtagatggtgttgaatattgaaggtatgatgatgttgatgtaggagatgttttttgtgtgaggaggtgattttggggatagaaggagtaagtgttggttgtttgatatgggttttgttttgagaattgatattttgttggtatgtttagtttttagtgatttattgtttatttggaatttttttttattattttttttttttttattgttgttaattttgtttttttttttttttttatgagttttttggtgaattttattagagtgttttgagttatttgttttggaaggatataatatgtttgttttttgtaggtattagaggtaagaattatagttgtttgtagagattattttgtgagttttgggttttattaggaaaatttgttagtatagttagaaggatataaaagtaagtgtttgtgtatgtgtgtgtgtgtgtgtgtgtgtgttttttttatgtgtagttttgagtgttttattttggagatttttggttggaaattgtgtattgatttttgggtatatttgtgggtgattgttttgtagaggtttttgttggttgtgttttggttaagttagtagttttttttattttaggttttttagtggggatttttttgattggtattttttgagtttgggttttttgagtgaagtagagatagaaattgtttgttggagtttagtagtttggaaaaattatttatataagtttttttttttttttttttttttttttttttttaaagttggaattttagggtattgtagttttggaaatgttaggaagtttaatttattagaaaagttaatttttttatggttttgtgaagttttttttttttagggttttttttaggtggtagtaaggatgttttagattttattatttaagtgggagtaaaaagttgaggttaatagtgtaggagtgagtttttagttgttttttatatattattttttagttttttttgtttgtttttttagtttggaattttttttgttaagtatttttggaatttagtagtgagtttttttttgttgttttatggttggttttttttttttgttattttgaatatgtttttgttttttgttttgtttttgtttgtttgtttttgtggattattgttttttttttttttgttttttagagtaaagtagattatagattttgtttttaagaattgtgataaagttttttaagtagtt

SEQ ID NO: 3345 - DNA, 2494 bp, Artificial Sequence
  chemically treated genomic DNA (Homo sapiens)
agtttatgggagtttttgaattatatagaattatagtatatagtaaataatatattaaatttttgttattttattgggttttgtttatagatttatttaggtattattgtggttttttgggttttttttattttaatttttattttaagttattattattgaggttgattaataaaaatataatattaaatttttttatttttgaggttttttttttaaggggaggtagaaatagaatattttttattggggagggaaaggggtttaataaaaattggtataattagttaaatattgattttggttaggttttttttgtgtttatgggtttagttttggttggttgtttttttttagggagtttttttttattttggggtttgaggtggtattaggagggggttgggggtggttagtattagtggtgttttgtttagtttttttgtagggagtgagtaggtaggtaagttgttgggtggtgggatgttattattgtaggaaattgtgaatgaatttttagagtttggtgatttataggttggtgttgaggtttattaggtattggattttgggtgtgagtatgtgttggtagagttgtgtgtgttgttgtttgatgttttttttgaggttgtagtttaggatggatttggtgtttagtggttgttagggttgtatggttttgttttggatggtggtggtgtttatggtgtggtttttgttgatgtagatggtttgtatgtgtttgttggtatggtgtagggtggttattttgtgggttatgtgtttttgtttgaaggtttttattttgtgttagaagttggtgttgaagtggtggtagaggtgggagtttagtatgttttaggtggtggtgtgtttatatagtttttttgagagttgtggtatgggtgagttgtggtgggtgttgagtttgaagtagagtatgttttttagtttttagtatagtaggttttttagtagtattagtgatttgttgaagtatttttgaaggagtattaggtggaagtgatgttttatttttaggatgtgtttttgtatttgtgggttgttggggtttaggttgttgttatagtttaggttgaagaagagtaggttttggaggtagtgggtattgaagttgttggggttgtagtagtgatttgggttttgtaggaatttggttagtttgttgttggttgagagtttttatgtgaggggtattattggtttgaagtagtggaaggaggatttgaataagtgggtggggttgtggagtattgtgatgaagatggtgttggttggtattaggttgtgtattttgttgtagtggaagtgtatgtggttgtagatgatgttgaagtaggttttgggttgatagttttgtattaggttgtgggtgaagaaggttgggtagttgaagttattgtggttgttagggaaggtgaatttgagttggtgtttttggttgaagtggaataggatgttgagtagggtgttgttggttgttttgtgtgtttttaagaatatgatgttgtgttgtggttggtatttttttgttgagttgttggtttggattattgtttttggtttgagtgtaggtggagagtaggatgttgtggtttttggggttttgttggggatagagaggtggggagagttttaggggggtgttggggtttttaggattttggtagttagagagggagattattgggaatagtggtggtaaaggagttgggatagtgagatttgtggggtttgagtttaggttgggtgtttgtgtgggtggtttggtttttttagttttatgttttttttttgtgaaatggggatgataataggttttatttatggtgttgtgagatgaggtatataggttttttttttatttatggttattgtgttgtatgtattatgaattagtattagtttgggttatatgaaattgttattttataggataaaaatggtttatttttgtagaaatttgtagttttttttgtgttaagttaatattattaattattggtattgtattagttataggttgtgttgggtttgtgtagagtagttttatgaggaaatgggagagtttggtttttaggagttgggtttggagttagattgatttgtttgaatttatgtttatggataggttgtttttattagggttttgttggtattttagatgatgtaaatttgagttttgtatagatagtgttatttgatttttatgttttatgaggaaggttttgggttttttttgtttgtttgtttttttttttgttttgagatagttttattttgttggtttagtttggagtatagtggtgttattttggtttattgtaatttttgttttttgggtttaagtaatttttttgttttagatttttaagtagttgagattatagatatatattattatgtttagttaatttttgtatttttagtagagatggggttttattatgttggttaggttggttttgaattt

SEQ ID NO: 3346 - DNA, 2494 bp, Artificial Sequence
  chemically treated genomic DNA (Homo sapiens)
gagtttgagattagtttggttaatatggtgaaattttatttttattaaaaatataaaaattagttgggtatggtggtgtgtgtttgtaattttagttatttgggagtttgaggtaggagaattgtttgaatttggaaggtagaagttgtagtgagttgagatggtattattgtattttaggttgggttaatggagtgagattgttttaaaataaaaagaaaaataaataaataaaaaaaatttagagttttttttatagagtatgagaattaggtaatattgtttgtatagggtttagatttgtattatttgagatgttaatggggttttggtgggggtgatttgtttatgggtatggatttaaatgggttggtttgattttaggtttagtttttgagaattaggtttttttgtttttttatggggttgttttgtatagatttagtatagtttgtagttggtgtaatattagtggttggtgatattaatttgatatagaggaaattgtaaatttttgtaaaaatggattatttttgttttataaaatggtagttttatgtggtttaagttgatattgatttatggtatatgtaatatagtggttatgaatgagaggagagtttgtgtgttttattttataatattgtgaatagggtttgttattgtttttattttatagaagaggaatatgaggttagagaggttaaattatttgtgtaggtatttagtttggatttaggttttataggttttattattttagtttttttgttattattgtttttaataatttttttttttaattattagagttttgagggttttagtatttttttgaggttttttttatttttttgtttttagtaggattttggaggttgtagtgttttgttttttatttgtatttgagttagaggtagtgatttgggttaatggtttggtgggggagtgttagttgtggtgtaatattgtgtttttgaagatgtataagatggttagtagtattttgtttaatattttgttttgttttggttagaagtattggtttaagtttgttttttttaatggttgtaatgattttgattatttgattttttttgtttgtagtttggtgtaggattattggtttggggtttgttttaatattatttgtaattatatgtgtttttattatgatgaggtgtgtggtttggtgttgattaatgttatttttattatggtgttttgtgattttgtttgtttgtttgagttttttttttattattttgggttggtggtgttttttatgtggaagtttttggttggtgataagttgattgagtttttgtaagatttggattgttattatgattttaatggttttaatgtttattatttttgaaatttgtttttttttgatttgggttatgataatagtttggattttagtagtttgtaggtgtaggagtatattttggaggtggagtgttgtttttatttggtgtttttttaagagtattttgatgagttgttggtgttgttgaaggatttgttgtgttgggagttggaggatgtgttttattttaagtttaatgtttgttgtgatttgtttgtgttgtggtttttgggggagttgtatgggtgtgttattgtttggaatatgttggatttttatttttattgttattttaatgttagtttttggtgtaaggtggaggtttttgggtgggagtgtatggtttgtgaggtggttgttttgtgttatgttaatgagtgtatgtggattatttgtattgatgggggttatgttgtggatgttgttgttatttaggatgaggttatgtagttttggtagttgttgggtattaagtttattttgggttataattttaagaagagtattgggtagtggtatgtgtagttttgttggtgtatgtttatgtttgagatttagtatttgatggattttggtgttaatttgtgggttattaagttttggaagtttatttgtgattttttgtggtggtgatgttttattgtttagtggtttgtttgtttgtttgttttttgtagaggggttgagtaggatgttgttggtgttggttgtttttagtttttttttggtgttattttagattttggggtgagggggggttttttggggggaggtagttagttaagattgggtttatgaatatagagagggtttaattgagattagtatttaattaattatattagtttttattaaatttttttttttttttgataaagaatgttttatttttgtttttttttaaaggggagattttagaagtaaaggaatttgatgttgtgtttttgttaattagttttagtggtggtgatttggggtgggggttggggtggggggaatttaagagattatagtggtgtttgggtgagtttgtgggtagagtttaatggggtggtagggatttgatgtgttatttgttatatgttatagttttatatggtttagggatttttatgagtt

SEQ ID NO: 3347 - DNA, 3457 bp, Artificial Sequence
  chemically treated genomic DNA (Homo sapiens)
aaaaattagttggatgtggtggtgggtgtttgtaattttagttatttgggaggttgagatagaagaattgtttgaatttgggaggtggaggttgtagtgagtagagattgtgttattgtattttaatttggtgatagagatgttgtttaaaaaaaaaaaatgtaaggattattgtgaaatttgtatgttaatgtaaaatattatttgtgtgtttagaagataaagtgatttttttttttagaaaaggtaaaatggtttaagggagtgtgagagttgtggatttgattaatttggtttagtgttttgtgttgttttttagttgtaggatttgagaaaatgtatttgaaaatttgttaagttttggttttttgattatataaggttatatttttttagaagttgtggggaggtttatatattattattgtgttgggtatatagtaggtgttggttttagtttttttgtttttgtttgtggagtttttagtgtttagttgaggttatagtgagttgaattgaatttaaggtttgtattaaatttataggtatttgggggtggagtatttgtaggtgtggtttttggtgtgtggtttagttttttttatatgtagatgaaaattatgatttaaatgtttttatggtggaaattagaagatgtgtagggaaaatagggatgtggaaattgttgggaagtgtaggggttgataagtagtttggtttaggttgttttatgagtgtttttttgtgggagtagtgtttttgaggttgttagtgagttagaggaaggtagggtgtatttgttttttagtaagaatgtgatgtatttgggtgtgatgatggtttaggtagtttttaggaggttgggatattagtttggttgtttttttttttttgtggttttttgttttgtttttggttttgagtggtgagtggtttggttagaatttggatgtttttatttgagtggggtttatagtatagtatttgtgggtggggtggttttggagttttgtagttgtgtgtgttgtttgttagtaaagtttatgtgttgtgttgagtgtagttatatagttttatgtagttatttggttgttgttgtgtgtatgtgtatggtgtgtggttttttttttttgtgagtttgtttgttgtatagttaattagtggttggtgtgtgtggtattatgggagttgtagttttgtaagtgtgtggagtttgttgggtgtttatggaatttgatttgtaggttaaaggggttttgttgtaaggaagaagtgtggggttttgttgttttttagattgagattgtggtgagttggttgtggtgtataatgggtatggtttgggtggtggtgtttgtattattgttttgtgtttgtggattttggtaatattgtgtggtaggttttaggttggttttttttagttttgtggattgtttgggttgggggttttaattttgattttagggttgggttgttggggtagatttttagtgatgtttaggttttttgggtttttgttagttaagggatgtttgttgtgtgttaattgttaagttttttattgtttttgtaaatttgttgatgtttttttagtgtatagggagattgtgtatgtgagtttgtttttgtgtgtattgtggagaggtagaggtatgaatgtagtataaggtataaaatgattattttagagagggttagatgattaagttagtaaatatttagggaatatgattgtgtttgttgtgtgttttttggagtagatataagggtgaatgaataaagaatggattttggttattgaaagtggagaggtagttgattttgtttgtggaggtttttagtagagttggatttggtagttttttggttatgaggggagattttgttggaggaaagaggtttttatttttattgtttgaaatgtgtaggatgtttttagattttttggtttatttataggtatagttatgttaaaaatgtgggattttataatgtatttagtattagtagagagggagttgaggatatggatagagattgtattagtttatatattagtaggttagggtgtggtggtttatttttgtaattttagaattttggaaggttaaggtgggaggaaaatttgagtttaggagttttagattagtttgggtaatatagggagattttttttttattttaaaaataataaaatagggttgggtgtggtggtttatatttgtaattttagtattttgggagattgaggtgagtggattaggaggttaggggtttaagattatttagttaagatggtgaaattttgtttttgttgaaaattgtaaaaattagttaggtgtggtggtaggtgttttaagttttagttatttgggaggttgaggtaggagaattgtttgaatttaggtagtagaagttgtagtgagttgagattgtgttaatgtattttagtttgggtgatggagtgagattttgttttgaaaaaaaaaaaaataataataataataataaaatgaagaagtagttagtggtgttttttggtttttagttttgaagggtaagattttaatttagtttaattatagttaattagaatttggaagattaatttaagttagttaaatttataatagtttgatatttaaattttgttaggggatatagttttttaggattgtaatgtttttaattttttttttttattaaattatttagaaattgatttagttattagaaattttttggtatgatggtttttaaatatgtttatagttttttttgataattggttttttaaaagtatagttaggtgtggtggtttatatttgtaattttagtattttgggaggttaagttaggtggattatttgagattaggagtttaagattagtttggttaatatggtgaaatttgtttttattaaaaatataaaaattagtttgttatgtatttgtaattttagttatttgggaagttgaggtaggagaattgtttgaatttgggaggtggaggttgtagtgagttgagagtgtgttattgtatttgagtttgggtaatagagtgagattttattttaaaaaaaaaaaaaaaagaaagaagaaaaaaaggttggttatagtggtttatgtttgtaattttagtattttgggaggttgaggtaggtggattatttgaggttaggagtttgtgattagtttggttaatatggtgaaattttgtttttattaaaaatataaaaattagttaggtatggtggtgtgtgtttgtaattttagttatttgggaggttgaggtaggagaattatttgaatttgggaagtagaggttgtagagagttgagttgagattgagttattgtattttagtttgagtgatagagtggaattatgtttttaaaaaaaaaaaaagttggagttgggtgggtatggtggtttatgtttgtaattttaatat

SEQ ID NO: 3348 - DNA, 3457 bp, Artificial Sequence
  chemically treated genomic DNA (Homo sapiens)
gtgttgggattataggtatgaattattatatttatttaattttagttttttttttttttggagatatagttttgttttgttgtttaggttggagtgtagtggtttaattttagtttagttttttgtaatttttgttttttaggtttaagtgatttttttgttttagttttttaagtagttgggattataggtatatattattatgtttggttaatttttgtatttttagtagagatagagttttattatgttggttaggttggttatgaatttttgattttagatgatttatttattttggttttttaaagtgttgggattataggtatgagttattgtgattggtttttttttttttttttttttttttttttttttgagatagagttttattttgttgtttaggtttgagtatagtggtatgtttttagtttattgtaatttttattttttaggtttaagtgatttttttgttttagttttttaagtagttgggattataggtgtatgatgagttaatttttgtatttttagtagagatgggttttgttatgttggttaggttggttttgaatttttgattttagatgatttgtttgatttggttttttaaagtgttgggattataggtgtgagttattgtgtttggttatgtttttgaggagttgattgttaaaaaaaattgtgggtatgtttaaaagttattatattaagaaatttttaatgattaaattagtttttaggtagtttaatagaaggaagggattaggaatattgtaattttagagagttatgttttttggtagggtttaagtgttgggttattgtgagtttgattgatttgaattagttttttaaattttgattagttgtagttgaattgaattaagattttgttttttaaagttgaggattaaaggatattgttaattatttttttattttattattattattattattttttttttttttaagatggagttttattttgttatttaggttggagtgtattggtgtaattttggtttattgtaatttttgttgtttgggtttaagtgatttttttgttttagttttttgagtagttgggatttgaggtgtttgttattgtgtttggttaatttttgtagtttttagtagagatggggttttattattttggttaggtggttttgaatttttgattttttgatttatttgttttagttttttaaagtgttgggattataggtgtgagttattgtatttggttttattttattatttttaaaatagagaaggggtttttttatgttgtttaggttggtttggaatttttggatttaagttttttttttattttgattttttaaagttttgggattataggggtgagttattgtattttggtttgttaatgtgtgagttagtgtagtttttgtttatatttttgattttttttttgttagtgttaagtatattgtagggttttgtgtttttagtatagttatatttatgaatgggttaaagaatttgagggtattttatatattttaaatggtgggaatggagattttttttttttagtagaatttttttttatgattgggggattattagatttagttttgttaagggtttttatggatggagttggttatttttttatttttagtgattgaaatttattttttgtttatttatttttgtgtttattttgggaaatgtgtagtggatatagttgtgttttttaagtgtttgttgatttagttatttggttttttttggagtagttattttgtattttgtattatatttgtgtttttatttttttgtagtgtgtgtgggggtggatttatgtgtgtagtttttttatgtgttgggagggtgttagtaggtttatagaaataatgaaagatttaataattggtgtgtgatgagtgttttttgattggtaggggtttagaggatttgaatattattaagggtttgttttagtggtttggttttgaagttaaggttgagatttttggtttagatagtttgtgaagttgagggaggttggtttggggtttgttgtgtaatgttattgggatttgtaggtatagggtgatagtatggatgttgttgtttaggttgtgtttattgtgtgttgtggttagtttattgtgattttggtttaggaggtggtgggattttgtattttttttttgtaatggagtttttttggtttgtgggttgagttttataggtgtttgatgggttttgtgtgtttataggattataatttttgtgatgttgtgtgtgttgattgttgattggttgtgtagtggatggatttgtggggggggggggttgtatgttgtgtatgtgtgtatggtgatggttggatggttgtgtggggttgtgtggttgtgtttggtgtggtgtgtgggttttgttggtgggtggtgtgtgtggttgtggggttttagggttgttttgtttgtaggtgttatgttgtgggttttgtttaggtgaggatgtttgggttttggttgagttatttgttatttagggttggaggtggggtggggagttgtggggaaggaggggtggttgggttggtattttagttttttgggaattgtttggattgttgttgtgtttgagtgtattgtgtttttgttggagggtggatgtgttttgtttttttttgatttgttggtggttttggaaatgttatttttgtgggagagtgtttgtgggatggtttgggttaggttgtttgttagtttttgtgttttttggtagtttttgtgtttttgttttttttgtgtgttttttgatttttattatgaggatgtttgggttgtgatttttatttgtatgtggaggaaattgggttgtgtgttgggagttgtgtttgtgggtgttttgtttttaagtgtttgtgggtttggtgtgggttttgggtttagtttagtttgttgtgattttgattgagtgttggaggttttgtgggtgggagtaggagggttggagttggtgtttgttgtgtgtttggtgtggtagtgatgtgtgagtttttttgtaatttttgagaaggtgtgattttgtgtggttaggaagttgaagtttgatgagtttttaagtatgtttttttaggttttgtagttgggagatggtataggatattaaattaggttggttagatttatggtttttatgtttttttgggttgttttgttttttttggaaaaaggaattattttgttttttaaatgtataagtaatattttatattaatatatggattttatagtaatttttgtattttttttttttagatggtatttttgttattaggttggagtgtagtggtgtaatttttgtttattgtaatttttgttttttgggtttaagtgatttttttgttttagttttttgagtagttgggattataggtatttgttattatatttggttaattttt

SEQ ID NO: 3349 - DNA, 2424 bp, Artificial Sequence
  chemically treated genomic DNA (Homo sapiens)
tttaattgtttttatagttattagggtagaaaaaattgagattaggggtagggtataaaggagaatatatttatgttttatttgtataattataaattaatgttaaaaagaatgtaaagttaggtttagggtagggatgaagaggttgtagatgtttttaagtattggaaagttttggttttttggttttatgtttttttttttttttttttttttttttatttttgagatagggtttttttttgttgtttaggttggagtgtaatggtatgattttggtttattgtaattttaaattttttggtttaagtgatttttttattttagttttttgagtagttgggattataggtgtatgttaggtggtttagttaatttttgtattttttaaaatttttttgagatggagttttgttttgttgtttaggttggagtgtaatggtggaattttggtttattgtaattttagttttttgggtttaagtgatttttgtgttttagttttttaagtagttgggattataggtgtgtgttattatgtttagttaatttttgtattttttgtagagatgggtttttaatatgttggttaggttggttttgaatttttgattttaagtgatgtgtttgttttagttttttagagtgttgggattttaggtggagttattgtgttgtattttttgggtttttttttaatttgggtttttgggttttttaggtttttgttttttttttttatgttgttttgtgtttgttttagatttttttgggatttgttggtttggtgttttggtttgtttgagttttatggttttttgggttttaattttggtggggtaggtatttttttaggaagttttggagtaggttgttgttgtataggtggtttaggttggtggtttttgattgaaggttgtgttgggttagtgtgtagtttgtggttgagaggtggttgttgaggggttgggtgggttaggggttggttagttgttgtttgtttttgttttgtatatttatgaagtttagtgaggttggttgtttaggttagttgtggatgggttatgaattatttatgaggaaatttttggttttgtttagaaaggttttgttgattatttatgagttgaggagtgggtttgggttggaaaaggttgttgatttttggtgggagggaagtgttgatgagttgaggtgagggttgttgagatgtgaggttttggtttagagagggtatttgggtgttgttagttttgtttttatgttaaaaaataatttttttttttttttttattatttaaggttttaagttggatttgaaagtattatattttgtgagggtttaaagtattgtgaagagaattgggagggtagggggttgaggaggaaggtaaaagggaggtgattttttttagaattggatagagagtatttaggtagttttgaaatttagatttttttggatatgaaattaaatttgttgagtaagtagtagttataatgagttatgatgaggttggtagggtagatgatgtttgtgtttgatattggagggggttgtgtgtggtggagttttggggaagtttattttatttgggttagattttttttagttattgaggttttttgttaggattgatgtttggtataggttaagaggtgagagaggtggggataagatattttgttttttttgattttagttttttttttattttagtgaggatttgttaattaatttttatggattttagttttttaaatagagggagagagttttgaattttaggattagttaattgttaaaatgtgtttgagtatgtagggtattggataggttgtgtagtatattgtgtatttagttggtagaaatgaggggtggttttggtttttaaaggggtttttaattttagtaggattataatttaattttttttttattggattattaatttgttgaggtaggaatagtattttatattttgtaattttgtatgttgttgtttggtatattgtagttgttttgtagatgttgaatgaatgaataattgaaatagtatgaaaaagatattaaaaagttaaaagagtatgaataaatatttaattaatatagtggaagttattttttttgaatgagtataggtaggggaattattagggttaaatggaatttgttaaaatggtgaataatttattgaagtaagttttgttggaaggtttaagtaattgggtgaattttggtaaattaagtttttttgtttagttttattttttttttttttttttttttttttttgtgagatggagttgagttttgtgttaggttggagtgtagtgatgtaattttagtttattgtaatttttattttttgggtttaagtgatttttttgttttagttttttatgtagttgggattataggtg

SEQ ID NO: 3350 - DNA, 2424 bp, Artificial Sequence
  chemically treated genomic DNA (Homo sapiens)
tatttgtagttttagttatatgggaggttgaggtaggggaattgtttgaatttgagaggtggaggttgtagtgagttgagattgtgttattgtattttagtttggtatagagtttgattttattttataaaaaaaaaagaaaaaagaaaaggaaagtgaggttaagtaagggaatttggtttgttaaagtttgtttaattatttagattttttaatagagtttgttttaataaattatttattattttaataaattttatttggttttggtaatttttttatttgtgtttatttagagaaaatggtttttattatattaattgagtatttgtttatgtttttttgattttttaatattttttttatgttattttaattatttatttatttaatatttatgaggtaattataatgtgttaggtaataatatgtaggattatgagatgtaaaatattgtttttattttaatagattgatggtttaatggaggagaaattagattatgattttgttgagattaaaaatttttttaggggttagaattattttttatttttattagttgagtatatgatgtattgtatagtttgtttagtgttttgtgtatttggatatattttggtgattggttaattttgaggtttaagattttttttttttgtttagggaattaaagtttatagggattaattggtaaatttttattaaagtgaaaggggagttgaggttaaggggggtggggtgttttgtttttattttttttattttttggtttgtattaggtattgattttggtagaaaattttaatggttggggagaatttgatttaggtaagataaatttttttaaagttttattatatatggttttttttaatgttgggtatagatattgtttgttttgttagttttattatggtttattatggttgttgtttgtttagtaagtttgattttatgtttagaaaaatttgaattttaaaattatttgggtgttttttgtttagttttgggggaaattgttttttttttgtttttttttttagttttttgtttttttgattttttttatagtattttaggtttttatgaaatatgatatttttaaatttaatttaaagttttaagtaataagaaaagaaaaaaaaattgttttttgatataaagatagaattaataatgtttgagtgttttttttgggttgagattttgtgttttaatagtttttattttagtttgttgatgttttttttttattgggggttaatggttttttttggtttaaatttgttttttggtttatgaatagttaatgaggtttttttgggtgggattagaggtttttttatgaataatttatgatttgtttatggttagtttgggtgattggttttgttagattttatgaatatgtaaagtaggggtgaatggtggttagttggtttttagtttgtttggttttttagtagttgttttttagttatgggttgtatattgatttgatgtgatttttggttaggggttgttagtttgggttatttatataatgatagtttgttttggggttttttgaggaggtgtttgttttgttgaggttaggatttgagggattgtggggtttgggtgggttaggatgttaggttggtgggttttagagaggtttgaggtgggtgtggggtggtgtaggggagggaagtgagagtttggggggtttagggatttgagttagaagaaggtttgagaagtgtggtgtggtggttttatttgggattttagtattttgggaggttgaggtgggtgtgttatttgaggttaggaatttgagattagtttggttaatatgttgaaaatttgtttttataaaaaatataaaaattagttgggtgtggtggtgtgtgtttgtagttttagttatttgggaagttgaggtatgagaattgtttgagtttaggaggttgaggttgtagtgagttgagattttgttattgtattttagtttgggtgatagagtgagattttgttttaaaaaaattttaaaaagtataaaaattagttgggttatttgatgtgtgtttgtagttttagttgtttgggaggttgaggtaggaggattgtttgagttggggagtttgaggttgtagtgagttaagattgtattattgtattttagtttgggtaatagagggagattttgttttaaaaataaaaaaaaagaaaagaaagaaaaaagatataaggttagaaggttagagttttttaatatttgagggtatttgtaatttttttatttttattttggatttgattttgtattttttttaatattaatttgtaattatgtaaataaaatataaatatatttttttttgtgttttatttttaattttagttttttttgttttggtaattgtgggagtagttggg

SEQ ID NO: 3351 - DNA, 2371 bp, Artificial Sequence
  chemically treated genomic DNA (Homo sapiens)
ttttaggttttttatgtggttgttggttagaagtatatttgataaggtgttttggttgttttggttgtttttatatgaagtttgtttagttaaggtatttttaggggtttaatgagaagggaattgtggttgggtgattttgaaggtgatgggaaagatgttgttttttatttataaagttgttagggttagttggggaaaagtagaggaaagggaaattataagaaagtagatttaaagaaatagaatttgaaagagttttttaggttgttgtttagaatatttggaattaagttaatgggtatggagggagagtagttgttaagttattttttggtatgagttttgagagttgtttgagggagttggagtagatgttgtgggattttttttttgagttattgtagtttttttttggagttggtttggggtggtggtttaaatatggaaatgtggtttgaattttttttttagtaattgttgttgggttttagtttttttttgtgaggtgggtagttgagtgaaatgaaattataatatttaattataatattgtgagtgttagatattgtgttgagttttgtatgtggatttttttaatttttaaaataattttagaggtggtaatgattgtatttattttatagatagaataattggttagagagggtgtgtgtgtgttatttaaggttatggagttagtaagggtattgggtgagaatttgaatttagagttattggttttttaattatagtgtttttttgttgagtagggataagtatttatttttttagttttttttgtagttagggagttagaatattttgggattggaaattgttgtttggatgattttagttagttattttgttttgtagatggggaaagtgagaattagagaaggttggtgattggtttaaggttatgttgtgttttatattttttttttatttttggatgtttagttttttaatagttttagtatagagttggggaaaaatttttagagatatttttttgggaagatagttggaaggtagggttgagttggggttatttgtgatttagtggtgaggtgatgaggtattgatgaaagtattgtattttttttttttgagaaatgttttggtattagatgagttttgggggagggaggagaggaatttggtagggatttggttataagttatttggagggtggtgtgaggattggaaaagttgttgtttgttttgtttggttttattttttgaatgaggttattgaatgtgtatgggaggtttagtgttgttttattttagtttgatggagaaattttatttgaaattttaaagtagggtagggatatttttattagatatttttgtagtttttgttttgtgggatgaagtaagggatgatgatatatttgtttgtttatttggaagtgagttttaggttattgtattagaagggtgataatttaatataagttattgttaagtaatttttgtgtgtttagtatttatatttttttgttttattttgattattatattgtataggagttattatttttattttttgtttttatttatagatgaggatattgagatttagagagttttttgttttgttttgttttttgagatggagttttgttttgttatttaggttggagtgtaatggtatgattttagtttattgtaatttttgttttttgggtttaagagatttttttgttttagttttttgagtagttgggattataggtatttgttattatatttagttaattttgtattagagatggggttttattatgttggttaggttggtttttaatttttgattttgtgatttatttgttttagttttttaaagtgttgggattataggtatgagttattgtgtttggtttgttttattttttgttttgtttgtttgttttgttttgtttttagagatagggtttggttttgttttttaggttagggtgtagtggtgtgattatagtttattgtagttttaaatttttgggtttaagtaatttttttgttttagtttattaggaattggaattataaatgtatgttattatttttagttaatattttttttttttggaaaaatgaagttttattatgttgtttaggttggttttaaatttttgggtttaagtgatttttttgtagtgttgggattataggtatgagttattttgtttggttaattttagagagttttgatgaagttataaaattttgattatggagttagaatttaaatttaggtatgtgaggtttgagtttaggtttttattagggttattgtgttgtaattgttattattttttggtattttaagtgatatttgagtattatttaagggaa

SEQ ID NO: 3352 - DNA, 2371 bp, Artificial Sequence
  chemically treated genomic DNA (Homo sapiens)
tttttttgaatgatgtttgggtgttatttgaggtgttaggaagtggtggtagttgtagtatagtggttttggtggaagtttgggtttagattttatatatttagatttgagttttggttttatggttagaattttgtaattttattaaaattttttgagattggttgggtagagtggtttatgtttgtaattttagtattgtaggaggattatttgagtttaggagtttgagattagtttgggtaatatagtgagattttatttttttaaaaaggaaaaatattagttggggatggtggtatgtatttgtagttttagtttttggtaggttgaggtgagaggattgtttgagtttaggagtttgaggttatagtgagttatggttgtattattgtattttaatttggaaaataaagttagattttatttttgaaaataaaataaaataaataaataaaataaaaaataaaataggttaggtgtggtggtttatgtttgtaattttagtattttgggaggttgaggtaggtggattatgaggttaggagttggagattagtttggttaatatggtgaaattttatttttaatataaaattagttgggtgtggtggtaggtgtttgtagttttagttatttaggaggttgaggtaagggaattttttgaatttaggaggtagaggttgtagtgagttgagattgtgttattgtattttagtttgggtgatagagtaagattttattttaaaaaataaaataaaataaaaaattttttgggttttggtgtttttatttgtaaatggaggtggggggtgagaataatggtttttgtgtagtgtagtggttagaatgaagtaagaaaatgtgaatattgagtatgtgagagttgtttagtaatgatttgtgttaggttgttatttttttgatgtaatgatttgagatttatttttgggtgggtaggtgagtgtgttattattttttgttttgttttataggataaaggttgtaaaagtatttggtgggaatgtttttgttttgttttgggattttgggtaggatttttttattaggttggagtggggtagtgttgagttttttgtgtatatttagtgattttatttaggggatgagattaaatagaatgggtagtggtttttttggtttttatgttattttttagatggtttataattagatttttgttaaatttttttttttttttttttaagatttatttgatgttaaagtgttttttaaaagggggaaatatagtatttttgttagtattttattattttattgttgggttataaatgattttggtttagttttgttttttagttgtttttttaaggggatgtttttgaagatttttttttagttttgtgttggggttgttggggagttggatgtttgggaatgagaggaggatatgggatataatgtgattttgggttagttattggttttttttggtttttattttttttgtttgtgaaatgaggtagttggttgaggttatttaggtagtagtttttggttttagggtgttttggttttttgattgtagggagagttgggaagatgagtatttgtttttgtttagtaggagagtgttgtggttaggaagttagtggttttgggtttaaatttttatttggtgtttttgttggttttgtgattttaggtaatatatatatattttttttgattagttattttatttgtaaagtgggtgtaattattgttatttttggagttgttttaaggattaagaggatttatatgtagaatttagtgtagtgtttgatatttgtaatattataattaaatattataattttattttgtttaattgtttgttttatagagagaaattgaggtttagtagtggttgttgggaagaggatttagattatatttttatgtttgagttgttattttgggttggttttaggaggaagttgtaataatttaggggaaaagttttatggtgtttgttttagtttttttaggtggtttttagagtttgtgttaagagatggtttggtagttgttttttttttatgtttattagtttagttttagatgttttaggtagtagtttggggagtttttttaggttttgtttttttggatttatttttttgtagttttttttttttttgtttttttttaattggttttggtagttttataaatgaaaaataatgttttttttattatttttgaaattatttaattatagttttttttttattagatttttggaaatgttttggttagatagattttatgtagggatggttaggatagttgggatattttattaaatgtgtttttgattagtaattatatgaaaggtttagag

SEQ ID NO: 3353 - DNA, 2500 bp, Artificial Sequence
  chemically treated genomic DNA (Homo sapiens)
ttttggagaataggatatgtggagggttaggaaggggttaggtttagagatgggagatttttttttggagtaggtggaggtataggattatttgttattttatttgttggtatttgtgggggagtttaggtattttttgtaagtttttttgattatttggtttaaagaaaatagaagtatggaggttgttaagtatttttaagaaataattttatgaatatggtattatttttttagaaagaggggtttggggtaggtagaggagagaagggagattaaattgagagttaagtttttagatggttttgtaggaggagaggatgtagttgtttagagggaagtaggattatatttaaggaagtgtgtggggtttttggatgatattagtatttagtgtggttttgtttggtaattgtttttaaggtggtaggagtgggtgttttttgtgtgttagtgggtagtttttgttgaatttatagtttattggggagtttgatagtggggttatgtgtttgatatttttttttgtttgtggatttggtaaggtagggagtagaaaatagagttatttgaaggttttttgtttgtgtttgtgtgtagtgtggatttagttgtgttttttatttgttgggagagtatagttattatttataagtagtgttatttttgtgggtggtgaggatagaataggagtttttgttttttgtatttatttgggtttggtgggtttttttgttttggtttttatttttgttttagtgattatttagttttgtataggaatatatgttgtttagaaaagttaaatttagtttttgtttttgttttttttggttttatgatgtgtatttgttattttgaaattggaaattagtttattaatgtttgtgttaattttttattttttttttaatttttttttttatatgattttttatttatgtaggatgtgtgttgtttaatgatgggatgattatatttttttatgttttaaaagtgttttttttttatagggttttagggttggtggttgttttgggtttatagttatgttttatttgttttttgttttaatagtttgtgtggtggtaaagttggtgtggggttggggaatgtagtgttttttaggaggggatttggttttttttttgtagtgtaggtgaaggtttagatgttagtgtgattttttataaggtgtggtttttagattttttggttggaagtgatgtttttttgttgtgggttttgggtttgaagtagtttggtttttttttggtaagtggttggtgttttagtagttgtaatttgagtttagttatttatatattattgtggttgatatttttattaaaaagttttttgagatgatttgtgtgtatgttgattttatgattagtgttgttgggaagaattttagagttggtggggtggggttggaagtagtaggtgtagtgatagggttgggtgtttaggaggttttagtgtttaattaggttaaggtggttaagtttaggttgtagggaaggttggtttggggggtgtgggtgagtataggtaggtattagttgggtagtgttaggatgttggagtagtatttgtaattttattgagtggggtagtttggttggggtagggattgttgttgttttggtagagagagaggatttttattggggagaggttgttttgattttgtaggtgggatagggatagatggttattagggtgatttggttggtttttttttgttatgttaagttttgggatatggaggatttttgttatatagtttgggtttgggtttttatttgtggttattgttttggtatgagttttttagttttgggtggtttttgtttggtttgggatttggtgttgttgttgagtttagtttttttgttatttttgtatgggttgtgggtggtgatgttagttgttttttattttggttttagtagtttatttagtttataggggagttgttttgggttggagatgggtatgtattttgggttttatttgaatgaatgtagtttgaggagatttggttatatatattgggttataggttatttttggtaatgtttatattagttgttagtttgagtttttttaggagagtaaggtttatatgataaaggttgtttgtggttagtgaggtggttgagtttagttaggattttttttggatttttgggatgtggttttgtttgtgagttgtttggttagtttttttggggtgagaggggtttgttatatgggtttttgtttgtagtgtgattttttttagttttttttagtagttttgtttgtagagtgttattattattatgattatttttttgatattgtgagggttgggggatgttttgggtagagatagggtttgtggtagtagtaggtttaggggtgttttatattggtgggttggggatttggtggagattatgttaagggttggataaggggatgagtttttattttggtttttttgtaggtt

SEQ ID NO: 3354 - DNA, 2500 bp, Artificial Sequence
  chemically treated genomic DNA (Homo sapiens)
ggtttgtggagaggttagggtggaggtttgtttttttgtttagtttttggtgtggtttttattaggtttttagtttattagtgtagggtgtttttgagtttgttgttgttatgggttttgtttttatttaggatgttttttgatttttgtagtgttagggaaatgattatggtggtggtgatattttgtaggtagggttgttgagagaagttgagaagggttatattgtaggtaggggtttgtgtgataagttttttttattttgagagagttgattaggtagtttatgagtagagttatattttgggagtttgagaaaggttttggttgggtttagttattttattggttatgggtagtttttgttgtgtgagttttgtttttttggggaggtttaggttgatggttgatgtgggtattgttgagggtaatttgtggtttagtgtatatggttgggtttttttaagttgtatttatttaagtaggatttagggtgtatgtttatttttagtttagggtagtttttttgtaagttgggtgagttattgaagttaaggtgggaggtagttgatattattatttatggtttatgtggaggtggtagaaaggttggatttagtagtaatattaaattttggattaggtagaaattatttaagattgaggggtttatgttagagtggtggttataggtaagaatttgggtttaggttgtgtggtaggaattttttatgttttagggtttagtatagtaaaggaagattagttgggttattttggtggttatttgtttttgttttatttgtagagttagaatagtttttttttagtggggattttttttttttgttaaagtaatagtggtttttgttttaattagattattttatttagtggagttatggatgttgttttagtattttaatattgtttagttggtgtttgtttgtgtttatttatattttttaggttggttttttttgtagtttgggtttggttattttggtttgattgagtattgaggttttttgggtatttagttttattattgtatttgttgtttttagttttattttattggttttggggttttttttagtggtgttgattatgaagttaatatgtatgtaagttgttttaggaaattttttaatgaaagtgttggttatggtggtgtgtaggtggttgagtttagattgtagttgttaagatattagttatttattaagagaaagttaggttgttttaaatttagggtttgtggtaaaaaagtattatttttggttggggagtttggaagttatgttttgtgggaggttatattggtatttaggtttttgtttgtattgtagaaggagagttgggtttttttttggagaatgttgtgttttttagttttatattggttttgttattatataggttgttgaggtaggaggtgggtaagatgtagttgtagatttaaagtaattattagttttgggattttgtgggagaggagtatttttagaatatggaaaagtgtggttattttattattagatagtatatattttatataaataaaaagttgtatggggaaggaggttggggagggaataaaaaattggtatagatattgatagattggtttttagttttaaggtaatagatgtatattatgagattagaggaggtagagataagggttggatttggtttttttaagtaatatgtgtttttgtgtagggttgaatggttgttgagatagagatggaagttaggataagggagtttattgggtttagataggtatagagagtagaggtttttgttttgtttttgttatttatgagggtgatattgtttgtaaatggtggttgtgtttttttagtaagtaaaaagtataattaaatttatattgtatatagatgtagatagaaagtttttaagtagttttgttttttgttttttgttttgttaggtttataagtagagaggagtgttaggtatatggttttattgttaggttttttagtgagttgtgggtttagtaggagttgtttattgatatataggggatatttatttttgttattttgggagtggttgttagatagagttgtattgggtgttggtgttatttagggattttatatatttttttaaatgtgattttgtttttttttgggtagttgtattttttttttttgtaggattgtttggaaatttggtttttagtttgatttttttttttttttttgtttgttttaagtttttttttttaaaaaagtgatgttatgtttatgggattattttttgaaaatatttggtggtttttatgtttttgttttttttgagttaggtggttaggagggtttataaagaatgtttgggtttttttgtaggtgttggtagatggggtagtgaatggttttgtgtttttatttgttttgggagggagttttttgtttttaggtttggtttttttttaattttttatgtattttgttttttagag

SEQ ID NO: 3355 - DNA, 2431 bp, Artificial Sequence; identical to SEQ ID NO: 3315
  chemically treated genomic DNA (Homo sapiens)

SEQ ID NO: 3356 - DNA, 2431 bp, Artificial Sequence; identical to SEQ ID NO: 3316
  chemically treated genomic DNA (Homo sapiens)

SEQ ID NO: 3357 - DNA, 2451 bp, Artificial Sequence
  chemically treated genomic DNA (Homo sapiens)
taattaaagatttttttaaatttagtagggattagtaaatatttatagaagattagagattttttgtgagtgtaaagggtttagagtgatttgatgttatagattaaattttatggtttttttaaatttatgtgttaaaatttaattttttatatgatgggatttggaggtgaggttttggaaggtgattagattatgaaagtagagattgtatgaatgggattagtgtttttattaaagggattgttgagagtttttttattttttttgttatgtgaggatatagtaaaaagatggtagtttatgaataaggaaggaagtttttattagatatgaaatttgttgatgagttgattttggattttattatttttagaagtatgagaaatgaatttgtttttttgttatttagtgtagtgtattattttttggtatttagattggttatagtattaatatattaatttgtatatgtaatttttgaaattttgatgttaaatttttgatggtaataggtgattgatttgttggaggaatggattgatatgatttttttttttataataaattagagagtaaaaataagtaaaagtaggttaaggttttttaaaagttgtatttgaaaggtttttagtaatagttgattagatggtaatttaattatataaataattatggtaaagatatataattattagatatttttagaatagtttttaaaataatatttgataatattagggagttaaagaaggtatgaatttttaaaaagttaaattttatttaaatgttattgtagaaatttgtaattttaatattatggatgaattttagggtaggtggtggtatggtatggtgatttgggggtataagtgttgagttttgaagttttggttttgatattttttggagatgttttttggtttttatatttttgtttatttgttaagaagagtttgttttgggtagtattttagggataaatagtttagaagtttagttgagggtagatttttaaggttggaggaagaagttgtttttgggagtaggaggagttgttggattttttttttttaggtttttttttttgttttttagtgttttttgtaggtaggtaaataattttagtaggagtagtagtaggttttttagttgtagggttgtagttttgttgaatgagagaagtttttttttggtgagttagaggagtgtaggttatatatttgggtttttatttttatgttttttattgtgtttaggattgagtttagtgtgggagatgtgggttggggttgtgttggttatttttttttttttattttttgttttagttatgtttttagttttagggttgaggttagtggttagagtagattttatgatgttaggtagttttttattgggttggtttttggtaggattaggataggggtaggagggatttggagttgttgatagttttagttttgtttttgaaggggggtttttttttggtgttggtattggtttattagttggtgttggaattttttgtgttgttgtatatggaataggagatgaaaaagaagaaagatttattaatgttagttattttttattggaatttttatatatagaattaattttgttgaatgtaaggtattttagtttgaaaatattgtttttgtaaaggtttatagattataggttattttattgtgtgtttgtgttttgatgaattttagaggttttagttggataagaataatgtgtagatgtggttgtgatgggattattggtggggtttggtttggtagggtttgttttgggttgttttgtggtatttgggggtgtttttgtttaaatggttagaggtgtttggagtgagagatgagtgaggtattgttttttataagagggtattagttgtggggatttgtttatagattttgatttaaatgatggatgaataaaatgtatattgatatagagttattttgttttgttagttttgttgagtgttttattgtttgtatattaagagaggtttgttattgtagttggttgtgaatagtttgtattgtaggtatttatttagtatagaatttataatggaagttttgagtaaatatttttgtggataattaatatggttaagagagtagttttattaatgattaaagtttaggtattatggtttaaagtaaatattattgggggtaattttttgggtttatttttttttttttttttaagaggattatttggtttaaaggttagttaatggaagtagggtaaatagatttaattggggaagtttttattgtttttaatatttattttatgagttaatgttttaagataagaagtagttgtttttagtttgtttaattattataagttatgtaatttttttgttttttaaaaggtttgtgattattttttgtaattttttttaatatttttttttaa

SEQ ID NO: 3358 - DNA, 2451 bp, Artificial Sequence
  chemically treated genomic DNA (Homo sapiens)
ttaaagggaaatattagggaaagttatagggaatagttataaattttttggaaggtggaaaggttatatagtttgtaataattgaataggttgaaggtagttgttttttattttagagtattagtttatagggtaaatgttagggataatagaggtttttttagttaagtttgtttattttatttttattaattagtttttgagttagatagtttttttggggaggaggggggaggtagatttgggaaattgtttttagtggtatttattttaaattatggtatttgagttttaattattggtagaattatttttttaattatgttaattatttataagagtatttatttaaagtttttgttgtaaattttatattaaataaatgtttgtagtgtgagttatttatggttagttgtagtgataaattttttttggtgtgtaggtagtgggatatttagtaggattggtaaagtagaataattttgtgttagtgtatgttttatttatttgttatttgggttagggtttgtgggtggatttttgtagttaatgtttttttgtgaggggtaatattttatttattttttattttaggtgtttttggttatttgggtaaaggtgtttttaagtattatagggtagtttagggtaggttttattaggttaggttttattggtgattttattgtggttatatttgtatattgtttttgtttagttggagtttttggagtttattgaggtataggtatatggtgaggtggtttatagtttatgagtttttgtaggggtagtgtttttgggttggaatattttatatttagtgaggttgattttgtgtgtgaaaattttagtggaaagtgattgatgttggtgagtttttttttttttttattttttgttttatgtgtagtaatataggaaattttagtgttagttgatgagttagtgttagtattaggggaagatttttttttagggatagaattggagttattagtagttttagattttttttgtttttgttttggttttgttaaggattagtttagtgaggagttatttgatattatgagatttgttttagttattggttttagttttggagttgaaagtatggttggagtaagaggtggaagagagggggtggttagtatggttttagtttgtattttttatgttgggtttagttttgggtatagtgggagatatggaggtagagatttgggtatatggtttgtgtttttttgatttgttagagagaggttttttttatttagtagagttgtagttttgtggttgaagggtttgttgttgtttttgttggggttgtttgtttgtttgtaagaggtgttggggggtaggaaaagaaatttgggaggaggggatttagtagttttttttgtttttagaggtggtttttttttttaattttggaggtttgtttttaattgggtttttgggttgtttgtttttgaggtgttgtttaggataggttttttttgataggtgggtaggggtgtggaggttagggggtatttttaaagggtattaaaattgaagttttaaaatttagtatttgtgtttttaaattgttatgttatgttattatttgttttagaatttatttatagtgttaaaattataagtttttataataatatttaaataaagtttgattttttgaaagtttgtgttttttttaattttttaatgttgttagatgttgttttagaggttattttgaaaatgtttgatagttgtgtatttttgttgtggttgtttgtgtgattgaattattatttaattaattgttattggaaattttttaggtatggtttttagaagattttgatttatttttgtttgtttttattttttggtttattgtggaaagagggattatgttagtttatttttttagtagattaattatttgttgttattaaagatttggtattagaattttaaaaattatgtgtataagttgatatgttggtattgtagttaatttgggtgttaaaagataatgtattgtattaggtagtagagaaataaatttattttttatgtttttggagatggtaaaatttaaggttaatttgttagtaggttttgtgtttgatgagggtttttttttttgtttatagattgttatttttttattgtgtttttatatgatagaagagatgagggagtttttagtagtttttttgatagggatattgattttatttatatagtttttgtttttatgatttaattattttttaaggttttatttttaaattttattatatggggaattagattttaatatatgaatttgaggggattataagatttggtttatagtattaggttattttgagttttttgtatttataagaaatttttaattttttataagtatttgttggtttttgttgggtttagggaaatttttaattg

SEQ ID NO: 3359 - DNA, 2402 bp, Artificial Sequence
  chemically treated genomic DNA (Homo sapiens)
ttgtttttgtaggttgagttttggagtttttttgtgtttgggatggagttggagtttatttttttgatttttatttgggagtagtggagttttgagtttttttgaatattggggaggatgggtgtagatggattgtgtatttttgttttttttgttaatttggtgggtaggtgttgagtttataaggttttagaattttataatgaagttagggtgtttggtgggagtttagggagttttagttgttgtttatttttttttttttttaaaaagtttgtttatttgtggtgtggggattattattagtggggagtggttaaggtaggttaggtagggatgtagtttataagttttgtggtattttttttttttttgtggatttttggggtgatttttttgtttttgtttttgttttttagaaatgtttttattaatttgagtgtggtggtttatgtttgtaattttagtattttggaggttgaggtggggtagattatttttggttaggggtttgagattagtttggttaatatggtgaaattttattttgattaaaaatataaaaaatgagttgggtatggtggtgtttgtttataaatttagtaatttgggaggttgagttgggagaattatttgaatttagtggagattgtagtgagttaagatagtattattgtattttagtttgggtgataaagtgaggttttattaaaaagaaaaagaaaaaaaaagttttaatttgtgtgttttgtttttttttaggattaggtttgttaggtagtagtgggagttgattttttagtagatttataaattgaaagttgaattggatgttatgtttttttgagaagatgtagatggtatggtagggtgttgatagtaggtttatgtagagttttagggttatgttgagatatatgttaggttttatagttgtagttggttagttatagatttgggtttatgtttggttagagtttttggttttgtgttttttttgatttgggtttaggattttgtattttggaattttttgtttttttttgtgttgttataaggttaggaagtttgtaatttttatagtattaaggattttaaggaggtttaggagtaggttggtagaggtttgtggtaaaggtgtggtagttgtgattttatttttttttttttatgtgtgtttgtgttttgtggtgttattttatagatattttgtttgagaagggattatgtttgggaatttttagggttggattttgattgtagaatttgatgaaaggggttttgtagggtttagaatgaggaggaggtaatgagaattatttttggaggattttagaagtagaggttgggagtatttataggtgaatggagtttgaattatgattagaaaggaattgggagaaagagatataggaatttgggagttttgggagtagtggggatattattattaggaagttagggggtatttggtaatgaaagtggtagatgtaataaaatttttaatatattgttgtataatgtataataatgtaataaaaatatattttttatatattattgttttaattttagttttatttattgttttttttatatgaatttttttttttatattttattttttagttaattttaattaggttttttgtttatattagttatattaagtttagttgtttattttattttgtgattaggatgagtatttaatttgaaatatgtatttattggtgtattatgtatagtggtttaaatagttttatatgaagttattttagttattatttttttattagttttattaataagtggtttatttaatttgtatatatttattggaatagaagaatttttttggttgtttttattattatgatttttggttataatatgatttatttttatattagtagaaattagttgagtttttttagatttaatagagggggaattagaattaattttgggttttaatgttgaatatgttgtaggtttatttgttttgttttttatagtagattatataaatattattataataaatgttttgaaggttgtaagaggtttgtgggtgtagtgtataggagattatatttggggatagtagttgtagtagattttaagttgggttatttttgttatttgttaggtggtgtttggtgaaggtaagtagtttttatttgtttggggaatatagtgtgatttttggtggtatgttttttagtattattttaggaggtattaggattatttattattggaaatttttgatggagtgttgaaatttatttgtgattaaaatatttttaagggatttgtttattatttttggggttattagttttgttagtgatgatttttttaatggaagttagttagagttatttgagtaatagttt

SEQ ID NO: 3360 - DNA, 2402 bp, Artificial Sequence
  chemically treated genomic DNA (Homo sapiens)
ggattattgtttaggtggttttggttggtttttgttggggggattattattggtagggttggtgattttgggaatggtgggtagattttttgggagtgttttggttatgggtaagttttaatattttattaggaatttttagtggtagatgattttggtattttttggggtggtgttgaagagtatgttgttgggggttgtgttgtattttttgggtgggtgggagttgtttgtttttgttaagtattatttggtaagtggtagggatggtttagtttggggtttgttgtagttgttgtttttagatatggttttttgtgtattgtatttatgaattttttgtggtttttagggtatttattataatgatatttatatagtttgttataaagaatagggtaaatgggtttgtagtatatttgatgttaaagtttgagattaattttgattttttttttgttaggtttaaagaggtttggttggtttttgttagtgtggaaataagttatattatggttagaggttatgatggtaggagtagttagagaaatttttttgttttaatgagtatatataaattaaatgaattatttattaataggattgataggaggataatagttagagtgattttatatgagattgtttgggttattgtatatagtgtattgatgagtgtatattttaaattagatgtttattttgattataggatagagtagatagttaggtttgatgtggttaatataaataggaggtttagttaagattaattagagaatggggtatggggagagggatttatatgaggagggtaatagatagagttagagttggaataataatgtatagggggtgtatttttattatattattgtatattatataataatatgttaaaagttttattgtatttgttatttttattgttgagtgttttttgattttttggtggtggtgtttttattgtttttgaagtttttaggtttttgtgttttttttttttaatttttttttagttatagtttaggttttatttatttgtggatgtttttagtttttatttttagaattttttagggataatttttattgttttttttttattttggattttgtaaagttttttttgttaggttttgtaattaaagtttggttttgggaatttttaggtataatttttttttagatagggtgtttgtgaggtggtgttatgggatatagatatatgtgagagggggagagtagggttatggttgttatatttttgttatgggtttttgttagtttatttttgggtttttttagaatttttgatgttgtgagaattgtaggttttttggttttatgataatataaagggaaataagaggttttagaatgtagggttttgggtttagattggagagggtatagggttagggattttggttagatataggtttaggtttgtggttggttagttgtagttgtggggtttggtatgtgttttaatatggttttggagttttatatggatttgttgttagtattttgttgtgttgtttatatttttttgaagaagtatgatatttagtttaatttttagtttgtggatttgttgaaaggttagtttttattgttgtttggtaggtttggttttggggggaggtaggatatatagattggagttttttttttttttttttttttggtagagttttattttgttatttaggttggagtgtagtggtgttattttggtttattgtaatttttattgggtttaagtgatttttttagtttagttttttgagttgttgggtttataggtaaatgttattatgtttggtttattttttgtatttttagttgagatggagttttattatgttggttaggttggttttgaatttttgattaaaagtgatttgttttgttttagtttttaaagtgttgggattataggtgtgagttattatgtttagattgataggggtatttttgagaagtagggatagagataagggaattattttagaggtttatagggaaggaaaagatgttatggggtttgtaggttgtgtttttgtttagtttattttagttattttttattaatgatagtttttatgttatagatgaataggttttttgaggagaagggggaatgaatagtagttgggattttttgggtttttattaggtattttggttttgttgtgggattttaggattttgtgaatttagtatttgtttattaggttggtaaagggggtagaagtgtatagtttgtttatatttattttttttagtgtttagaaaggtttagggttttattgtttttgagtgagggttagaggggtgggttttaattttattttgagtatagagggattttaaaatttagtttgtaaaagtag

SEQ ID NO: 3361 - DNA, 2500 bp, Artificial Sequence
  chemically treated genomic DNA (Homo sapiens)
aatatttgtatgtttagtagtaatggggttttattgtgttgtttaggttggttttgaatttgtgattttaggtgatttgtttattttggttttttaaagtgttgggattataggtgtgagttattatgttttatttttatttgttttttattataggagttaaagaatattttttttttggtttgtgttttttttttttttttttttttggttttattaagatattttaagatgagtttttgttatttttatttgaaaaagttttgattagtttatttttttgaattaattagaagatataaagtagagtttatttttttggaaatgggttttttatttttttttttttttttttttttttagtttggaaattttttttttttatttttgtttgttttaggttttattggttatgattgttttttattgttgggttttagtttttttttttttttataaattttttttttttttagatgaaaagattaatattgaaaaggtaagttgatgtgttttggtttgtatagagttttggaagtagagttgggatttgaattttgggtttttgattttttgtttagggttttttattttggtagagtaggagattaattttttttttttttttttttttaaatgaagtttttatatatagttatttatatatgtataagtagtttttaaggttagagaagttaattttaaattttagagttgtggaggttttatagattatatggagttttagttagtgattaaatttgaggtaatagtatttggaggtttagttttagtattgaggggagttggagggaaaaattaagttaagagtaaaatttttttgttttgaaaataatagtggtataatataatatttttggattgtgggaaataaaatggagagggatatgattagaaggaaatttttagaattttattaattttatgttttttaaattggtataattggtgataattttagagttatttgttattgtattaaagtttgatagagaaggatgatttataggagtagttttgttgtgtttgaggattgtttgatatttgaaatgagttttggattagtttttggttgaagtttatttaggttttttttgtgaaggttaagttattagagttaattattatttttgttttattttgtttaaatattgttgttggggttgataattgtatttagtgaatatttgtattggaatttggagtatttatttttttttatttgtagtttgaggaattttgattttttggtgatttttagaagtttttggatgtagttgtttgtgaggtggatttgtttgttgttggttttggggttggatgatatgtttggagttttagggaggttgtgaggagtttgttttttggttaggaagtgattgttgtttgtgttgtggtttttaaggataatttttgggtggtaattatttttttttatttaggagattaatttttttgttgaggttttatttaaggttgtagtatttatttattgaggtttttaagaaatttgtttgttttaggaaattttttattgagatttgttttgtattgttatttggtggtaagatataaaaatatattttttatggtgggattagattgtgtgtttgttttgtttttattttgttttttttttggtggtggggtagagggatggtggaaagggaattaagagttagtttttagaagtgtaggtatttgggattgagattggagtggggttatatttttttttttgtttttagtattagttatagttttgttattgtgtttttagttttttttttttttgtagatattggttatttgtgaaattaattgtattttttttttgtattgttttttaggatatttggaattagtgtatagtttattgttagtaattggatagaattgtatggtaggaatttagaagaggagtttaatttttgagtttatatttttttttttgggttttatttttttattttattttatatttagttttttgatgatgtttaggatatttttttagttattttaatttttttttttgtaagggataggagggataaagtaaggttatatatttagaaagagtttgtttattttttgtaagttttagtttttttttttataaagtgggtataagaatttttgttttggagggttttgtgtgtgttttaggagatgttggattaatattagtgtttattttattttttatttttttattttttaggttttttgttagttatgtgatgtaggttaggatgtaaaggagattaatagtatagattattttttttttagtgttatttgtgttttgtaggtttagtgggtgtttttattagagttttgtattttgagtttagtttttatttgttttttggaagatgttggttttagaattttttgttttttttttgtaggtattgtggtatttatagttgatttgtagagagtttagatgtattttataaataaggaatgtatt

SEQ ID NO: 3362 - DNA, 2500 bp, Artificial Sequence
  chemically treated genomic DNA (Homo sapiens)
agtatattttttatttatgagatgtatttgggttttttgtaaattagttgtgaatgttataatgtttgtaggagggaggtagagaattttggagttaatattttttagaaggtaggtagggattgggtttagggtataaggttttagtaggggtatttattgggtttgtagagtataaatggtattggggaaaaagtgatttgtgttgttgattttttttgtattttagtttgtattatataattggtagagagtttggaggatggggaggtgggaaatagggtggatattaatattaatttagtattttttgaaatatatataaaattttttaaggtagggatttttgtgtttattttataggggaggaaattgagatttgtagaaggtaggtaagttttttttgaatgtataattttgttttgttttttttgttttttataaagaggagagttaaggtggttggaaggatgttttgaatattattagaaaattaaatataaaataaggtaggaaaatgaggtttaggggaaggaatgtggatttagagattaagttttttttttaaatttttgttatgtgattttatttagttgttaatagtgaattgtatgttggttttaggtgttttggaagataatgtaaagagggaatataattagttttataagtggttaatgtttgtaaagaggaaagaaattagaggtatagtgatagagttatggttggtattgaaaatagagaaggaggtgtagttttattttaattttaattttagatatttatatttttgggaattagtttttggttttttttttattatttttttattttattattggggagagggtggggtgggggtggagtaggtgtgtaatttgattttattgtggagggtgtgtttttatattttattattaggtggtagtgtggggtaggttttagtaggaggttttttaggataggtaggttttttaggaattttagtgagtgagtgttatagttttaggtggaattttaataaagaaattgattttttgggtggaggaagatggttgttgtttaggggttgtttttaagggttgtgatgtagatagtggttattttttggttgaggggtaggttttttgtggtttttttgggattttgggtgtgttgtttagttttgaggttggtgatgggtagatttgttttatggatagttgtgtttagaggtttttggaaattattaaaggattagaattttttaggttgtaggtggagggaggtagatgttttggattttagtatagatgtttattggatatagttattaattttgatgatggtatttgaatagggtggggtaagagtggtggttgattttgatagtttagtttttgtgaaaggggtttaggtggattttagttaagaattgatttgaagtttattttaagtgttaaataatttttaagtatagtaaggttgtttttgtgggttatttttttttgttaaattttgatgtgatgataggtgattttgagattgttattagttgtattaatttgaggaatgtggaattagtagaattttagaagtttttttttaattatgtttttttttattttattttttatagtttaggagtattgtgttatgttattattatttttagaatgggaagattttatttttggtttaatttttttttttaattttttttagtgttaaggttgagtttttagatgttgttattttagatttaattattagttgaaattttatataatttgtagagtttttatagttttaaaatttggaattaatttttttggttttaagagttgtttgtatatatgtggatagttatgtataaaagttttatttaaaaaaaaagaaagagaagaaattgattttttgttttgttagaatgaagagttttggatagagaattaggagtttagaatttaaattttagttttgtttttagggttttgtgtaaattggagtatattaatttgtttttttagtgttggtttttttatttgagaaagggggagatttatggagggaggaggagattgagatttagtaatggaggatgattatggttaatgaagtttgggataggtagaagtggagagaaagaatttttaaattagaggagaaaaaaaaaaagagggggtaaagggtttatttttaggaaggtgagttttgttttgtgttttttggttggtttgggggagtaaattagttaggatttttttaaatggaaatgatagaaatttattttaaaatgttttggtagaattaaaaaaaaaaaaaaaaaaaaaatgtaaattagggagagagtgttttttggtttttgtgataaaaagtgaatgggagtggggtatggtggtttatgtttataattttaatattttgggaggttgaggtgggtagattatttgaggttatgagtttgagattagtttgggtaatatagtgaaattttattgttattaaatgtataaatatt

SEQ ID NO: 3363 - DNA, 2480 bp, Artificial Sequence
  chemically treated genomic DNA (Homo sapiens)
gagattttattttaaaaaaaaaaaaaaaaaaaaaataaaaaaaaatttaattaattaaaaaataaaaggtatttatttggtaggttttggtaattttagagttaatttgtgtggtgtggtggttaggaggtttagtgtatatttaataaatattagtggttattatgatttatttatagttgtaagttatttttgtgattgggaagtttttagaatttagagtttttgtttttggtaaaatttttttgttttaggtttttttttgttaagagattgttttttttatagtgtgaatagatggttatggattattttataaatgattttttattgaaggtgtttagtttggtttgtttttttaggaagtaggttgaggtttttttagaaagttgtttagaagtagtgtttttttagttgttgtgatgatagttggttgaatgtgttttaatttagttttgatttttgttttttttgagtttgtgtagtagttgtgtttattattaagtgttgttggtagagtttggtggtggaatgttaaagtgtgtgttttagtaaatgtttgttatgtgtttgtgttagtttatgtatgttatatttttgtagtttttagttattttattaataggtttgaattagttttataatattggggagtgaagaatgaatgattttatttttttttttttagtttgtttattttattttttattatattttgtgtttagaatagtgtttggtatgggtagatgtttagtaggtatattttattttatttttatttttgagatagagttttgttttgttatttaggttggagtgtagtggtatgattttggtttattgtaatttttgttttttgggtttaagtgattttttttttttagttttttgggtaagtgggattataggtgtttattattatgtttggttaatttttgtagagagagttttgttatgttggttaggttgagttggagtaatgttttttttattttatggagtttttatttattatagttgttagttttttttaattttaggaatttttgttttaagggaaataggatagatagtgtttgtgttttattttgtttatttttagatgaggaaatagttattaaggttttgtgtaaatttgttgtttatttaatagtttatattatttgttttgttttagttttttgtttgttagttggtgtttttggtagttagtaggtttgtgggggttttgttttagttaggttgggggttgggggttgggttttaggaattttgttgttgttgttggggttgttttaagttagtgtggatagaagtttagagtttaggggtattttagggttgaggggtttaggttggtttttgggttttgggtttagggtagttatttagggtgtgtgtttgtagttaattagggttgtggggaggaaggtttttggtattgttatagtttgtaggttttatgagtttggttttggggttgggaaggtgggagtttttggttttaggaggttgtttttgtttttaatttttggtagagtgtttatgggaggagggggaggagttgtttttatagtgggttatagttaattgtttataggttttaggttgttattttgagttggtttttaggttatagttttttttgtttatagttttattatgttaggattaggataggagtgggtgttgttgatagggaataaagggggtagtgtggggttgagtttttggggtaggtagggtgttttgtgatttatgggttttttattgtttttggaaattttattggttttgttttattatggagggggtagttggttttggttgttttagttgattaggaagttattttggtttttaggggtggtaggtgtttgtgtgttattaatagaaattttgggttagggtgggttggagagtttaaggtttggagtttttatgggggtgttttttttatgtaggaaattgattagagtgtttttaggagtttgttttgaaggtgggggtggggagtggttggtttggttgggttaagggttagtgggttagggttttagtatttttttttttttggttgtaggaggttttgtggtaggtatggggttgttggtggaaggtgtagtaggatggttgtgtagtgggggtgtttgattttttgtttttgttaggtttaggttaggtttttttaagggtttatagtatagatttttgtggagatgaatgaaattgtagttgtagtggaagttatttataaatatgtgttttagtgggtttagttttggggttttttttttaatggtattgttatgttggttggtgtaggtgaagggtttggggttaggaggtgtgagatgaagttagttttgttgaagagtttgtggttgaggagttgttgtttgagtttttagggtttagtgtgtttaggatttgttaatagggtggtagagagtaggtgattgtgttggttggttgttggg

SEQ ID NO: 3364 - DNA, 2480 bp, Artificial Sequence
  chemically treated genomic DNA (Homo sapiens)
tttagtagttagttagtatagttatttgttttttattattttgttggtgaattttggatatattgggttttgaaggtttaggtagtggttttttagttatgagttttttagtgaggttgattttattttatgttttttggttttaagttttttatttgtgttagttagtatggtaatgttattgaggaggaggttttagagttgggtttattggggtgtgtgtttgtagatgatttttattatgattataattttatttatttttatgaggatttgtgttatgggtttttagaggggtttgatttagatttggtagggataggggattggatgtttttattgtatagttgttttgttgtattttttattggtagttttatgtttgttatagggttttttgtagttaaggaggagggggtattgagattttggtttattagtttttggtttagttaggttagttattttttatttttatttttagagtagatttttgggaatattttggttaattttttgtgtgaggaagatatttttatagaggttttagattttgagttttttagtttgttttggtttagggtttttattgatggtatgtagatgtttgttatttttgggagttaaaatgattttttagttgattaggatagttagaattagttgttttttttatggtgggataggattaatgaggtttttaaggataatgaggaatttgtgggttatggagtattttatttgttttagagatttagttttatgttgttttttttgttttttgttgatagtatttatttttgttttggttttgatatggtggagttgtggataggaaggattgtagtttgggagttagtttaggatggtggtttggggtttgtggatagttagttgtggtttattgtgggggtggtttttttttttttttttgtaggtattttgttggagattaagggtagggatagttttttggagttagagatttttatttttttaattttaggattaggtttatgggatttgtagattgtggtagtgttggggatttttttttttataattttgattggttgtaggtatatattttgggtgattgttttgagtttgagatttaagggttagtttgagttttttagttttgaggtgtttttgagttttgggtttttgtttatgttagtttggggtagttttaatagtagtagtagagtttttgaggtttagtttttggtttttagtttggttgagatggggtttttgtggatttgttggttgttaggaatattagttggtgagtgggaagttggagtaaggtaagtgatgtgggttgttgggtgggtggtgagtttgtatgggattttggtgattgtttttttatttgaaaatgagtagagtgggatatgggtgttgtttgttttgttttttttggggtgggggtttttaggattaggggaaattgatagttgtggtaggtggaggttttatgaggtgagaggagtattgttttagtttagtttggttaatatggtaaaattttttttataaaaattagttaggtgtggtggtgggtgtttgtagttttatttatttaagaggttgagggaggagaattgtttgaatttaggaggtggaggttgtagtgagttgagattgtgttattgtattttagtttgggtgatagagtaagattttgttttaaaaataaaaataaaataaaatatatttattaagtatttatttgtgttaagtattattttaggtataggatatagtgaaaaatgagatagataaattgagaaaaaagaaataggattatttattttttattttttaatattatagaattagtttaggtttattaatgaaataattgagggttatgaaaatgtagtgtgtatagattaatgtaggtatgtgatgagtatttattgaaatatatattttggtgttttattattaggttttgttggtagtatttggtaatgaatatggttgttgtataggtttaaaagaagtaagagttagggttgggttagggtatgtttagttagttgttgttgtaatagttggagagatattatttttgggtaattttttggagaaattttaatttgttttttgaaagggtaagttaggttgaatatttttagtagagagttatttgtggaataatttatgattatttatttgtgttataggaaaagtagttttttgatagaggagaatttaggatagggaaattttgttagggatagggattttgagttttgaggattttttagttgtggggatgatttgtagttgtgggtgaattatgatggttattgatgtttattgaatgtgtattgagttttttggttattatattatatagattaattttagaattattaaaatttattaggtaggtattttttgttttttgattggttgggtttttttttgttttttttttttttttttttttgagatggagtttt

SEQ ID NO: 3365 - DNA, 2364 bp, Artificial Sequence
  chemically treated genomic DNA (Homo sapiens)
aagttttttttgtaattgttaagtgggttattaaggtaggggaattgtagtggagaaagagtttaatttatgtagaaatggttgaataggagattagagttgttttttgtttgtttgttttggttttttttttgagatgaaggtttgttttgttgtttaggttggagtgtagtggtgtgattttggtttattgtaattttttttttttaggtttaatttatttttttgttttaattttttaagtagttgggattataggtatgtgttattaggtttggttaatttttgtatttttagtagaaatggggttttattatgttggttaggttggttttgaatttttgattttaggtgatttttttgttttgattttttaaagtgttgggattataagtaggagttattgagattggagtttttttattatttaaattagttttttggagtatttaggggttagggttttttaaaggtagtttaagggaagggtggtgggggtggttaggtaatggggtttgttgttgattggttgggggtgtaatgataggggtgtgggaaatgattttgtatgttgagttatttttgggtgaggttataggagtagttggtaggtttaggtggaattataggtgttagatatataaaaagtttgaaaagatattttaaaaaagtttgggtgtgatggtttatatttgtaattttagtattttgggaagttgaggtgggtggattatttgaggttaggagtttgagattagtttggttaatatggtgaaatttttgtttttattaaaaatataaaagttagttgggtgtggtgatgggtatttgtaattttagttatttaggaggttgaggtaggagaattgtttgaatttaggaggtggaggttgtagtgagttgagattgtgttattgaattttagtttgagtgatgagagagaaattttgttttaaaaaagaaaaaaaaaaagatattttaaaaggttaatttttatgaagggttaggggttttataggtgagtggagttttagtagtttttttagttttgtgtgtttatgtattggttttttttttggttttatatttagtgtttaaggggttgtagtgagatggggtttgggttgtggagttgtgtttggttttgttgttttataagggtattgtggttgttagtttgtttttgtaattgttgtagagttatgtagggttataggtggtggttggttgtgggatttattttttgtgtatgatatttttaggtatttggttgggtgtggttttggtagttagtagggtttttgtattagttggtttagtttgtgttagagggtatggtggttggtatttttttttatattatttttttggaaatttttttaggagttggtgatttttgagtaaaggatttttaaggttattttgtttttagaagggtgtgttttgtttattggtttgttttttatttatatttagggggttttgaaatagaggttgttgttttttttttttgttttagtgtgtggggaaaaggaaggaatgggaagggaggttttgaggatgaaagttttttttaggagttaaggatggagtttttggtattatttgatttatgagagggaagtgggtaggtaagagagattggttttagttttaaggaatgagagatggttgagttattagagatatgattagggatattagtgttattagaaaggggttttgatttagattttaagagagggtttttggtttttatataagaaataatttgaggtgggtttataaagtgaaagtaagtttattaagaaagtaaaggaaggttagatgtggtggtttatgtttgtaattttagtattttgggaggttaaggtgggtagattaaaaggttaggagattaagattagattggttgatatggtgaaattttgtttttattaaaaatataaaaattagttagttgtggtggtgtatatttgtaattttagttgtttgggaggttgaggtaggagaattgtttgaatttgggaggtggaggttgtagtgagttaagattgtgttattgtgttttagtttgggtgatagagtgagattttgttttaaaaaaaaaaaaaaaggaagtaaaagaattaaagaatattttatagatagagtagtagtatgggttgtttgattgagtatatttatagttattttttgattatgtaattgtttagtgggttttttttgtttattgtttagatagagttgattgattaagatgggaattgtaatagagaaatagtaatttatatagagtttgttgtgtgggagattggagttttattattatttaaattagtttttttgagtatttggggatta

SEQ ID NO: 3366 - DNA, 2364 bp, Artificial Sequence
  chemically treated genomic DNA (Homo sapiens)
tgatttttgaatgtttggggagattgatttgagtaatgataaaattttagttttttatatagtaggttttgtgtgaattattgtttttttattgtaatttttgttttgattaattggttttgtttaggtagtgggtaaggagaatttgttgggtagttatatgattaagaaataattgtaagtatatttagttaagtagtttatgttgttgttttgtttatggagtattttttaatttttttattttttttttttttttttttgagatggagttttattttgttatttaggttggagtgtagtggtataattttggtttattgtaatttttgttttttgggtttaagtgatttttttgttttagttttttaagtagttgggattataggtatgtgttattatagttggttaatttttgtatttttagtagaggtagggttttattgtgttagttagtttggttttgattttttgattttttgatttgtttattttggttttttaaagtgttgggattataggtatgagttattgtgtttggtttttttttatttttttaataaatttgtttttattttatggatttattttgaattattttttgtgtaagagttaagaatttttttttggggtttggattgggatttttttttagtaatattaatgtttttgattatgtttttagtgatttagttgttttttgttttttggggttgagattagttttttttgtttgtttattttttttttatgggttagatagtgttaaaggttttatttttagtttttagagaaagtttttgtttttagaatttttttttttattttttttttttttttatatattggggtagggagggagaatagtggtttttattttaaagttttttagatatggatgaagagtaggttagtgagtagggtatatttttttaggagtagaatgattttgaggattttttgtttagaagttgttagtttttggaaagatttttagaaaggtggtatagaggaaggtgttagttattatgttttttagtatagattgggttagttggtgtagaggttttgttgattgttagagttgtatttagttggatgtttagaagtgttatgtataagaagtggattttatagttagttattatttgtaattttatgtggttttgtagtagttgtagggataggttgatagttatggtgtttttgtggagtagtaaagttaggtgtagttttgtggtttaagttttgttttattgtaattttttgaatattgagtatagagttagggagaagattagtatatgggtatgtagagttgagggggttgttggggttttatttatttgtgggatttttggttttttgtgaagattggttttttgaggtattttttttttttttttttttgagatagagttttttttttgttgtttaggttggagtttaatggtatgattttggtttattgtaatttttgttttttgggtttaagtaatttttttgttttagttttttgagtagttgggattatagatgtttattattatgtttagttagtttttgtatttttagtagagataaaggttttattatgttggttaggttggttttaaatttttgattttaggtgatttatttattttggttttttaaagtgttgggattataggtgtgagttattatgtttgggtttttttgaggtatttttttaggttttttgtatgtttgatatttatggttttatttggatttgttaattgtttttgtggttttatttagaagtgatttagtatataggattattttttatatttttattattgtatttttaattagttagtagtaggttttattgtttagttatttttgttattttttttttaaattatttttgaaaaattttagtttttaaatgttttaagagattaatttgaataataaaaaaattttagttttagtggtttttgtttgtaattttagtattttgggaggttaaggtagaaggattatttgaggttaggagtttaagattagtttggttaatatggtgaaattttatttttattaaaaatataaaaattagttagatttggtggtgtatgtttgtagttttagttatttaggaggttgagataggagaatgggttgaatttgggaggaggaggttgtagtgagttgagattatgttattgtattttagtttgggtgatagagtaagtttttattttaaaagaaaaattaaaataaataaataaaaaataattttggttttttgtttagttatttttgtataaattaaattttttttttattgtaatttttttgttttgataatttatttggtggttataagaggagttt

SEQ ID NO: 3367 - DNA, 2467 bp, Artificial Sequence
  chemically treated genomic DNA (Homo sapiens)
gagaggttttggaagggtaggggtgtgtggtgatattgggtgtttttgggttttagtatttttttagttagttggaagaatataggtaagttaagtttttttttttttttgagtttttaattttttattggtaaagtagggatgataaaaataaattattaaattgttgtgaggttttaatgagggtaaagtttgttgtttgaaatagagtaagtttttgtggtgttttagttatttgtattagttatttgtatttttttttgtggttttttttttaatttttattttttttttattttaaaaagattttttttgaaaatgttagtttgttttagtagtattaggagatattagggaaaggtttttttttttttaagttgaggttgagaaggaatgggaagaatgaagagaagtatttttgtggaggttttttttagttggttttgggtttaggaatattatatatttaatttttaaaggtttttaggggttggtttaaggttatatagtttgatagtgtggagtattttgaagttagggtgtgtggtgtagaataggttgggtgtttgaatttaattagttttttttatttttttatttagagttttttaggttgtggggtgtttatttgtgtatttttaagttgattatttttttggggtttttgttaatttaattttatggaaatattataaggggtagatagagatgagttgtgttagtgtttgtattagtagagggtaggattattgagtgtttggaggggagatgagtgtttgggtgtttttgggaatttggtttgttttgatttttttggggggttttttttggttttgatttttatttttttagatttatttttatttatgtttatttattttgaggggttttttagtgtgtatttatatatttatatttaaatttattattttatttgttttttaattattaggaatgtggtgttgttttaggtttttttttttttgtattttttagtagttgtttttattgggtagggtaaattatattgtggtttgattataaaagttattttttaaaaaaagaagttttaaggtttttgagagatgtagttgagttttttatttggtagtgtttgatttaggaggtgatgtttgggttatgagttatagagtttggtgtttttttaagtagggagtataaatttttattttttttttttgttttttttgatgttagttggaaggtgtgtgagtgagtgaggggttgaggtattgtttgtgtgagtatatatagatatatatatatatatatatatatatatatatatatattttttagatttattttttgtttgttagttttatgagttagagagagatagagtgtggatgttgtaggaggtagtgtttggattttagttgtttaggagaggtgaggggttagatggggtttgaggatattgtgttagaaattgtggttttggttaggttgaaggagagaggtataatgtgaaggtgggggttggattagtttagtttagtttatagatagggtgttgggggtatagaggatattatttgttttttttttttttattttttttttgtgatttttaaatgaggtgaggttgtgtggtttttgtgggagtatgtttgtgtttgtgtttgtgtttgtgtttgggatttgtgtttggtttaggaggtagagagtagtagatatttgttaagttgtagttttttgtttgggaagtagtgggagagaggattgttttgattagagaaattttagtgttgtttttagttgttgaaagtagagtgtagtagggatttttgttggttttttttttggaatgttgggttgggaagggattggttgggaaaggtagatagttggatttggagtagttgttttattttgattttattttttttttagtgtgatggggataattgtgttagttggtttagagaggtggttttgtgtggttattttttttttttaggtattattttattttgagtttttgttttttgtttgtttgttggtttgttttgatttttatttttgttagggtatagtttttggagggtaggggtgataagttagggtttgttaggtttttattttgggatatagggatttagggtggttttggttggtgttaagtttatgaatggtttgattttggtataaggagtttaggtggagataaggggtgatgttggtatttataaggagatagtaggtttttgttaagttgttagtttgtaggttttttttagggagaggggagggggatatagagtgagaataataataaatatagagtgtgaattgttgtatttattggggttggggtaggagaggaggaagtatgtttagtggggggtgggtaatttttttgagagtttggtattatgttgtttggttgtgatttggtaggggtttttttttgggaaagggggtttttagttttttgggggat

SEQ ID NO: 3368 - DNA, 2467 bp, Artificial Sequence
  chemically treated genomic DNA (Homo sapiens)
attttttagaaagttggagatttttttttttagggagaggtttttgttggattatagttaggtagtatgatgttaggtttttagagaggttgtttattttttattgggtatattttttttttttttattttagttttagtggatgtagtagtttatattttgtatttattattgtttttgttttgtgttttttttttttttttttgggaagagtttgtaggttggtagtttggtaggaatttgttgtttttttgtgggtgttagtgttgttttttatttttgtttggattttttgtgttagggttaggttatttatgggtttggtattagttaaggttattttaagtttttgtattttaagatagaggtttggtaggttttgatttattatttttgttttttgggggttgtgttttggtaagggtggaggttagagtagattagtaggtaggtaagaagtaagggtttggggtggggtggtatttgggggaagagaataattatatggagttatttttttaagttaattaatataattatttttattatattggggaaaaaatagagttaggataagatagttgttttaggtttaattgtttgttttttttagttggtttttttttagtttaatattttaggggaaggattagtaagggtttttgttgtattttgtttttagtaattggaagtggtattggggtttttttggttaaggtggtttttttttttgttgttttttagataggaggttgtggtttggtaggtatttgttgttttttgttttttgagttagatgtaggttttagatatagatatagatatagatatagatatgtttttatgggagttatatggttttattttatttgggggttatggggagagaatgagggagggagagataggtggtattttttatatttttaatattttatttgtaagttgaattgggttgatttagtttttatttttatgttgtattttttttttttggtttggttaaagttatagtttttggtatagtgtttttaggttttatttagttttttattttttttgggtagttggggtttaggtattgttttttgtggtgtttgtgttttgtttttttttggtttgtggagttggtaggtaggggatgggtttggaagatgtgtgtgtgtgtgtgtgtgtgtgtgtgtgtgtgtgtttgtgtgtgtttgtgtgggtggtattttagttttttatttatttatatgttttttagttgatgttagggagagtaggagggagggatgagaatttgtattttttgtttaaagggatattaggttttgtggtttatggtttagatattattttttgagttaggtattgttaggtgagaggtttagttgtgttttttgggggttttaaagtttttttttttggaaagtggtttttatggttgggttatggtataatttgttttgtttagtgagggtagttgttgaggaatgtaggggaggaagaatttgagatagtgttatgtttttggtaattagagagtaagtggggtggtgagtttgagtgtgagtgtgtgagtgtatattggggggttttttggggtgggtgggtatgagtgggggtgagtttgggagaatggaggttagagttaagaggagttttttagaggggttgagataagttaggtttttagggatatttagatatttgttttttttttggatgtttagtggttttgttttttgttagtatagatattgatatggtttatttttgtttattttttgtaatatttttatggaattgaattgatgaggattttaaggaagtgattggtttgaaggtgtataggtgaatattttatagtttgggaggttttgagtagagaagtagagagggttgattgaatttaggtatttagtttgttttatattatatgttttggttttgaagtgttttgtattgttaagttgtgtgattttgggttagtttttgagggtttttggaggttgagtgtgtgatgtttttaaatttagggttagttggaggaggtttttataaaggtgtttttttttgttttttttatttttttttagttttagtttggaaagaaggaagtttttttttggtgttttttggtattattgaggtaggttggtatttttaaaaggagtttttttaaaataaaaaggaggtgggagttaaaagggaaattgtagagaaaaatataagtaattaatataaatagttaagatgttataagagtttgttttgttttaggtagtaagttttgtttttattgaaattttataataatttaataatttatttttattatttttattttattggtgaggaattagaggtttagggaggaggaaggatttgatttgtttatatttttttaattggttagagaggtattggaatttaggagtatttagtgttattatatgtttttgtttttttagaatttttt

SEQ ID NO: 3369 - DNA, 2366 bp, Artificial Sequence
  chemically treated genomic DNA (Homo sapiens)
gatttatgtgttttagtgtttttttttgtaatatgggggtgatgattgtatttattttataaggaagtttttagtaaaatgaaagtttttaaaattatgtttgttttattattaatgattttataaatattagtaataatattagtattaagttttgttattttttattaattttttgtaaatgattttatttttttgtttttatatattttttatatttgtattttatttgatttagttattttttgtttaatttgttagaaagggtagatagttttttagttatttgttgttagggaaatttattattttagtttggatggtgaagattttagtttgagagattagtttgggtttgaagtgtttttttatttattgtgttgagattttttttttttgaattttgttatgtttttgtatatgttgttttttttatttgttatgtttttattttttttttttttattgtaaatttttatgtagttgttaaggttttatttttttttggaaagtttttttgatttttttggtaataattattattaatatttatttattgagtttattttgtgttaagtattgttttagatatgggtatgtaattgtgattgagagagatagattatgtatagtttggattttattttaagagttattgggtgttgttggtgggtttgagtgagtggggttaggaagtgatttatttttttgagggtttgtgggagttttagtttaggggtgggtagggggtgtggggaagtttgtagttgagagtttaggtaggagttttttgtgtggttttgggagaggaaggggtttggtttggggtggggtgtggaggtgggaggatggtggtgtgggatggagggtggaggttaggttgatagggtgttggtggtgggttgtgggggttgattttaggttttggtttatgtagttgttattttggaggtgaatagtttgtggggaaattggtatggtttggggaaggtggggagagggggagaaatgaaagtattgagtttaagtggtttgtagaattttgggggtttaggtggtatggtgggtgttggggttttgggtagagttttttggaggtttgtggtagttttatttttatggtatttattttttttgggttttgttgtagagaggaggaagtttttgttggttgagtgggtttggaggaagtgagtagtggggtttttgttttttggtttggtttttgaagattttagaagaatttggaatttgtttttatttggaatttagggattattttttgtatttagtaggtttttgtttttttgtgtggaaagtggttgggtgagttttggtattggggttattatatttgagtgttgggggttatggagggaggggtttagatattatttgggaaggattttagagtgtagttttagtttaggttatttggggaagggagttggtaaagtgggattttgagtttttatggtttttttggttgtttttgtttagaggttgtttggtgttttttttttttgttttattgaggagttgttgtttttgaattttagttaatttttttgtttttaggtgaagaaattgaggttttggggttaggaaggggtttgtttaggttgttgatttttttgggtagtattgagtttaggttttttttgtaattatgtattaggattagagagggtagggggtttgtttaatgttatatagtttgagtgaggaggagttggtttgggatttaggttttttgatgtttaggttaggtttttttgttttttttggttatggtttttagtttggatattaaggggttgggagttagttgtgtttttattatttttatgttatagggtaggatggagtttggtattttttgttttaggttggttgttggtgtgatatgggtggttttagttgagtgaatgtttttgttttttatagtttagggggttttttgttttggttattaatttttgttatgtgatttttttattttaatgtttgattgagtttgaaaatattgagaagatttaggggttgaaaagggaggaagagggaggttagaaggtgttagttgagttagtgaagtttttataggagaggaagtgggttaggggaataggaaggagggttgggttggtttttgggtttgtttttgttttgggtatgtggtgagtttagttttttgtttgtaatgaggaggaggaagatgaatagtgtttttgttaattttggtttttttggtttatgggatgggagatgttattattttatgtatttattttagttagttttatataggttgattggggaggttttttttgagtttaatttgataagttttgaggagtgagttgtat

SEQ ID NO: 3370 - DNA, 2366 bp, Artificial Sequence
  chemically treated genomic DNA (Homo sapiens)
gtatagtttattttttagagtttgttaggttgagtttaagggaaatttttttggttggtttgtgtggggttggttgaggtggatatgtggaatggtgatattttttattttataaattggaagggttagggttgatagaggtattgtttattttttttttttttattataggtagaaggttgggtttattatatgtttgggataggggtagatttagaggttagtttagtttttttttttgtttttttggtttatttttttttttgtgaaggttttgttggtttggttggtgttttttggtttttttttttttttttttttagtttttgggtttttttagtgtttttaaatttaattagatattgaggtaggggagttatatggtagaagttggtggttagagtagggagttttttgagttgtgggagatggaggtatttatttgattggagttatttatgttatattagtagttagtttggggtgggggatgttagattttattttgttttgtagtatggaggtggtggggatataattgatttttagttttttaatatttaagttgagggttatggttagagaaaatgaaagagtttggtttgggtgttaggaagtttgggttttaggttagtttttttttatttaggttgtgtgatgttgggtaaattttttgttttttttggttttgatgtatggttataaggagggtttggatttgatgttgtttaaagggattagtagtttgggtaagtttttttttggttttagggttttagtttttttatttggagatggaggggttggttgaagtttagaggtggtaattttttagtagaatagggagggaggatgttgagtagtttttgagtaggggtagttggaggggttgtggggatttaaggttttattttattgatttttttttttgggtggtttgggttgggattgtattttgggattttttttaggtggtgtttgggtttttttttttgtgatttttaatatttaagtatggtggttttgatgttagaatttatttaattgttttttatgtaggaaaataaaggtttattgagtgtaaagggtggtttttggattttgaatggaagtaagttttgggtttttttggggtttttggggattaggttgggaggtaggagttttgttgtttattttttttaggtttgtttagttggtaggagtttttttttttttgtggtagggtttgaggggggtggatgttgtgaaagtgaagttgttataaatttttagaaagttttgtttggagttttagtgtttgttgtgttgtttgggtttttggggttttgtaggttatttaaatttaatgtttttatttttttttttttttttgttttttttaaattatgttagtttttttgtaggttgtttatttttaaaatggtagttatataggttagagtttggggttgatttttgtaatttattattagtattttgttagtttggtttttattttttattttgtattgttgtttttttatttttatattttgttttgggttaggttttttttttttttgggattatgtaggagatttttatttggatttttggttgtagatttttttatgttttttgtttgtttttgagttgaggtttttataagtttttggaggagtgagttattttttgattttatttatttaaatttattaatggtatttaatagtttttaaaataaaatttaggttgtgtgtggtttgttttttttaattgtggttatatatttgtgtttagaataatgtttggtataaagtgggtttagtgaataaatattggtggtggttgttgttaaggggattgggaaggttttttagaggagaatggggttttgatggttgtataggagtttgtagtggaagaagaaggggtgagaatgtggtaggtggagaaaatagtgtatgtaaaggtatagtagggtttgagaaggagagattttagtatagtagatagagaaatattttagatttgagttggttttttaagttggaatttttattatttgggttgaaatggtgagtttttttagtaataggtgattgggaagttatttattttttttgataggttaggtagaaagtggttaaattaggtgggatgtaggtgtaaggagtgtgtgagagtaggaaagtagggttgtttataagaagttaataaaaaatgataaaatttagtattggtattgttgttaatatttatggagttattggtgatgaaataaatataattttaagggtttttattttattggaaatttttttgtgaggtaggtataattattatttttatattatagaggaagatattgaggtatatgagtt

SEQ ID NO: 3371 - DNA, 2333 bp, Artificial Sequence
  chemically treated genomic DNA (Homo sapiens)
ttgatatatatgtatatatatatagagtgtatatatatgtatatatgtgtagttgtattttttggtgtgtttgttgtgagggtataggggtgggtaggttggtaggtatgtgaagttgttattagttttgagggattgtgagtgagttgggatttgggggagaaaaaaatgggggtggatgttagttttttgggtggttgttgttattgtttttgtttttttgaggttttttttgtatttttgggtagtgaagttttttgttaagatgggggttgatgttattttgggttgtttagttaggggatttgggggttttggtggttgtttttggaagtgagttagttgtttgttggttgataggtttggaatttttagttagaggatagaaaatttgtatgggttaggtgagtggggtttggttgagggtagttgggtagggggtagtagggtgtggtagtttgtttattggaattttttagggtgtattttaggggggttgtttatttgaagggaagtgaggatgagggtgtttaaaggttgttttttttatttttatttttatttttattttttgttttttgggattgttatgttttggagtgagtgtagttggtttgttttttaaagttttttgttttggttgattagttgggtgagttttggaattggaatttggattgtttagtgtgttgattttataattttgttggggtggatttttagtttggtatttagttgttttttaattttgagtggtatttgtggatgtagttggtttttggtttagggatgtttatttatttttggtttgtttgaagaaagttgttgtttttaatttttttttttttaagtaagtttaaaatttttatgagtaaaagagtttaaagaggtaagaggatattggtgttttaattgttttttttttttttaattttttttttttttttttttttggttggttttatggattatttgggagataaatttatagtggtttagatttatatgatttagtggatgggtattgtgaggaggtttttttaggaagtttttaatttggtgattattatggtgggttatgaatggatgagtgtagagttggttagttggattttttttaagtgtattttttttttttgatatttggttttttggagttgggaatttttttgttgtttttttgtttgtagttaatagagattttttttattgaggaaaaggtatatagatttggaattgttagatattgtaagtttattatgttttaaaaaatattaaaataatattgaaagttttttttttttagtttttttagggagggggttttagatattaaattggggaagttattttttttagaatagttgttagttaaagtttaggtattttttgttttttgtatttgggaaagaggtatgtagtaataattttttttttttgaagttagttaggatatttttgttggagttgatgtttgtgtggatagggttagtatgtgagttgggttgaatttgttagttgatttatgtttaagtgtgaatattttaatttttgatatgaaagtttatttttttttttatttttagggtggattagtggtatttgttttatttttttttatttttttaggaagtataagtggtggtgttatgtgtatgttgagttgtagtttttgttgttttattgagtttttattggattgttaaggaaagggttttaggagattgaggtgtggtgggtgagtttgtttgttggttgtgaattttgggtttggtgtgagtgggttagggagggaggttttgattttttatttaggtaggtttgggagggtttggattgggatagtagggtggaatgatagttaatgattaaaattttggtttgtgttttgttaggtgatagtgtagaaataattgtaaggtttttttgatgatttggagaggtgggattgggtttagaaagtgaaagtgtttattgtgggggaagtatagtgagtgagtggtagagttaggttttgaattttaggttttgatttttttatttatggttttttgtagtttagtttttagtagatgttttttttagatttttttaattaatttagggttgtttaggttattgattagatttgagtttaaagagagggtttgttatttttatataggagatttttgttatttgattgtgttggtttagtttatgggagtatttgaggataggtgaagggttaagttagtttttttttttgggttttttttagttaggagtgttatagttattaagggatttagtatttagggaggagttttgagttggttttttttatatttgag

SEQ ID NO: 3372 - DNA, 2333 bp, Artificial Sequence
  chemically treated genomic DNA (Homo sapiens)
tttgagtgtagggagggttagtttagggtttttttttaaatgttgggttttttaatgattatagtatttttggttaggaggaatttagaaaaaggggttggtttagttttttgtttgtttttaagtgtttttataaattgggttaatatagttaggtggtagaagttttttatgtgaaaatggtaggttttttttttaggtttaggtttggttagtgatttgggtagttttgaattaattgggagggtttggggagaatatttgttgggagttggattgtaaagagttgtgaatggggaggttagagtttggggtttgggatttggttttgttatttatttattgtgttttttttatagtaggtatttttgttttttgggtttagttttatttttttaaattattagaaggattttatgattgtttttgtattgttgtttagtaggatataggttaaggttttaattattagttgttattttattttgttgttttaatttaagtttttttgagtttgtttgagtaagaaattaaggtttttttttttggtttatttatattaaatttaaggtttatggttagtgggtaaatttgtttattatattttggttttttaagattttttttttggtaatttaatgaaagtttggtggaatgataaaagttataatttagtgtgtatatgatattgttatttgtgttttttaggagggtgagaggagatgaggtaggtgttattaatttattttaaaaatagggagaaggatgagtttttgtgttgggggttggggtgtttatatttaaatataaattaattggtaaatttagtttaatttatgtgttggttttgtttatatagatgttgattttagtaaaaatgttttgattgattttaggagagaggaattattgttatgtgttttttttttaggtataggggataggaagtgtttgggttttgattgataattattttggaagaagtaatttttttggtttgatgtttgggattttttttttgggaggattggaggggaggagtttttagtgttgttttaatattttttaaaatataataagtttataatatttggtggttttgaatttgtatgttttttttttagtgaagaaaatttttgttggttgtgagtagagaagtggtggaaggatttttgattttgggaagttaggtgttggaaggaggaagtatgtttgaagggggtttggttggttgattttgtatttgtttgtttgtggtttattgtggtggttattaaattgagggttttttggaaggatttttttatggtgtttatttattgggttatgtgggtttgggttattgtgagtttattttttaggtaatttatggggttagttaggaggagagggaagaaggaagttagggagggagagagtaattaaaatgttagtgtttttttgtttttttggatttttttgtttatggaagttttgggtttgtttggaggaaaaaaaattaaaaatagtagttttttttaggtaaattaagggtaagtaaatatttttgagttaggagttggttgtatttatgggtgttgtttagaattaagaggtagttaagtgttaggttgggagtttattttagtggagttataaagttaatatattgggtagtttaggttttagttttagggtttatttagttgattggttgagataaggagttttgaggaataagttggttgtatttattttagggtgtgatggttttgaaaggtgggggatggggatgggggtgggggtggagggggtggtttttgggtatttttgtttttatttttttttaggtaggtagtttttttgaggtgtattttgggaggttttggtgggtaagttgttgtattttgttgttttttgtttggttgtttttggttagattttgtttatttgatttatgtaggttttttgttttttggttggagattttaaatttgttggttggtaggtggttagtttatttttggaggtagttattagggtttttgggttttttggttgagtagtttgggatgatattagtttttgttttagtgaggggttttgttgtttaggaatgtaggaggggttttggggaggtggaggtggtggtggtggttgtttagggagttgatgtttgtttttattttttttttttttaagttttaatttgtttatggttttttggggttgatggtaattttatgtgtttgttagtttatttatttttgtgtttttatagtaagtgtattaggaaatgtggttgtatgtgtgtgtatgtgtgtgtattttgtgtgtgtgtgtgtgtatgttgg

SEQ ID NO: 3373 - DNA, 2378 bp, Artificial Sequence
  chemically treated genomic DNA (Homo sapiens)
gttaaggttggaataatatagtgatttagttttttgatttggttatatggagtggggttaggtttgttttttttgttttttattttttttttaattttatagttttttgagatttagatgttataagggtttaggtgtttatataggggtttaggagtttgttggtgttttgtatgagatttgtttgtttttggagttggttaaggagtatgtggtatttttttgagtagttgtttatagttgttatgtttgttatgtttggaaataggagtgtaaggattagatttaaggtagagaagaggggtgttatttgatttggtgaggaaagttatagatgggagttttggggagggggtttaagagggttttgaaaggtgttttttttattttagattttgtgtagtggagggtgggggttgggtattgtgtggtatggtgtgtgtttaggtgtgtttattaaggttattattatttttttagtaagttattgtttagggtttgatatagtaagtagtgggagggattgagatagtggttgtgatttattaagtaggtttttgagtaaaggttgtagtgtttggttggattttagttttgtttatagtatggttttaattttgggagttgattttttgtaaggtgggattggttttttgtaagattattgggttaaagattggttattgttttaggatttgttttgttagttgttttggttatttaggtagatgggtttgagagggttttagggtaggtagtttgggagtagtttgtgtttttagttttgtttagaattaggagaggttgtttttttaattagaggtgtagtttggaatagatgtggaagattttttagtttatgtttttatttttttgataggtaaattaagttttaggagaaggttttatttaggttatataaggttagggtttttttttgattttttttgttttttttttttttttataagtggttttttttgttaggtttattagggatgttgtgagtttgttagaaggtgttgggggtgggtatagttattgtttattattatttttaatggggtattggtagttatgtggttggaaggggtttatggtgtaatggtttggaaggtagtgatattattgtttttgttttaagaattatttggttttttggggaagattggttgttggggagggttaaggggttaggtatttaggtttagtgattttatggtatttttgttgtttttttaggtatttgttgttgggttttggtaggggtttgtgtttgtggtagtgtatgtgggattggggtttttgtgtggttgtgtatttgggtttgtgtgtggtgtgagggagatttgttttgtttattatggggattttggtttgtatgtgggggtttttgggttggtgagatttagggttgtagatgatgttatatggttgtgtgtgtatgtggttatgtgggtgtggttgtgtatgttgtgtgattgtgtgggttttggggtttttaggtttggttgattttttatttattttgggtaagttggaggttttataatttttttatattttatattatttttttgtttagtttttgagttttttttttttgtttagtttttttgtttattttatttttttattttttggtttttagagttgtttttatattttgatattatttttttttggaagttttttagggatgttttttttttatttgtggagatgttaggtttttagtggattattttttttgtttgattttttggtttttttttttttttagtatttttttgtttggtgtttggtttttttagtttttggagggtagagggtgtttttgttttttattggtatttgtgggtagatttagtaggtgggttttggtggggaggaaggaagtatttattgagtagtgttttttgtgtgagtagtatttttatgttgggtgtttgtgttttggtttgtgtttgttgggggtgatattttttggttgggagttttgtaggttggtagttattttatgtttgttggggtgattggttaatattttatgaggtgggtggggatggggaggggggagggtaggttttttgggaatatgattttaaaaattaaaatttttatgggtggttaatgggtgtagggtgtggtgtatgtttgtttttttttttgttttttttgaatttgttttttgaggttagttttatgtttaaggatgatgtaaaattgtagttttagtttttttagggtgagtggggaggaaaagggtttatgttatttttagggaattgggttagggatgggtaggagggattttgagttgggtttttggaggttttaggttagttttggtttaggagttattggttttataggat

SEQ ID NO: 3374 - DNA, 2378 bp, Artificial Sequence
  chemically treated genomic DNA (Homo sapiens)
gttttgtgaggttaatggtttttgggttaagattggtttggggtttttagaggtttagtttgaagttttttttgtttatttttggtttagttttttgaagatggtatggattttttttttttttatttattttaggaaggttgaggttgtggttttatattatttttgggtgtagggttgattttgaagaatgaatttgaagaaaataggaggaggagtgggtatatattgtgttttgtgtttattggttgtttgtggaaattttggtttttggggttatgtttttagaaggtttgtttttttttttttttatttttatttattttatgaggtgttggttaattgttttagtgggtataaagtggttgttagtttgtagggtttttagttgagaggtgttatttttagtgggtgtgggttggagtatgggtatttagtatgggggtattgtttatatagaggatgttgtttagtaagtattttttttttttttgttagaatttgtttgttgggtttgtttatgggtgttggtggggagtagaggtattttttgttttttgggaattggggaggttaggtgttaggtagaaggatgttgagaaggggagagagttaggaggttaggtagagagagtggtttattgagaatttggtatttttataggtagagaaggggtatttttggaaggtttttagggggaggtgatgttaagatgtagaggtaattttgggaattagggggtgagagaataggatgggtaaagaggttgggtaggagagggaggtttagaagttgggtagggaagtggtgtgaggtgtggaggggttgtggggtttttagtttgtttgggatgaatagaaagttagttaggtttgggggttttagggtttatataattatatagtatgtatagttatatttatatggttatatgtgtatatagttatatgatgttatttatagttttggattttattagtttaggaatttttatatgtagattagagtttttatggtgaatggaataggttttttttatgttgtatatagatttagatgtatagttatatagaaattttagttttatgtgtgttgttataggtataggtttttgttagagtttggtagtagatatttggggaggtggtgagggtgttgtggggttgttaagtttgggtgtttggttttttggttttttttaatagttagttttttttaaagggttggatggtttttaggatgggaatgatggtgttattgttttttgggttattgtgttataggttttttttgattatgtggttgttggtgttttgttgggggtggtggtgagtggtaattgtatttgtttttaatattttttgataggtttatagtatttttggtgggtttgatagaaggagttatttatggagagaggagggaggtaagagaggttaggggagagttttggttttgtgtgatttgagtaggatttttttttgagatttggtttatttgttaggaaagtggggatatggattggaaggttttttatatttgttttaggttgtatttttggttgaaaaggtagttttttttggttttagatagagttgaggatataagttgtttttgggttgtttgttttgaagtttttttaggtttatttatttggatggttagagtagttgataaggtaggttttagggtagtggttggtttttagtttagtggttttgtagggagttagttttattttgtagagagttagtttttgaggttagaattgtgttgtaggtaggattgggatttggttaggtattgtagtttttgtttaaagatttatttggtaaattgtagttattgttttagttttttttattgtttgttgtgttaggttttgggtagtgatttattggggagatgatggtggttttggtgggtatatttgggtatatattgtgttatatagtgtttagtttttgttttttattatataaagtttgggatgaaggaggtattttttaaggtttttttgaattttttttttgaggtttttatttgtggttttttttattaagttaggtgatattttttttttttgttttaggtttggtttttgtatttttgtttttaagtatggtgagtatggtggttataggtagttgtttgaaagagtattgtgtgttttttggttagttttagaagtagatagattttatgtaggatattagtagatttttggatttttatgtaagtatttgggtttttgtggtatttgagttttagagaattatggggttaggaagggagtgagaagtagggaggataggtttagttttattttatatggttaggttggggaattgagttgttatgttattttagttttaat

SEQ ID NO: 3375 - DNA, 2269 bp, Artificial Sequence
  chemically treated genomic DNA (Homo sapiens)
agtttgttggtgttttgtatgagatttgtttgtttttggagttggttaaggagtatgtggtatttttttgagtagttgtttatagttgttatgtttgttatgtttggaaataggagtgtaaggattagatttaaggtagagaagaggggtgttatttgatttggtgaggaaagttatagatgggagttttggggagggggtttaagagggttttgaaaggtgttttttttattttagattttgtgtagtggagggtgggggttgggtattgtgtggtatggtgtgtgtttaggtgtgtttattaaggttattattatttttttagtaagttattgtttagggtttgatatagtaagtagtgggagggattgagatagtggttgtgatttattaagtaggtttttgagtaaaggttgtagtgtttggttggattttagttttgtttatagtatggttttaattttgggagttgattttttgtaaggtgggattggttttttgtaagattattgggttaaagattggttattgttttaggatttgttttgttagttgttttggttatttaggtagatgggtttgagagggttttagggtaggtagtttgggagtagtttgtgtttttagttttgtttagaattaggagaggttgtttttttaattagaggtgtagtttggaatagatgtggaagattttttagtttatgtttttatttttttgataggtaaattaagttttaggagaaggttttatttaggttatataaggttagggtttttttttgattttttttgttttttttttttttttataagtggttttttttgttaggtttattagggatgttgtgagtttgttagaaggtgttgggggtgggtatagttattgtttattattatttttaatggggtattggtagttatgtggttggaaggggtttatggtgtaatggtttggaaggtagtgatattattgtttttgttttaagaattatttggttttttggggaagattggttgttggggagggttaaggggttaggtatttaggtttagtgattttatggtatttttgttgtttttttaggtatttgttgttgggttttggtaggggtttgtgtttgtggtagtgtatgtgggattggggtttttgtgtggttgtgtatttgggtttgtgtgtggtgtgagggagatttgttttgtttattatggggattttggtttgtatgtgggggtttttgggttggtgagatttagggttgtagatgatgttatatggttgtgtgtgtatgtggttatgtgggtgtggttgtgtatgttgtgtgattgtgtgggttttggggtttttaggtttggttgattttttatttattttgggtaagttggaggttttataatttttttatattttatattatttttttgtttagtttttgagttttttttttttgtttagtttttttgtttattttatttttttattttttggtttttagagttgtttttatattttgatattatttttttttggaagttttttagggatgttttttttttatttgtggagatgttaggtttttagtggattattttttttgtttgattttttggtttttttttttttttagtatttttttgtttggtgtttggtttttttagtttttggagggtagagggtgtttttgttttttattggtatttgtgggtagatttagtaggtgggttttggtggggaggaaggaagtatttattgagtagtgttttttgtgtgagtagtatttttatgttgggtgtttgtgttttggtttgtgtttgttgggggtgatattttttggttgggagttttgtaggttggtagttattttatgtttgttggggtgattggttaatattttatgaggtgggtggggatggggaggggggagggtaggttttttgggaatatgattttaaaaattaaaatttttatgggtggttaatgggtgtagggtgtggtgtatgtttgtttttttttttgttttttttgaatttgttttttgaggttagttttatgtttaaggatgatgtaaaattgtagttttagtttttttagggtgagtggggaggaaaagggtttatgttatttttagggaattgggttagggatgggtaggagggattttgagttgggtttttggaggttttaggttagttttggtttaggagttattggttttataggatatggtggttgggggttgaggggagtgagatatttttttttttgagt

SEQ ID NO: 3376 - DNA, 2269 bp, Artificial Sequence
  chemically treated genomic DNA (Homo sapiens)
atttaagaaggaagatgttttgttttttttagtttttaattattgtgttttgtgaggttaatggtttttgggttaagattggtttggggtttttagaggtttagtttgaagttttttttgtttatttttggtttagttttttgaagatggtatggattttttttttttttatttattttaggaaggttgaggttgtggttttatattatttttgggtgtagggttgattttgaagaatgaatttgaagaaaataggaggaggagtgggtatatattgtgttttgtgtttattggttgtttgtggaaattttggtttttggggttatgtttttagaaggtttgtttttttttttttttatttttatttattttatgaggtgttggttaattgttttagtgggtataaagtggttgttagtttgtagggtttttagttgagaggtgttatttttagtgggtgtgggttggagtatgggtatttagtatgggggtattgtttatatagaggatgttgtttagtaagtattttttttttttttgttagaatttgtttgttgggtttgtttatgggtgttggtggggagtagaggtattttttgttttttgggaattggggaggttaggtgttaggtagaaggatgttgagaaggggagagagttaggaggttaggtagagagagtggtttattgagaatttggtatttttataggtagagaaggggtatttttggaaggtttttagggggaggtgatgttaagatgtagaggtaattttgggaattagggggtgagagaataggatgggtaaagaggttgggtaggagagggaggtttagaagttgggtagggaagtggtgtgaggtgtggaggggttgtggggtttttagtttgtttgggatgaatagaaagttagttaggtttgggggttttagggtttatataattatatagtatgtatagttatatttatatggttatatgtgtatatagttatatgatgttatttatagttttggattttattagtttaggaatttttatatgtagattagagtttttatggtgaatggaataggttttttttatgttgtatatagatttagatgtatagttatatagaaattttagttttatgtgtgttgttataggtataggtttttgttagagtttggtagtagatatttggggaggtggtgagggtgttgtggggttgttaagtttgggtgtttggttttttggttttttttaatagttagttttttttaaagggttggatggtttttaggatgggaatgatggtgttattgttttttgggttattgtgttataggttttttttgattatgtggttgttggtgttttgttgggggtggtggtgagtggtaattgtatttgtttttaatattttttgataggtttatagtatttttggtgggtttgatagaaggagttatttatggagagaggagggaggtaagagaggttaggggagagttttggttttgtgtgatttgagtaggatttttttttgagatttggtttatttgttaggaaagtggggatatggattggaaggttttttatatttgttttaggttgtatttttggttgaaaaggtagttttttttggttttagatagagttgaggatataagttgtttttgggttgtttgttttgaagtttttttaggtttatttatttggatggttagagtagttgataaggtaggttttagggtagtggttggtttttagtttagtggttttgtagggagttagttttattttgtagagagttagtttttgaggttagaattgtgttgtaggtaggattgggatttggttaggtattgtagtttttgtttaaagatttatttggtaaattgtagttattgttttagttttttttattgtttgttgtgttaggttttgggtagtgatttattggggagatgatggtggttttggtgggtatatttgggtatatattgtgttatatagtgtttagtttttgttttttattatataaagtttgggatgaaggaggtattttttaaggtttttttgaattttttttttgaggtttttatttgtggttttttttattaagttaggtgatattttttttttttgttttaggtttggtttttgtatttttgtttttaagtatggtgagtatggtggttataggtagttgtttgaaagagtattgtgtgttttttggttagttttagaagtagatagattttatgtaggatattagtagatt

SEQ ID NO: 3377 - DNA, 2496 bp, Artificial Sequence
  chemically treated genomic DNA (Homo sapiens)
tttgtattttgttttttttaggtagtggataaagtattttttttgttgttgtttttttgagatagagttttttattgtttaggttagagtgtagtggtgtgattttagtttattgtaatttttgttttttgggtttaagtaatttttttgttttagttttttaagtagttgggattatagataattattattttatttagttgatttttttttttttttttgagatggagtttttttttgttatttaggttggagtgtagtggtgtgattttggtttattgtaagttttgtttgtagttgggattataggtgtttattattatgtttggttaattttgtttttgtatttttagtagagatggggttttattgtgttagttaggatggttttaattttttgattttgtgatatgtttattttggttttttaaagtgttgggattatagatgtgagttattgtgttaggtttaaagtatttttttatagtttttagtttgttgttgtgtttgttttttttatggtttgtatagtttgggtttgaattttggttttttatggttttgggtaagttggttaattttttgtgttttaatttttttatttgtaaagtggggttggggaaaaattttattttatagggaatattaagtgagtttatgaaagtttttggtgtgtggtatgtgataattattatttaagtataaggtatgtttatatgtattggttgtttattatgatgtattagtatttatttaagttatttttttttagagtttgtttggaatgtagaattggttagtttttttttttaaatagtttttgtaatttttggttatttgtgtgggtagaggtgggagtgtgggtgtgtggttttgttttgggatagggatgatgagagagtatgtgtttgtgtttagagttgtttttttttttgtttaggggttattaaatatgtttatggtttttgttgtttggttaatggttattttgggttgttgttttttggttagatttggagtttataagttaattttagaaatgattggttgatttagttgttgttattatattggtttagaaggagggtggggggaggatgggttggggaggggtagtaaggggaagggatgtgtgttggtgtgtgtggagagggtgtttttttgtttttgtttttttggtttggtggggtttttttgtggttatttggggagatgttttagatagttgtggtttttgtgatttgtgttttttttgtagaaggtattattgggttgggttttagatgggtattttgtgagtggattggtgagttttaattttttggaatgtgttgttgggggttgtggtggtaggtttttggttttttggtttattttaggtttttttggtgttgagagtttttgaggtttgatttttttgtttgttgtttgtgttgtttattttgaaaataagagtgttttggtggaaggatttgagaataaaatgttggggtaaatggatatttgtaagaattattttttttaggttttagttgtttgttaataatttttaaaaatgtgtttagaattatgagttaatttttattgtgaatttttgtttgtagatgttagggtttatatttttttttaattattagtaatttttgttttattggtgtttagttatggttggggaagagttaggtttttttttttgtgttaataatgttgttgagttgaaatgttaattttaatgtttttttttaaattgtaaattaagtatgtatgagtgttgggggaagggtaatggaagtttatggttgaaggttttaattttatgttattttttttgagttttgtttgagggaaggtgttttatttggtattttggatagtaggtatttttttgaatgaagaagatttataggttttagtggttttatagtggggtagaagggggttatgttttgatatggagtttttttttaggagaggagaagattttattagttataggtttttgggttgttgtttttttgtagtttttttatggaggaggttaggagtggggaggtttggaatggggagtttagttggtttttagttggttttaagttgtttagtttggttttaatttgtaagtgtggggatttgggtttttattttgtagggtttggaatatgatgaggttgttatttttattttgtggttgtttaaaaagatgttgttttatttagtgtattagtttatggaggttgagtgttttattagggtttttagattttaataaggataatggtggttttgggtgttgtatttattgttgatttaagttgtatttttttatgtttgggtattatgtttagtgtgtattttgggagtagaaaagagaggggtttatatatttttaggttatggatgagttttagaaaataatagtggagaggagagagagaaaagaaggaagaggaggaggagaaggagaagaagagaaggaggaggaggaaaaaagtagga

SEQ ID NO: 3378 - DNA, 2496 bp, Artificial Sequence
  chemically treated genomic DNA (Homo sapiens)
ttttgttttttttttttttttttttttttttttttttttttttttttttttttttttttttttttttttttttttttattattattttttagaatttatttatagtttaagagtatatagattttttttttttttgtttttaaggtatatattggatatggtatttaggtataggagaatataatttaggttagtaatggatatagtatttaaggttattattatttttgttggagtttagaagttttagtgggatatttagtttttatgagttggtgtattgaatgaggtagtatttttttggatagttataaagtgaaagtaatagttttgttgtattttaggttttataggatagaagtttagatttttatatttgtgggttgaggttagattggatagtttggagttgattgggagttgattgggttttttattttgggtttttttatttttggttttttttatggaaaagttgtaggaaggtagtagtttagaggtttgtagttggtgaggttttttttttttttgggagagagttttatgttaaagtatagtttttttttgttttattatggggttattgggatttgtgaattttttttatttagagaaatgtttgttatttggggtgttagataagatatttttttttagatagagtttaaggaaggtggtatgaaattgaaatttttagttatgaatttttattgttttttttttaatatttatatatgtttaatttgtagtttaaaaaagaatattaaaattaatattttgatttaatagtgttgttaatatgaaaggggaagtttggtttttttttgattataattgaatattagtgaagtagaaattattggtagttgaggaaaaatataaattttgatgtttgtgggtaaagatttatagtggagattaatttatgattttaaatatatttttaaaaattattagtgaatagttggggtttgaggagagtgatttttatgaatgtttatttgttttagtattttgtttttaaatttttttattgaaatatttttgtttttaaagtgagtagtatgggtaataggtaaaggaattaggttttggaagtttttaatattagaaaggtttaaaatagattaaaagattggaggtttgttattgtagtttttagtagtgtattttggaaaattaaaatttgttgatttgtttgtaaggtgtttgtttaaaatttagtttaatagtattttttgtaaagaggatatagattataggaattatgattgtttaagatgtttttttgggtggttgtgaagggattttattgagttgggaaagtaggagtgaaggagtattttttttatatatattgatatatattttttttttttattgtttttttttgatttgttttttttttattttttttttgggttaatgtgatagtagtagttgagttgattagttatttttaaaattagtttgtgagttttaggtttggttaggagatggtagtttggggtggttgttgattaggtagtagagattatggatatatttggtggtttttgagtagggaaggggatagttttggatataagtatatgtttttttgttatttttgttttagggtagggttatatatttatatttttgtttttgtttatatagataattagaggttgtaggaattgtttgaggaggagagttggttggttttatattttaggtagattttggaagaaaataatttgaatgaatgttggtgtgttgtggtaaataattagtgtatgtaaatatattttatgtttaggtagtggttattgtatgttatatattgagggtttttatgaatttatttaatgttttttatgaggtagggtttttttttagttttattttataagtggggaaattgagatataaaaagttaattaatttgtttaaggttatggagagttagaatttaaatttaggttgtgtgggttgtagaggaaatagatataatagtaaattaggggttataaaaaagtgttttgggtttggtatggtggtttatgtttgtaattttggtattttgggaagttgaggtgggtatattatgaggttaggagattgagattattttggttaatatagtgaaattttgtttttattaaaaatataaaaataaaattagttgggtgtggtggtgggtgtttgtagttttagttataggtggagtttgtagtaagttgagattgtgttattgtattttagtttgggtgatagagagagattttattttaaaaaaaaaaaaaaaaattagttgggtggggtagtggttgtttgtgattttagttatttgggaggttgaggtaggagaattgtttgaatttaggaggtggaggttgtaatgagttaaggttatgttattgtattttagtttaggtgataagagattttattttaaaaaaataataataaaaaaagtgttttgtttattgtttaaaaggagtaaagtataga

SEQ ID NO: 3379 - DNA, 2285 bp, Artificial Sequence
  chemically treated genomic DNA (Homo sapiens)
ttagtatttgatttgtggtatgtgttaatttattattgttaattgtagggatttagtgatttttttgaatttttgttatttttgttatggtttttgttttgtggaggtttgtggaatgggaagtggggaggggaaggagaagggggtggagttagttggagttttttggttaggtttggagttattttgttttgttatagtttttatgggtttagagtgggttttggggtagagggtttgtaaggataggggtgggtggttttgttgagggtggtgttttgagtaggttttattttttagtttgtttagtttggttttattttagttttgttgttttgttattttgtttttttgtgtttattttttattttttgttggggatattttaaggtttgttaaggttggagtaggggtgggatttagttatttaataaatgtttttttggttatgtagggttgggtattggggtggggggttgatttggattttttaagatattagattgtttaattgtttagtttttattggggtaagtgttttgttgagggtgaagggggttgtgagtgtttattagggagtttggataggttttgttttttatagttgttttattttttggagttgttttggtggtagatggtattgttttagaaaggtgaggttggagttgttttttttattaggggtggttaaggatgtttttagggttttttatgtaggtttttagggttattttgggtgtggttgagggtatgtagattatgttgtgtttttttttattttttatgtttgttgtttgtttgatatgttttttagttgttttgttttgtagaagttgtgtggttttttttgtgagtagagttgggttttatgattttttggagtagtgttagggattttttttaggtataattttaaagggggttttaggatttgttaggtttatggaagtggtttttgtaattttttttttggtggtagtttttggtgtattttggtaggggtagtttttttttattatagggattttgtgtgttaggttttagttgtgttgttgttgaattatggatttaatagtagagaagttttgtaggttgtttgtgttggtttgggaaattggggtttagttggggtttgttatggttttggtgttgttttgttttttgttggtgttatggagtaagtggagagatttatttttttggttttaagaggtattaatggaggaggttgagaggtaggagttgaataattgatggttttttttggtttaggatttgttgaaaatgatatggtgtaaggtagaggggttgagagtgttgattataaaatgttgagaagttattttagggtggttatggttagaaggaggatttttatttaggatggggttataggtatttggggtgggtgttagaggtttttgttttgggttattttagggggttaggatatttagaagttgggtttagaggtttatagggttggtttatttttattttttttttatatgtttgttattattggtgttttagtttagtaattttatggtttgttggttttgtttatagtttttattgttttttgtgtgttgggtgtgggtttttgagttttatttttagtttttttagttttaggagaggagtggaggataggggtttaatgtggggtgtggtgtggagtggggagggttgtggtgtttttttagtttttttttttttaatagttttagttttttttttggagaattttttatttgttgggtatatttggtttttttttattattttgtttttagttgggagatttttatttagtgaaatagtgaaataggaagggttttttggttattttgtgtagggtgtagggtatgtagtgggggagtggtttgtttttttagtgttttattgtttatatttttaggggagtatatagatgggtaggttgtggggttttgattttatggtagtgtttgggggtgaatgtttatagtttttgaaattttagtgggagtgtgttattgggtggttttttagtttagtggtttgtaggtggttggtgagagtgagtttaattagatttttgttttataataaggatagaggaatttttgtattttagggttttttgttttggtgtattaaaaaattggattatatgtgggtttggagaatgagtgtaaggttttattgagtggaagtagtttttagtagatgggggagttagaggggagatggtttttttttggagttaggtaatatttttgggatgtttagtagtttgt

SEQ ID NO: 3380 - DNA, 2285 bp, Artificial Sequence
  chemically treated genomic DNA (Homo sapiens)
ataagttgttggatattttgagaatgttgtttgattttaggggaaaattattttttttttggtttttttatttgttgagagttatttttatttaataaaattttgtatttattttttaagtttatgtgtgatttaattttttggtatattaaggtaagaaattttgggatatagaaatttttttgtttttgttataaggtaggggtttaattgagtttatttttattagttatttatagattgttagattaaaagattatttggtaatgtatttttattggggttttaagagttgtaaatatttatttttagatattgttatggggttagagttttatagtttgtttgtttgtatgtttttttagaggtgtgagtggtggggtattgaagaagtgagttatttttttgttgtatgttttgtgttttgtgtggggtaattagggaattttttttgttttattgttttattgggtagagattttttggttggagatagaatggtggggagaggttagatgtgtttagtaggtaggggattttttaggggggaggttgaggttgttaggaaaggaggggttgagggggtgttatagttttttttgttttgtattatattttatgttaaatttttgttttttattttttttttggggttaaggaggttgagagtagagtttagaggtttatgtttagtatataggaggtagtgggggttgtggatggggttaatgagttatggggttgttgggttgaagtattggtgatggtaggtgtgtgagagggaagtgggggtgagttagttttgtgggtttttaggtttagtttttgggtattttggttttttggaatgatttagggtaggagtttttgatatttgttttaaatgtttgtgattttgttttgagtgggggttttttttttggttgtgattgttttggagtggttttttagtattttgtggttagtatttttagtttttttgttttgtattgtgttatttttagtagattttgagttagagaaggttattaattatttagtttttgttttttagttttttttgttagtattttttaaagttgggaagataaatttttttgtttgttttgtggtgttgataggaagtagggtggtattaggattgtgataggttttggttgggttttggttttttgagttagtataggtggtttgtaaggtttttttgttattaaatttataatttagtggtaatgtagttggggtttggtatatagggtttttgtgatgaggaggggttgtttttgttggaatgtattagaggttgttattagggagagagttataaggattatttttgtggatttggtaggttttagggttttttttaaaattgtgtttggggagagtttttggtgttgttttggaggattatggagtttgattttatttataggggagattatatagtttttgtggggtaagatagttgaggagtatgttaggtaagtgatgggtatggggggtgggggggagtatagtgtggtttgtatgtttttagttatgtttagggtgattttggaggtttgtatggaagattttggaagtgtttttggttatttttggtggaagagatagttttagttttatttttttaggatagtgttatttgttattaaggtagttttagagagtgggatagttgtgagaggtgggatttgtttaggttttttgatgggtatttatagttttttttatttttagtgaggtatttgttttaatgaaaattgagtagttggataatttgatgttttggagggtttaggttagttttttattttaatgtttagttttgtataattaaggaagtgtttgttgaatggttgagttttatttttgttttaattttggtaggttttggagtgtttttggtaggaagtggagggtgaatatagggggataaagtaatagggtagtagagttggggtggggttaggttgggtagattggggaatgagatttatttagaatattgtttttggtagagttatttatttttatttttgtaaattttttgttttagggtttattttaaatttatgagagttgtggtaggatagggtgattttaggtttggttaggaggttttggttgattttgttttttttttttttttttttttattttttattttataggtttttatagggtaggggttgtgataggggtgatagaagtttggagaggttattgagtttttgtaattagtagtaatgagttgatatatgttataggttaagtgttaa

SEQ ID NO: 3381 - DNA, 2448 bp, Artificial Sequence
  chemically treated genomic DNA (Homo sapiens)
tgtgatatttgttgttgaatgaaatgggggtttgtttttaatttttggtaggagttggtgggttttttttttgttgtagtttgggaatgttttggagaaggttatatttatggtaaggtgagtgtagttttgaatgttgtagggtgaagttagtttgtataggatgtttttattggtttttgttttatgttttattgtgtttgggtttgggttatgtggtttaggataggggtggttttttatgaaattttttaaatttagatggaggagaagttattgttatgaaggtaagtgttttttaggaggttggtggttgtagtttttagttaggttagtgttgatttatttttgggatattgtatgtggtttttatagttgtgttaggtagtgtttgatggggaggggttgtggggatgtgtatgattttatttaggttttgtttttagaggggtttggttgtttttatagatttttaaatattttatgtatttattttttgtatagttaaaatttatataataaaattaattttgttgaagattgtattttgttggtatttagtgtagttattatgttgtataattttatagtagttgagtttttgtttttgttattttataaaaagttttgtgtttatgaagtaatttttttttttgtagttatttttttagttttggaagtttttgtttttttagatttttagaagtaaaggttgtagaggtttttttagattgggtatttggatgtttatttgaggtttttttttttttgtttttagtagggaagttaaagtaattgttatagggtttagttggtatagattttaggtttagttagtattagtagttgtttagtatgttttattttttttaggttttaggttttgggtttttgattttagagggttttggttattgggatggttggtagatgtaagatgggaagtagttttgatttttattatttttttttgggatatgtttatgttttgtttttgttatttttttttagttgtttgagggttggttggtgtgagtttaggtttttgtagggtatgttaggagtaagttgtgatttggttttgggttgtggagtttatgttattttttattgaggattttgggttgttttgttttgtgtatgggtatttgggttttgatagtttgttgggttttgggttattagaggttttgaattgtgttttggtgatagttagttttttgtatggggtatgtatagatttgggtttaggttggggtattgagatttttatatttagtagttgtggtgaggttggtttgtttgttttttggggttatttttgttgtgttgtttttttttttttttttgttttttttgttggttgttttttttttgttttttttgggtaggtatggttgggtgggggtgaggttttggtaaagttttttttgttttttagtttagtggtgtttatatgtgatggtgtgggggtagttttgtgaaaagtttttttgtgttttttttttaattaagaaatagtagtaggttttgggggtttaggttttatgttttttttgaatgttggttgtggttataggtggttggatgggtaggtttagtagtggattttaaggaagaattttttaggtttattaggtagttttgttgttttttgggggttttttttatattgttaggttatttggtaggtttgggaggttttttttatttttgggttttaggagttgagatggtatttgtaggagtttatgtgggatttgggtgtttggatttggggttttagatttgatttttttttttgttttgtggggtttttttgaggtttagtttttttttttgtgaaatggggagaataaggtgttttgttttttagaatttatatttagagagttagaagtttttttaggtttggataaagaggtgtttgttttttttaaattaaggtagagggatatttgagagggtgttttgagtttatttttttttgttttatttgggatgtttgtttgtgttttttttgtatagttgtttatgtttttaggaaaatgagggtttttgttttttttttagaattttagattttgaggtaaaggtttggaaagaatttatagtttttatggtattattgttattgagtgggttttattttttagtttgggaggtggatttttttagagtaggggtgtttagtagggagggttgattgaggggagttttgagagatttttgatgagaatagggggtttgtagaggaaataggttttttaaggttatggttatgtttagtgagattttagtttagttttttggagtgttgtgtttagggttatgttgggataggtaagtggtgttatttttttttttgaagatattttatatttatgtggaaaaggagaatggtattttttatttatttggaggagggatagaggtaagggttgtttt

SEQ ID NO: 3382 - DNA, 2448 bp, Artificial Sequence
  chemically treated genomic DNA (Homo sapiens)
ggggtagtttttgtttttgttttttttttaggtgagtgaaaagtattgttttttttttttatatgggtgtaaagtgtttttaggaaaagaggtgatattgtttgtttgttttagtgtgattttgggtatagtattttggaaagttgggttggagttttattgggtgtgattgtgattttaggggatttgttttttttgtaggttttttgtttttgttaggggttttttagggttttttttggttagttttttttgttgagtatttttgttttgagagagtttgttttttaggttggagggtaagatttgtttagtgataataatgttgtgagaattgtgggttttttttgagtttttgttttagaatttggggttttggaaaagagataagagtttttgtttttttgagggtatgggtagttatgtggaggagatatagatggatattttaggtgggatagggggaggtggatttaggatatttttttagatgtttttttgttttggtttggggaggatgggtatttttttgtttaggtttggaaggatttttagttttttgaatgtggattttggggggtagagtgttttattttttttattttatagaggggagggttgagttttagggaggttttatagaataggagggagaattaggtttgaaattttaggtttagatatttagattttatgtgggtttttgtgggtattattttagtttttgggatttgagggtggagaaagttttttagatttattgggtggtttgataatgtgagaggagtttttggaaagtagtagggttgtttggtgggtttgggggatttttttttgaagtttattgttaggtttgtttatttagttgtttgtgattatggttagtgtttagagaggatgtggggtttgggtttttggagtttgttgttattttttaattagggaggagatataaaggggttttttatgaggttgtttttgtattgttatatgtgagtgttattgggttggaaaatagagggggttttgttagaattttatttttatttggttgtgtttgtttagagagggtgggggaggagtaattaatagagggggtaggggagagggaggagatggtatggtagaggtggttttgggaagtaggtaggttagttttattgtggttgttggatgtggggattttggtgttttagtttaggtttaggtttgtgtgtgttttatgtaaggggttgattgttattaggatgtaatttaaggtttttggtggtttagggtttggtgggttattagaatttggatgtttgtatgtgggatagagtagtttaggatttttagtggagagtagtatgggttttatagtttggggttaggttatagtttgtttttggtatattttataggagtttgggtttatattagttagtttttaggtagttgaggaaggatagtagaggtagggtatgggtgtgttttaggaggaggtggtgggggttagggttgttttttattttgtatttgttagttgttttagtggttaggattttttgaagttagggatttaggatttgggatttggggagaatggggtatgttgagtaattgttggtgttggttgggtttggagtttgtgttagttgggttttgtagtagttgttttggtttttttgttgggggtaggagagagaggattttaggtggatgtttgagtgtttagtttggaaaggtttttgtagtttttgtttttgaaggtttgggagagtaggagtttttggggttgggagaatggttgtagagggagggattgttttataggtatggggttttttgtggggtgatggaaatgagaatttggttattgtggggttgtatagtatggtggttgtattagatgttagtagaatgtaatttttaatagggttgattttgttatgtgaattttaattatgtgaaaaataaatatataagatgtttgaaagtttgtaagggtagttagatttttttgagagtaggatttggatggggttgtgtatatttttatagtttttttttattaagtattgtttggtataattgtgagggttatatgtagtgttttggaggtgggttagtattggtttggttgggggttgtggttattaattttttggaaggtatttgtttttgtggtggtggttttttttttatttaaatttgggggattttatgaagggttatttttgttttgagttatatgatttgagtttagatataatgggatatgaagtagaggttagtagagatgttttgtgtagattggttttattttgtaatgtttagagttgtatttattttgttgtgggtatggttttttttaaggtgtttttaggttgtaatagggaaaaggtttattagtttttgttgagagttgggggtgggtttttattttgtttagtagtgaatgttata

SEQ ID NO: 3383 - DNA, 2374 bp, Artificial Sequence
  chemically treated genomic DNA (Homo sapiens)
gggttttggggatttattgtatgttgggtgttgggatgggggtagatattgttttttttttttattttttgtttgattttttttttttttattttgttttattattttagtggttttaagtttgtaaggagatttataggtagtaggagatatgggttgtagagtgggatgggggtgagtatgggtgtggtgtgtatatatataagttgttagaggtattatttgttataagtttttagatgagtattttagtttaagaggtaggatattagggtggtaatagttttagagttgttattttgagtgtgatattatttttttatgttttttttttgggttttaatttttttatgtgtagagaggaagtagtgatttatatggtttttttagttttgttattgtgatgattttattatattggattttttaatgatttagggatgttatttgtgttttgttaaggttatagtttgtagttagagaaagttttaaatttatgttttagggttttttttgagttttagatttttattgagaaggaaaatatattagtttttgggtttggtttttttttttattgttatatttttattttattttgtttgtgttttttttagttttgtgggttgaaagtgttttttaaatatttaggtagttttttaggtaggattttaggggtgttttttaggaaattgaggaatttttattttttgaatattatgagtttgtttatatagtgatatttagtgatgattttggttttgttttttttttttttattttttatgagtttttagtttagaatatttggttagatttaggttgggggagttagattttggggttaagtaattagaattgggggtttttgtttgaggattttagtttttttttttaggtgtttgtttgatggggagatggttgatgtttagaatattttattggatagtttagggagtgtgggggttgtggtagtgtttgtggtttttgttttaatttttttgttgggtatagtgggtaatgggttggtgttggtagtgtttttgtagtttggtttgagtgtttggtaggagtttggtagtattatggatttgtttatttttaatttggtggtggttgatttttgttttattttgtgttgtgtgtttttttaggttattatttatatgttggatgtttggttttttggggtttttgtttgtaaggttgtgtatttgtttatttattttattatgtatgttagtagttttatgttggttgttgtttttgtggataggtgtgttgtgtttggggtttggttgggtagggttgtgggggtgggggttgggggaggagttttgaatagatttttattggttttaggaaggagagagtgggggattagaaagggaggtgggtgggaggaaataaaagttttttgattttttgtaagtagtttttgggtatttgtagggtgtgtttgaggggattgttttgtttttttttttttttattgtgaatttttagaggatgtttttgagttttaagtggtagtatagggtttggtatatagtaagtgttttgtaagtgtgaaatgaattgtaaaagaagtttatgaatgtgtttattagtttttttgttttgttttgttttgttgttttttttttttggattttggtttattgtaatttttgttttttgggttttagtgatttttttgttatagttttttgagtagttgggattataggttattatatttggttaattttttgtatttttagtagaaatggggttttgttatgttggataggttggttttgaatttttgattttaagtgatttgtttgttttggttttttaagtgttgggattataggtgtgagttattgtgtttagtttagttattttttaattgtttatatttggttaagttgtgtatatatttgtttttatagtttgaaatttggggttaaatttaggtttattttagttgatgattttgggtaagttatttttttttggattttatttgatgtatttataaaataattttagaaataataagttattgggattgggtttttgttaggtgtaagggtttaagtattttgtgtgtttatatttttaatttttgttatgttttttatggtttataggaggtgtattgggttgtagggtttgggtgtgggatgtggtgtgggtttttgtgggagggtatttgtttgttttgttgattaggtgttttttgtaggtatttggttgtgtggtatttgttgtgtttgtgtgttttgtgtatgttgtgtaatgtttgtgttgtagtggggttggtgtggttgttggtggtgttttttttggtgttttattttagttattatggtattgtgtgttatgg

SEQ ID NO: 3384 - DNA, 2374 bp, Artificial Sequence
  chemically treated genomic DNA (Homo sapiens)
ttgtagtgtatggtgttgtagtagttgaggtagggtgttgagaagagtgttgttagtagttatattagttttattgtggtgtgggtgttatgtggtgtgtgtagggtgtgtgagtgtagtgggtgttgtatggttaggtatttgtggagggtgtttggttagtggggtgggtaggtgtttttttgtaggggtttgtgttatgttttgtgtttgggttttgtggtttagtgtgttttttgtgaattgtgggggatgtggtggggattaagggtgtgaatgtgtaaggtgtttaggtttttgtatttagtaagggtttgattttggtgatttgttatttttaggattattttatggatgtgttagatgaggtttagagagaagtgatttgtttagggttattagttggagtgagtttggatttgattttaagttttaagttgtggaagtagatgtgtgtatagtttggttaggtgtgggtagttagaaaatagttgggttgggtgtggtggtttatgtttgtaattttagtatttgggaggttgaggtgggtggattatttgaggttaggggtttgagattagtttgtttaatatggtaaaattttgtttttattaaaaatataaaaaattagttaggtgtggtggtttgtaattttagttatttaggaggttgtggtaggagaattgttggaatttaggaggtagaggttgtagtgagttaagatttaaaaaaaaaaaataataaaataaaataaaataaaaaaattgatgaatgtatttgtgagttttttttgtgatttattttgtgtttatagagtatttattatgtgttagattttgtgttgttatttgagatttagaggtgttttttggaagtttatagtggaggaggggaagggtaggatagtttttttaagtatgttttgtaggtgtttagaggttgtttgtgaggggttagggagtttttgtttttttttatttatttttttttttggttttttatttttttttttttaaggttagtgaggatttgtttaggattttttttttaatttttgtttttatagttttgtttagttaggttttaggtatagtgtatttgtttatggagatagtagttagtgtaaagttgttggtgtatatggtgaggtagatgagtaggtgtatggttttgtagatgagggttttaaagagttaggtatttagtgtgtagatggtggtttggaagggtatgtagtataggatgaagtagaggttagttattgttaggttgaggatgaataggtttgtggtgttgttaggtttttgttaggtatttgggttaggttgtaggagtattgttagtattagtttattgtttattgtgtttagtaggaagattagggtaaagattataggtattgttatggtttttatattttttgggttgtttagtgaaatgttttgggtattagttatttttttattagatgggtatttgggaagagaagttggaatttttaggtaagagtttttagttttggttgtttgattttgggatttaatttttttgatttgggtttggttaggtgttttgggttggaagtttgtgggagatggaggaggggagagtagagttaaagttattgttgagtgttattgtgtgagtaagtttgtggtgtttaaggggtgagagttttttagttttttaaggaatatttttggagttttgtttggaggattatttaggtatttgagggatatttttaatttatgaggttggggaaggtataagtgaagtaggatgaagatatggtgatggggggaggggttaaatttagaaattggtatgtttttttttttaatggggatttgaagtttaggggagattttgggatatgggtttagggttttttttggttataagttgtagttttagtaaaatatgggtaatatttttgagttattggagggtttagtatagtgagattattataatggtaaaattgggaagattgtgtaggttattgttttttttttgtatatagggaaattgaggtttagagaggggatatgggaggataatattatatttgaaatggtagttttggggttgttgttattttggtattttgttttttaagttagagtgtttatttgagagtttgtaataggtggtgtttttgataatttgtgtgtgtgtatattgtatttatgtttatttttattttattttatagtttatgttttttattgtttgtggatttttttgtaggtttgagattattggggtggtgggataaagtaggggaaaggggggttaggtagggagtagggaagaaaggtaatgtttgtttttattttagtatttagtatgtagtaggtttttaaagttt

SEQ ID NO: 3385 - DNA, 2500 bp, Artificial Sequence
  chemically treated genomic DNA (Homo sapiens)
ttgttgaattaggaggtttatttagtttggttattttatttaggattaagtttattgtttaaggtggaggtgggtgttgtttattttgggttttggggatttattgtatgttgggtgttgggatgggggtagatattgttttttttttttattttttgtttgattttttttttttttattttgttttattattttagtggttttaagtttgtaaggagatttataggtagtaggagatatgggttgtagagtgggatgggggtgagtatgggtgtggtgtgtatatatataagttgttagaggtattatttgttataagtttttagatgagtattttagtttaagaggtaggatattagggtggtaatagttttagagttgttattttgagtgtgatattatttttttatgttttttttttgggttttaatttttttatgtgtagagaggaagtagtgatttatatggtttttttagttttgttattgtgatgattttattatattggattttttaatgatttagggatgttatttgtgttttgttaaggttatagtttgtagttagagaaagttttaaatttatgttttagggttttttttgagttttagatttttattgagaaggaaaatatattagtttttgggtttggtttttttttttattgttatatttttattttattttgtttgtgttttttttagttttgtgggttgaaagtgttttttaaatatttaggtagttttttaggtaggattttaggggtgttttttaggaaattgaggaatttttattttttgaatattatgagtttgtttatatagtgatatttagtgatgattttggttttgttttttttttttttattttttatgagtttttagtttagaatatttggttagatttaggttgggggagttagattttggggttaagtaattagaattgggggtttttgtttgaggattttagtttttttttttaggtgtttgtttgatggggagatggttgatgtttagaatattttattggatagtttagggagtgtgggggttgtggtagtgtttgtggtttttgttttaatttttttgttgggtatagtgggtaatgggttggtgttggtagtgtttttgtagtttggtttgagtgtttggtaggagtttggtagtattatggatttgtttatttttaatttggtggtggttgatttttgttttattttgtgttgtgtgtttttttaggttattatttatatgttggatgtttggttttttggggtttttgtttgtaaggttgtgtatttgtttatttattttattatgtatgttagtagttttatgttggttgttgtttttgtggataggtgtgttgtgtttggggtttggttgggtagggttgtgggggtgggggttgggggaggagttttgaatagatttttattggttttaggaaggagagagtgggggattagaaagggaggtgggtgggaggaaataaaagttttttgattttttgtaagtagtttttgggtatttgtagggtgtgtttgaggggattgttttgtttttttttttttttattgtgaatttttagaggatgtttttgagttttaagtggtagtatagggtttggtatatagtaagtgttttgtaagtgtgaaatgaattgtaaaagaagtttatgaatgtgtttattagtttttttgttttgttttgttttgttgttttttttttttggattttggtttattgtaatttttgttttttgggttttagtgatttttttgttatagttttttgagtagttgggattataggttattatatttggttaattttttgtatttttagtagaaatggggttttgttatgttggataggttggttttgaatttttgattttaagtgatttgtttgttttggttttttaagtgttgggattataggtgtgagttattgtgtttagtttagttattttttaattgtttatatttggttaagttgtgtatatatttgtttttatagtttgaaatttggggttaaatttaggtttattttagttgatgattttgggtaagttatttttttttggattttatttgatgtatttataaaataattttagaaataataagttattgggattgggtttttgttaggtgtaagggtttaagtattttgtgtgtttatatttttaatttttgttatgttttttatggtttataggaggtgtattgggttgtagggtttgggtgtgggatgtggtgtgggtttttgtgggagggtatttgtttgttttgttgattaggtgttttttgtaggtatttggttgtgtggtatttgttgtgtttgtgtgttttgtgtatgttgtgtaatgtttgtgttgtagtggggttggtgtggttgttggtggtgttttttttggtgttttattttagttattatggtattgtgtgttatggtgtgttggagttttgtgtgtttgtttgggaggatgtgtg

SEQ ID NO: 3386 - DNA, 2500 bp, Artificial Sequence
  chemically treated genomic DNA (Homo sapiens)
tgtgtgtttttttaggtgggtatgtagagttttagtgtgttgtagtgtatggtgttgtagtagttgaggtagggtgttgagaagagtgttgttagtagttatattagttttattgtggtgtgggtgttatgtggtgtgtgtagggtgtgtgagtgtagtgggtgttgtatggttaggtatttgtggagggtgtttggttagtggggtgggtaggtgtttttttgtaggggtttgtgttatgttttgtgtttgggttttgtggtttagtgtgttttttgtgaattgtgggggatgtggtggggattaagggtgtgaatgtgtaaggtgtttaggtttttgtatttagtaagggtttgattttggtgatttgttatttttaggattattttatggatgtgttagatgaggtttagagagaagtgatttgtttagggttattagttggagtgagtttggatttgattttaagttttaagttgtggaagtagatgtgtgtatagtttggttaggtgtgggtagttagaaaatagttgggttgggtgtggtggtttatgtttgtaattttagtatttgggaggttgaggtgggtggattatttgaggttaggggtttgagattagtttgtttaatatggtaaaattttgtttttattaaaaatataaaaaattagttaggtgtggtggtttgtaattttagttatttaggaggttgtggtaggagaattgttggaatttaggaggtagaggttgtagtgagttaagatttaaaaaaaaaaaataataaaataaaataaaataaaaaaattgatgaatgtatttgtgagttttttttgtgatttattttgtgtttatagagtatttattatgtgttagattttgtgttgttatttgagatttagaggtgttttttggaagtttatagtggaggaggggaagggtaggatagtttttttaagtatgttttgtaggtgtttagaggttgtttgtgaggggttagggagtttttgtttttttttatttatttttttttttggttttttatttttttttttttaaggttagtgaggatttgtttaggattttttttttaatttttgtttttatagttttgtttagttaggttttaggtatagtgtatttgtttatggagatagtagttagtgtaaagttgttggtgtatatggtgaggtagatgagtaggtgtatggttttgtagatgagggttttaaagagttaggtatttagtgtgtagatggtggtttggaagggtatgtagtataggatgaagtagaggttagttattgttaggttgaggatgaataggtttgtggtgttgttaggtttttgttaggtatttgggttaggttgtaggagtattgttagtattagtttattgtttattgtgtttagtaggaagattagggtaaagattataggtattgttatggtttttatattttttgggttgtttagtgaaatgttttgggtattagttatttttttattagatgggtatttgggaagagaagttggaatttttaggtaagagtttttagttttggttgtttgattttgggatttaatttttttgatttgggtttggttaggtgttttgggttggaagtttgtgggagatggaggaggggagagtagagttaaagttattgttgagtgttattgtgtgagtaagtttgtggtgtttaaggggtgagagttttttagttttttaaggaatatttttggagttttgtttggaggattatttaggtatttgagggatatttttaatttatgaggttggggaaggtataagtgaagtaggatgaagatatggtgatggggggaggggttaaatttagaaattggtatgtttttttttttaatggggatttgaagtttaggggagattttgggatatgggtttagggttttttttggttataagttgtagttttagtaaaatatgggtaatatttttgagttattggagggtttagtatagtgagattattataatggtaaaattgggaagattgtgtaggttattgttttttttttgtatatagggaaattgaggtttagagaggggatatgggaggataatattatatttgaaatggtagttttggggttgttgttattttggtattttgttttttaagttagagtgtttatttgagagtttgtaataggtggtgtttttgataatttgtgtgtgtgtatattgtatttatgtttatttttattttattttatagtttatgttttttattgtttgtggatttttttgtaggtttgagattattggggtggtgggataaagtaggggaaaggggggttaggtagggagtagggaagaaaggtaatgtttgtttttattttagtatttagtatgtagtaggtttttaaagtttaggatgggtaatatttatttttgttttgggtagtgggtttgattttgggtggaatggttgggttgggtgggttttttgatttagtgg

SEQ ID NO: 3387 - DNA, 2419 bp, Artificial Sequence
  chemically treated genomic DNA (Homo sapiens)
agtgtttgggggtagtttagtttttagttttttttatagttttatgaggaggttttagtatgttttttttttgttaaatgaggagattaagaaatgggttaattttttatttaggtgagaagggtatagagttgggatttgaatttggttaggtgtagtttggggtttttgttgttattaggggtatatggtggttggggtagggtggtaaagtaggagtttgggagtttatggtttatttaatttgatttttgaatttaatggggtttatgtttttttgttttttttggttatttttatttgttatttttttgtttttatatatagtgtttgttttttgttatttaattttaggggtttttttagttgggtgtgggattttggttgtgggggaaggaaggggatttttggggatagtttagttttttattttattttttttttttgaggtgttataaatatagttaagagtgggaggttttggtttttaggagaggagagagtatgagttttaggtagttttaaagatagggttttatttttaatgtttggagatgtttttgatttgtttagttatgtagttaagggagggataaatttagatttaaatttagggttttgtttttagtttggggtttttagaggttttgtagtaattttattttatagatggttttttaaggggatttttttgtttttatttattttataagttttttgatgagtatgtaatatagggttgttttttttggtatatgggttttattttatagaggttaggagggggtttttgtttgttttattttatattttgtattttttttgggtatttaggttatttatttattttttttttatttttttgggttgggggtttagtatatagagtttagggaagttttttattttatagtagtttttagttttttttgaatgggttgggaaggagagttgatttgggattggggattgtttttttttttagttaggagttatgagagttgggtttaatttttttttaggggaattttaagataaagttgggggatgggagtttaggtagaaattgttgggggaattgagttagagttgaaagttttttttgtgatttttatttttagttttttggttggtttataggggttgggagggaggtagggggatattatttggttgagatatggggtggtggtagtgtgtgttttttagttttttttggtgttgggattgtggttatttttttagggttttgttgagttttggttgttggggttgtaaagattaaaagtttagagttagtttattttttgtgtagaggatagaggggtaaggtttggggtggagaggtggggagatgaggtttatgagaaagtttgaaattttttaagtatttagggttagataaagatttgttttttatgttgggggtggtatatatatatatatatatatatatatatatatatatatatatagatatatattgttaaataggggtttagttgtatataggagttaagggaatgtaggttttttttttttttttttttatattatttttatgttaatttatataggttatttaatatttttgatgtttttatttggttatatatatatttattaatatgtaggttttatataagtaggtttttttaggtgattttagtgttttattttttttttagtttgtaatatattatttttttgagatttttattttatttagttttttaggaagttttttattttgtttagtatttagagatgattgttttttttagtttttaattttgtgggtatgtggtaggtgtttatatttatgaggtatatgagttattttgatataggtatataatgtataataattatattagggtaaatggggtatttattattttaagtatttattttttttttgtgttaaaatttaagtatatttttttagttatttttaaatgtataataaattattgttgattaaagttattttgttatgttattaaatattagattttatttatttgatttaattttgtttttgtatttaataataatttttatttttttaatttttattgttttttttatttttattattgttttttttatttttatgaatttaattgttttaatttttagtttttataaataagtgagaatatgtgagttttgtttttttgtgtttggtttgttttatttaatataatgatttttagttttaaatatgtggttgtaaagataggattttatttttttttatggttgaatagtattttattgtatatatgtattatattttttttatttatttatttgttgatgggtatttaggttgtttttaaattttgggtattgtgaatagtgttgtaataaatgtgggaatgtagatgttttttttatatattgattttttttt

SEQ ID NO: 3388 - DNA, 2419 bp, Artificial Sequence
  chemically treated genomic DNA (Homo sapiens)
gaaaggaaattagtatatggaagagatatttgtatttttatatttgttgtagtattgtttataatatttaggatttggaagtaatttaagtgtttattaatagatgaatgaataaagaaaatgtggtatatatatgtaatggagtattatttagttatgaaaaagaatgagattttgtttttgtaattatatgtttgaaattggaggttattatgttaagtgaaataggttaggtataaaaagataaagtttatatgtttttatttatttgtgggagttaaaaattaaaataattgaatttatggaaatgggaagggtagtgatggagatgggaagggtagtgggggttggaggggtggggattgttgttgggtatgaaaatagaattagattgaatgaataagatttagtatttgatagtataatagggtgattttagttaataataatttattgtatatttaaaaataattaaaagagtatatttggattttaatataaagaaaggataaatatttgaggtgatggatattttatttattttgatgtgattattatatattgtatgtttgtattaaaatagtttatgtgttttatgaatatagatatttattatatgtttataaaattaaaaattaaaaaaaatagttatttttgaatgttaaatggagtaaggggttttttggaaggttgggtgaaatgggagttttggaaagatggtgtgttgtaggttgggaggagggtgagatgttggggttatttagagggatttgtttgtgtgaagtttatgtattagtgggtatgtgtgtgattggatggaggtgttagaggtgttgggtagtttgtgtgagttggtgtgggggtgatgtaggaggggagagagggagggtttgtgtttttttggtttttgtgtgtagttaggtttttatttgataatgtgtgtttgtgtgtgtgtgtgtgtgtgtgtgtgtgtgtgtgtgtgtgtgtgttgtttttagtgtaggaggtagatttttatttggttttgggtgtttgaggagttttaggtttttttataagttttgtttttttgtttttttattttaggttttgtttttttattttttgtataggaagtgggttggttttgggtttttagtttttgtggttttagtagttagagtttagtagggttttggagagatggttatggttttagtattggggaggattggagagtgtgtgttgttattgttttatgttttagttaggtgatgtttttttgttttttttttggtttttgtggattagttagagggttgggagtgaaagttatagagaagatttttagttttgatttagtttttttagtagtttttgtttgaatttttattttttaattttgttttagaatttttttagggaggggttgggtttagtttttatggtttttggttggaggaaaaagtggtttttagttttaggttagtttttttttttaatttatttaggggaggttagggattgttgtgggatgaggggtttttttgggttttgtgtgttgggtttttaatttggagaggtggagaagggatgggtggatagtttgggtgtttggagagggtatgggatatggggtgggataggtgggagtttttttttgatttttgtggagtggggtttatatattgggggaggtagttttgtgttgtgtgtttattaggaggtttgtggagtaagtggggatagaagggtttttttggagagttatttatgaagtgaagttgttgtgaggtttttgggagttttaggttggaggtagagttttgggtttgagtttgggtttgttttttttttggttgtatgattggataggttagaagtatttttggatattggggatgggattttatttttggggttgtttggagtttatgttttttttttttttgggggttgaagttttttatttttaattgtgtttgtagtattttgggggagggaggtggagtgaggagttgagttatttttaagggttttttttttttttttatagttagggttttgtatttagttggagaagtttttgaagttaaatagtaagagataagtattgtgtatgggagtaggggggtggtaggtggaggtggttagagaggatgaggggatataggttttattgagtttagaggttaagttggatgaattatgggtttttgagtttttgttttattattttgttttagttattatatatttttgatggtagtaggggttttgaattgtatttgattaggtttaaattttagttttatgttttttttgtttgggtgagaggttgatttgttttttagtttttttatttggtaaaaaggaggtatattagagtttttttatggggttgtagggagggttaaaagttgaattatttttgagtgtt

SEQ ID NO: 3389 - DNA, 2483 bp, Artificial Sequence
  chemically treated genomic DNA (Homo sapiens)
gtggatggaattgggtggtaggttgtggttttaggatatgtggttagattggttgagggtaggagggtgtagtattgattgtaattgtgaaagtgtagaatttttttgtggaaagtggtttggaatatggtttaattgaatattattattttataattgaggaatgtgaagtttgagtttttaagtttttaaatttgtttgaaatgagaatatagatatatatatagatatgtatatatatatatatatagattatagatatatatatagatatgtatatatatatatatagattatagatatatatatagatatgtatatatatatatagattatagatatatatagagatatataagatgtatatagatatgtatatatgtatatatatagatatatagatgtaatatagatagatatgtatagatatatatagatatatatatagatatgtaaagatatatatagatatatatagatatgtaaaaatataaagatatataggtttatatagatatagatatatatagatgtatatagatatagatatgtaaaaatgtataaatatatatagatatagatagatttatgtatatattgatatgtagatatatatattgatatatagttttagggaggttgagttgggtgttgggttagtttatagatttgtttttattatggtttttgatatatgggggtggttatgaggatgggggaggttgtggggatagaagtatagttggtttgatttaggtgggttagagtttattgggttttggttttttgtttttaggtgggtggttttagtttttttatttttttgggtttgggtaggttttgttttattgggtattgttttggtttttttggtatttaggtaatttttaggtaggtttggttgggtattggtgtggggtttggtttatattggggggtgggaagaagggttttgttttgtttttttgtatgtgggttttgttttttgtagaataattttaggtttgtaatggtgttggtatttgttagagtaaagtagaatttttttttttttagattttagtggttgagttgggttgttagggtagggatggtgagggtttaaatgttagggtagagtaggttatggtattttgtttatttataaatgtttttgtagattttggtgatggttgtattgggggtgtagtttttagaattatttgaagtttatgtagattgtttttttaagtatgggggtgggggaggttggttttttgagtagggtttggtttttgtattagtgtagttttattttttttttagtttaggtttaggttgttgggggtgtagagagggtgagttgtaagtggaggtgagaagggagtttgtgggatgtaggtttagagagaagtttttgaggaatttttttgttttttttatgagtggagttttggggtagttttgtgtttttgttatagttattttaggagatgatggttgtgggttgtgtttgtgggtgtgtgtatttgtgtatttgtgtgtgtgtgaagagggagagagatagaggggagtgagatagagatttggagaggggatgggagagagagattggaaggggaaggaggaggagagaggtaggaaagtagagagggatagggagagtgtggagggataggattattagggaaatagggagagggagggagaagagagggagagaggaggtgtgagaaatagtaggagagagagggagggtgtgggagagagagggattttaagaagggggaatttttttatagtttttttttattgttttttagagatatttttggggttgtttttgtagagggggttgttgtgagttgttggagggagtgagggtgatgtgttttttggtgttttaaaatgaggtttttgtttgtattttagtaatttagatttagggaaaatattattaggattttttaatagtaagggaggttttgttagataggtttaagtttttaggaagttgggttttgtttttgagttgggggtttttaggtttttgttagagttatttttttttaagatatttataagttggtttttagtaaattttaaatgttatggttgtttttatggtgttgtttttttatttttttatttttaaattgtaggatttttaattttatttaaaatagtggatgtttttttgttttttggggtattaggatgtgttgtgagtgttgagggtagatgtgggatttggaaggtttagttgggaatttatgttttgtaatgagttgttttgagtttttggatgaggtggaaaattattttagttttagttttttgtaaagatagattagtagttatatttttttatgggttttttgtgatgttattgaggtggtgaaaggagtatttgtttttaatggtatttattattaagttggattttagtaattatttgtgtggtaggagttattatattggagttttgtagtagttaaggagag

SEQ ID NO: 3390 - DNA, 2483 bp, Artificial Sequence
  chemically treated genomic DNA (Homo sapiens)
ttttttttggttattgtgaggttttagtgtgatagtttttgttatgtagatggttgttgagatttgatttaatggtgggtgttattagaggtaggtgttttttttattgttttagtgatattataaagaatttgtggaggggtgtaattgttgatttgtttttataggaaattgagattggagtaattttttattttgtttaaggatttagggtagtttattgtagagtgtgggtttttagttgggttttttggattttatgtttgtttttagtatttataatatattttggtgttttagaaaatagagaaatatttgttgttttgaatagaattaggaattttatagtttagaggtagagaagtgagagagtaatgttatgggaataattgtggtgtttagaatttattggggattggtttgtaggtgttttaagaggaagtggttttggtaggggtttgaagatttttagtttaggggtagggtttagttttttggaggtttgggtttgtttgatagagttttttttgttgttgaggggttttggtggtgttttttttgggtttgggttgttggagtgtaggtggaggttttattttggggtattgggagatgtattatttttattttttttagtagtttgtagtaattttttttgtagaggtggttttagggatgtttttgagagatagtgggagaaagttgtagggaggttttttttttttggaattttttttttttttgtgtttttttttttttttttgttgttttttatatttttttttttttttttttttttttttttttttttgtttttttaatggttttgtttttttgtattttttttgtttttttttgtttttttgtttttttttttttttttttttttttaattttttttttttattttttttttaggtttttgttttatttttttttgtttttttttttttttatatatatataggtgtataaatgtatatatttataaatatagtttatagttattattttttgagataattgtggtagaaatatggagttgttttaaggttttgtttgtgaagggaatagagaggttttttggaggtttttttttgagtttgtgttttatgagttttttttttatttttatttgtagtttgttttttttgtatttttagtagtttggatttgggttgggagggaggtggggttgtattggtgtagaggttgggttttgtttagggggttagttttttttatttttgtgtttgggggagtagtttatgtgagttttgagtggttttgggggttgtatttttagtatagttattattagggtttgtggagatatttgtgggtggatgggatgttgtggtttgttttgttttggtatttgaatttttattatttttgttttgatggtttagtttagttattggagtttgggaggagggaggttttgttttgttttgatagatgttaatattattgtaggtttgaggttgttttgtagaagatagagtttatatgtagggagatggggtaggatttttttttttattttttggtatgagttaggttttatattagtgtttagttaggtttgtttaggggttgtttgggtgttaggggggttaaggtagtgtttggtgggatagagtttgtttagatttgaggggatggaggggttggagttgtttatttgggaatgaaggattagagtttggtgagttttggtttgtttgggttaggttggttgtgtttttgtttttatggttttttttatttttatggttatttttatgtgttagaagttatggtggaagtaagtttgtgagttaatttagtatttggtttagtttttttgagattgtgtgttagtgtgtgtgtttgtgtgttagtgtgtgtatgggtttgtttgtgtttgtgtgtgtttgtgtgtttttgtatgtttgtgtttgtgtgtatttgtatgtgtttgtgtttgtgtgagtttgtgtgtttttgtgtttttatatgtttgtgtgtatttgtgtgtgtttttgtatgtttgtgtgtgtgtttgtatgtgtttgtgtgtgtttgtttatattgtatttgtgtgtttgtgtgtgtgtatgtgtgtatgtttgtgtgtattttgtgtgtttttgtgtgtgtttgtggtttgtgtgtgtgtgtgtatgtttgtgtgtgtgtttgtggtttgtgtgtgtgtgtgtgtatgtttatgtgtgtgtttgtggtttgtgtgtgtgtgtgtgtgtatgtttgtgtgtgtgtttgtgtttttattttagatgggtttgggagtttagaaatttagattttatattttttagttgtaggatgatgatgtttgattggattatgttttaagttattttttatgagaaaattttatgtttttataattgtagttaatattgtatttttttatttttagttaatttggttatatgttttaaaattatagtttgttatttagttttgtttat

SEQ ID NO: 3391 - DNA, 2439 bp, Artificial Sequence
  chemically treated genomic DNA (Homo sapiens)
tagttgggattgtaggtatgtattattatgtttagttaatttttgtatttttagtagagatggggttttattatgttggttaggttggttttaaatttttgattttgtgatttatttgttttagatttttaaagtgttaggattataagtgtgagttattgtgtttagttttgagtaaagttttaaaagtggaatgggttttttgtttttaatgtaggttttttatatggtagttttattaaatggagtagattttatttttatgtatatgaaataatagtattaagttatttttttttttgtttataatattttagttaagttggttttttttttatttttaagatattgtaaatttttttttatattggagttttttatgttgtttttttggttgagatgtttgtttttgttttttttattggttaggttttgtttttgtaagttttagtgtaaatgtttttgttaaagttgtttattttgatttttttttaatttaaattaggtttttttgataattttttattatttttgtttatttgttttttttttagaatttattatattttatttattattttttgagatggagttttgttttttttgtttaggtggagagtaatgatttgtttttattttattaaaatttttgttttttgggtttgggattattttgttgtaggtttttaagtagttgagattataggagtttgttattatgtttggttaatttttttgtatttttagtagagatggggttttattatgttggttaggttggttttgaatttttgattttaggtgatttgattgttttagttttttaaaatgttgagattataggtgtgagttattgtgttaggtttatgttttgtaattatataatgtgttttgttatttttgtaatttgtgttgtttttttttatgaaggtataggtatatttgtttagtttttggttatgtgggtatttggtgttgagtatttatttgtttgtgttgattgatgtttttttttagtttttattttttttttagaagttttttttttttgttttgagaggggttgagttagttgtggtttttttttattttgattttagtggagataagttggggaagtttttgggagttgtgtgggtgagtagagttgagatttggtatggttgtattggttgggttattgtagggtgattggtggtttggtttgataatatgtttatttgagttatttttggtaaaggttattaggttttaggatggaatatgtatgggggaaatgttttttttgtgatatgtttattttgttttaaagtgagatgagggagggagggtgtggttgttaggtaatgaagtttagagtttattagagttgagggattgatgtgttgtgtatgggttgggttttatttttaggaagtttaggataaaattttgtttatgttagagggttttggttaaattttgttttgtgtgtttgggtgaagttttgtttttataagtggttttagtttttttagagtaagaattatttgtattttatttatttatattatttatttatttatttatttgagatggagttttattttgtttattaggttggagtatagtggtgtaattttggtttattgtgaattttattttttgggtttaattgatttttttagtttagttttttaagtagttgagattataggtatgtgttattatatttagttaatttttgtatttttagtagagatagggttttgttgtgttggttaggttggttttgaatatttgattttaggtgatttgtttgttttggtttattaaagtgttgggattataggtgtgagttattgtgtttggtttgttttttaaaatttttatttgatagatgaggaaatggaggtttaggttttgttgtattaagaagagggttttggattttgatttaggtttgggtgaagtttaggttttttgatttagggtggaggtataaatagggtaaataggtaaaaataagtgaaataaataaaaaaaaagtataattattaatgttattgaaaagaattatttaagattttgaggttaggtgtggtggtttatgtttgtaattttagtattttgggaggttgaggtaggtggattatgaggttaggagattgagattattttggttaatatattgaaattttgtttttattaaaaatatataaaaaattagttggtgtggtggtatatgtttgtagttttagttatttgggaggttgaagtaggaggattatttgaatttaggaggtggaggttatagtgagttgagattgtgttattgtattttagtttgggtgagagagtaagagtttattttaaaaaaaagaaaaaaaaagattttgaaatgtaaagttgtaaaattttgtatttttttttatagttttaggtttgttgataggtaga

SEQ ID NO: 3392 - DNA, 2439 bp, Artificial Sequence
  chemically treated genomic DNA (Homo sapiens)
tttgtttgttagtaagtttggggttgtagagaagggtataggattttatagttttatattttaaaattttttttttttttttttttgagatggatttttgtttttttgtttaggttggagtgtagtggtataattttggtttattgtaatttttattttttgggtttaagtgatttttttgttttagttttttaagtagttgggattataggtgtgtgttattatattagttaattttttgtgtgtttttagtagagatagggttttaatgtgttagttaggatggttttgattttttgattttatgatttgtttgttttggttttttaaagtgttgagattataggtgtgagttattgtatttggttttaaagttttaagtaattttttttaatggtattagtgattatgttttttttttgtttgttttgtttgtttttatttgtttattttgtttatatttttattttaagttaagaggtttgagttttatttagatttgggttaggatttagagttttttttttagtgtagtgaggtttgggtttttatttttttatttgttaaatagaaattttaaaaaataggttgggtgtggtggtttatgtttgtaattttagtattttggtaggttaaggtgggtagattatttgaggttaggtgtttgagattagtttggttaatatggtaaaattttgtttttattaaaaatataaaaattagttggatgtggtggtatatgtttgtgattttagttatttgggaggttgagttaggagaattagttgaatttgggaggtggagtttgtagtgagttgagattgtattattgtattttagtttggtagatagagtgagattttattttaaatgaataaataaataaataatataaataaataaaatataaataatttttattttgaaggaattaaaattatttgtgaagataggattttatttaaatatataggatagaatttggttaaagttttttaatatgaatagggttttgttttgagttttttggaaatgagatttagtttatatgtaatatattaattttttaattttagtaaattttagattttattatttggtagttgtgtttttttttttttgttttattttagagtgaggtgggtgtgttatggaagaggtattttttttatgtgtgttttattttggagtttggtaatttttgttaaagatgatttaggtaaatgtgttattaagttgagttgttagttattttgtagtgatttggttagtatagttatgttgggttttagttttgtttatttgtgtagtttttagaaatttttttggtttgtttttattggaattgggatggaagggagttatggttggtttagttttttttggagtagaaagaggaaatttttgaaaagaagatgggggttgggggaggatattaattagtatggataagtaagtatttagtgttaggtgtttatgtggttaggaattaaatagatgtgtttgtgtttttgtaaaggagggtaatataggttataaaaataataagatatgttatgtgattataaagtataggtttggtgtggtggtttgtgtttgtaattttagtattttgggaggttgaggtagttggattatttgaggttaggagtttgagattagtttggttaatatggtgaaattttgtttttattaaaaatataaaaaaattagttaggtgtggtggtaggtttttgtaattttagttatttgggagtttgtggtaggataattttgaatttgggaggtagaggttttggtgaggtgagggtaggttattgttttttatttgggtaaaaagagtaaaattttattttgaaaaataataaataaagtatggtaagttttagaaagaaaataaatgagtaggaatgataaaaggttattaagaggatttgatttaaattggggaggggttaagatggataattttaataggagtatttatattgagatttgtaggagtgggatttggttggtgaagagggtaaggataagtattttagttgaaggaatagtatagaggattttaatgtgggaaagagtttgtagtgttttagaaatggaaaaggggttaatttagttaaaatattgtgagtaagggggagagtggtttgatgttattattttatatatataaagataaaatttattttgtttaataaagttgttatgtggggagtttatgttgggaatgggaaatttattttatttttaaaattttgtttgaggttgggtatagtggtttatgtttgtaattttagtgttttgggagtttgaggtgggtggattataaggttaggagtttgagattagtttggttaatatggtgaaattttgtttttattagaaatataaaaattagttgggtatgatggtgtgtgtttgtaattttagtta

SEQ ID NO: 3393 - DNA, 2450 bp, Artificial Sequence
  chemically treated genomic DNA (Homo sapiens)
gattttggtttattgtaatttttattttttaggtttaagtgatttttttgttttagttttattgggtagttgggattgtaggtatgtattattatgtttagttaatttttgtatttttagtagagatggggttttattatgttggttaggttggttttaaatttttgattttgtgatttatttgttttagatttttaaagtgttaggattataagtgtgagttattgtgtttagttttgagtaaagttttaaaagtggaatgggttttttgtttttaatgtaggttttttatatggtagttttattaaatggagtagattttatttttatgtatatgaaataatagtattaagttatttttttttttgtttataatattttagttaagttggttttttttttatttttaagatattgtaaatttttttttatattggagttttttatgttgtttttttggttgagatgtttgtttttgttttttttattggttaggttttgtttttgtaagttttagtgtaaatgtttttgttaaagttgtttattttgatttttttttaatttaaattaggtttttttgataattttttattatttttgtttatttgttttttttttagaatttattatattttatttattattttttgagatggagttttgttttttttgtttaggtggagagtaatgatttgtttttattttattaaaatttttgttttttgggtttgggattattttgttgtaggtttttaagtagttgagattataggagtttgttattatgtttggttaatttttttgtatttttagtagagatggggttttattatgttggttaggttggttttgaatttttgattttaggtgatttgattgttttagttttttaaaatgttgagattataggtgtgagttattgtgttaggtttatgttttgtaattatataatgtgttttgttatttttgtaatttgtgttgtttttttttatgaaggtataggtatatttgtttagtttttggttatgtgggtatttggtgttgagtatttatttgtttgtgttgattgatgtttttttttagtttttattttttttttagaagttttttttttttgttttgagaggggttgagttagttgtggtttttttttattttgattttagtggagataagttggggaagtttttgggagttgtgtgggtgagtagagttgagatttggtatggttgtattggttgggttattgtagggtgattggtggtttggtttgataatatgtttatttgagttatttttggtaaaggttattaggttttaggatggaatatgtatgggggaaatgttttttttgtgatatgtttattttgttttaaagtgagatgagggagggagggtgtggttgttaggtaatgaagtttagagtttattagagttgagggattgatgtgttgtgtatgggttgggttttatttttaggaagtttaggataaaattttgtttatgttagagggttttggttaaattttgttttgtgtgtttgggtgaagttttgtttttataagtggttttagtttttttagagtaagaattatttgtattttatttatttatattatttatttatttatttatttgagatggagttttattttgtttattaggttggagtatagtggtgtaattttggtttattgtgaattttattttttgggtttaattgatttttttagtttagttttttaagtagttgagattataggtatgtgttattatatttagttaatttttgtatttttagtagagatagggttttgttgtgttggttaggttggttttgaatatttgattttaggtgatttgtttgttttggtttattaaagtgttgggattataggtgtgagttattgtgtttggtttgttttttaaaatttttatttgatagatgaggaaatggaggtttaggttttgttgtattaagaagagggttttggattttgatttaggtttgggtgaagtttaggttttttgatttagggtggaggtataaatagggtaaataggtaaaaataagtgaaataaataaaaaaaaagtataattattaatgttattgaaaagaattatttaagattttgaggttaggtgtggtggtttatgtttgtaattttagtattttgggaggttgaggtaggtggattatgaggttaggagattgagattattttggttaatatattgaaattttgtttttattaaaaatatataaaaaattagttggtgtggtggtatatgtttgtagttttagttatttgggaggttgaagtaggaggattatttgaatttaggaggtggaggttatagtgagttgagattgtgttattgtattttagtttgggtgagagagtaagagtttattttaaaaaaaagaaaaaaaaagattttgaaatgt

SEQ ID NO: 3394 - DNA, 2450 bp, Artificial Sequence
  chemically treated genomic DNA (Homo sapiens)
atattttaaaattttttttttttttttttttgagatggatttttgtttttttgtttaggttggagtgtagtggtataattttggtttattgtaatttttattttttgggtttaagtgatttttttgttttagttttttaagtagttgggattataggtgtgtgttattatattagttaattttttgtgtgtttttagtagagatagggttttaatgtgttagttaggatggttttgattttttgattttatgatttgtttgttttggttttttaaagtgttgagattataggtgtgagttattgtatttggttttaaagttttaagtaattttttttaatggtattagtgattatgttttttttttgtttgttttgtttgtttttatttgtttattttgtttatatttttattttaagttaagaggtttgagttttatttagatttgggttaggatttagagttttttttttagtgtagtgaggtttgggtttttatttttttatttgttaaatagaaattttaaaaaataggttgggtgtggtggtttatgtttgtaattttagtattttggtaggttaaggtgggtagattatttgaggttaggtgtttgagattagtttggttaatatggtaaaattttgtttttattaaaaatataaaaattagttggatgtggtggtatatgtttgtgattttagttatttgggaggttgagttaggagaattagttgaatttgggaggtggagtttgtagtgagttgagattgtattattgtattttagtttggtagatagagtgagattttattttaaatgaataaataaataaataatataaataaataaaatataaataatttttattttgaaggaattaaaattatttgtgaagataggattttatttaaatatataggatagaatttggttaaagttttttaatatgaatagggttttgttttgagttttttggaaatgagatttagtttatatgtaatatattaattttttaattttagtaaattttagattttattatttggtagttgtgtttttttttttttgttttattttagagtgaggtgggtgtgttatggaagaggtattttttttatgtgtgttttattttggagtttggtaatttttgttaaagatgatttaggtaaatgtgttattaagttgagttgttagttattttgtagtgatttggttagtatagttatgttgggttttagttttgtttatttgtgtagtttttagaaatttttttggtttgtttttattggaattgggatggaagggagttatggttggtttagttttttttggagtagaaagaggaaatttttgaaaagaagatgggggttgggggaggatattaattagtatggataagtaagtatttagtgttaggtgtttatgtggttaggaattaaatagatgtgtttgtgtttttgtaaaggagggtaatataggttataaaaataataagatatgttatgtgattataaagtataggtttggtgtggtggtttgtgtttgtaattttagtattttgggaggttgaggtagttggattatttgaggttaggagtttgagattagtttggttaatatggtgaaattttgtttttattaaaaatataaaaaaattagttaggtgtggtggtaggtttttgtaattttagttatttgggagtttgtggtaggataattttgaatttgggaggtagaggttttggtgaggtgagggtaggttattgttttttatttgggtaaaaagagtaaaattttattttgaaaaataataaataaagtatggtaagttttagaaagaaaataaatgagtaggaatgataaaaggttattaagaggatttgatttaaattggggaggggttaagatggataattttaataggagtatttatattgagatttgtaggagtgggatttggttggtgaagagggtaaggataagtattttagttgaaggaatagtatagaggattttaatgtgggaaagagtttgtagtgttttagaaatggaaaaggggttaatttagttaaaatattgtgagtaagggggagagtggtttgatgttattattttatatatataaagataaaatttattttgtttaataaagttgttatgtggggagtttatgttgggaatgggaaatttattttatttttaaaattttgtttgaggttgggtatagtggtttatgtttgtaattttagtgttttgggagtttgaggtgggtggattataaggttaggagtttgagattagtttggttaatatggtgaaattttgtttttattagaaatataaaaattagttgggtatgatggtgtgtgtttgtaattttagttatttggtggggttgaagtaggagaattgtttgaatttgggaggtggaggttgtagtgaattaagatt

SEQ ID NO: 3395 - DNA, 2481 bp, Artificial Sequence
  chemically treated genomic DNA (Homo sapiens)
ggtataaagatattaggttgaataggttttttatttggggggtttgtggtttttgaaatgtattttagatattttgtataggtgtgtgtttttattttggttgttgtgtgagttgaggataaaattttggttgttgtgggagttgagtttgtgggtaggttgagttaggggtgggagtgagagggaggggtgagaggggtttgagtatttatttagtgtatgttttatagaattagtttgttttaggaagttttggtgtttagtgttataatgtatattttagttttgtgtttgtatattagattttgggtttgttttatatgggtgttttgagttgattttttttgttggagttgttgaagggttttgtaggttttaatttatagttagtttttaattttgttattagtaggggttttagtttatagtaatgtagttgtttttattgtaggttaattttgttatagtgttgttaatttgaaatatttagtttagagtgagtttttggggaggtgggaggttgtttaagtattttatttgttgtgtgggtaagaagtggtttgtattttattagagtttggggatttaggatttagatttgttgttttgtagttgtgtgattttgggaaggttaggttttattttgggtgtgttttttttttttgaagatttaatttggtttgtgtgttaggagtggagggtttgttggagtttgaggaagatggtagttgggttggtagtagggtgagtagggtttgagtggggttaggttttttatattggataatgatgtttattgtaaagtttatgttttggatttttgataaatattttagtaattgatttgatattttattatgtttaagttgatttgtttttatgttggatatgtgtttattaggatgtgtttttggttgttattggtagggtttggaatgaggatatttgttgtgtattttgttttggagttttagataggtaaaaaaatatttatgtggttttatttaggttatttttttgtttgtatgaattttaggttatttttagaaagggttttatagttttggtgttttattttttgatttttgttaagttgtttttagtagtagttggaattttttgaagtggttgttatagatgttggtaaagtttggtttgggatgtttttattttgtattaggtatggggttgtttttgttgtatatttatttggaaattatttatatgttaagtattgtagaggtaaggggagtttgttattggattgtgtttaatatggttgtagggatatagataagtatattttttggtagaggtatgggtttggttggttggagttgtagtagttgtgtgtggttatagagtttttaaatgagggagatggatggttttgttttatagtgtgtttagagtatgtttatggtgtttgggaagattagggatttattatgtttggttttggttttttttatagtgaagtttttttgttggtaggatttatggttaagtatgggggtaggggttgggggagttttgttagtgattttttgtaggtagtaaggtttttgggagttggttaggaaaatagaaattttattttggagtaggtgtgtaaattaatagtttagaaattaataaggtttttattaaggattatgagttatttgtgttgttttgtttgttttggtatttgtgtaggatatggggtggggggtgggggaagtatatgttaatagggagttggtggttgttttgagagttagttttttttttataatttgtttgaaatttttttttttgtagaagatggaatttagtatattttgagagtttattgtataggttaggtgtatttatgtttattgtttttattagtaaaagagtaaaattaaaattaaataaatgaagattttggtaagattgtttgattttgttttgaggtgagtatatagtagtattgggaaagtgtgtaatttataaagatggtgtagtttgtaggttaggaggggttggggtttgttgagggtagttggggttttgtagtttgatttataatattgtatttagagtggggaggtgttgtttttaggtttatttgtgatttttgaggtataggtagagggttgggtgtgtatgatattgtataggagttttttttgtagtgtggaatttatttatgttgtttgtttttttagtttttaaatgtatttggggtttgagattagaaatagtagaagttttggtggttagtggaatagttatttaagtggatttttattttttgggtattttttgagtatttttttgttaggtattgttttaggggttggtgatgggaagtttattttgtttatgaggtttttttggtatagaggtggatattgagggattgttggtttatatgtatgttgaaatatgtgtttagttgatgtttttttaagtgagtttttttgtaggataggattatatagtgtttttaaa

SEQ ID NO: 3396 - DNA, 2481 bp, Artificial Sequence
  chemically treated genomic DNA (Homo sapiens)
tttgaggatattgtgtggttttgttttgtaggagggtttatttgggaagatattagttgagtatatattttaatatgtgtgtgagttagtggttttttagtgtttatttttgtgttgaaagagttttatgggtaaggtgggttttttgttattagtttttgaaatagtgtttagtagggaggtgtttaaagaatgtttaggagatgagggtttatttaggtaattattttattaattattagagtttttgttgtttttgattttagattttagatgtatttggggattgagggagtaggtgatgtgggtgggttttatattgtggagaggatttttatgtagtgttatatatgtttgattttttgtttgtattttaggagttataggtgggtttggagatagtatttttttgttttgagtgtagtgttgtggattaggttgtaaagttttagttgtttttgatagattttagttttttttgatttgtaggttgtattatttttatgagttatgtatttttttgatgttgttgtgtgtttattttaaggtaggattaagtaattttgttagagtttttgtttgtttgattttggttttgtttttttgttgatagaaatagtaaatataaatgtatttgatttgtgtagtgggtttttgagatgtgttgggttttattttttgtaaagagaaggattttaagtaagttatgagaaaggagttggtttttagagtggttattagttttttgttgatatgtgttttttttgttttttattttgtgttttgtgtaagtattagaataaataggatagtataggtggtttatggtttttggtgggaattttgttaatttttgagttgttggtttgtgtatttgttttaggatggagtttttgtttttttggttagtttttagaggttttgttgtttgtgagaagttattgatagagtttttttagtttttgtttttatgtttggttatggattttattagtaaggaggttttattgtgagggaaattagagttgggtatggtgagtttttggtttttttaggtattgtggatatgttttgggtatattgtgaagtgaggttatttattttttttatttggaagttttgtgattatatatagttgttgtagttttagttagttgggtttgtgtttttgttagggaatgtgtttgtttgtatttttgtagttgtgttgaatgtagtttaatggtagattttttttgtttttgtggtgtttggtatgtggatgatttttaggtgaatatgtagtagaggtagttttgtgtttggtgtagggtggaggtattttaggttgggttttgttaatatttgtggtagttattttaaagagttttagttgttgttgaagatgatttggtaaaggttagagagtgagatattggggttatgagattttttttaagggtggtttgaggtttatataagtaaagagatgatttgggtgaagttatatggatatttttttgtttgtttggggttttaaagtaaggtgtataataagtgtttttattttaggttttgttagtggtagttaagagtatgttttggtagatatatgtttagtatggaaataaattaatttggatatagtggagtgttaggttgattgttaagatgtttgttaaaaatttaggatatgggttttatagtggatattattgtttagtgtgggaagtttggttttatttagattttgtttattttgttattgatttagttgttattttttttagattttagtaggttttttatttttagtatataggttggattgaatttttaggaaagaagagtatatttagggtgggatttgatttttttaaggttatataattgtggagtagtagatttgggttttggatttttaaattttgatgagatgtaggttgttttttgtttatatagtaggtaagatgtttggatagttttttgtttttttaaaaatttattttgggttggatgttttaggttggtaatgttgtggtagagttagtttgtagtgaaaatagttgtgttgttgtaagttggggtttttgttgatgatagggttgggggttgattgtagattgaggtttgtagaattttttagtaattttagtagagggaattagtttaaggtatttatgtggagtgggtttggggtttggtgtgtaggtatagggttggagtgtgtattgtggtattgggtattggaattttttggagtaggttagttttgtgaagtatgtgttgagtaggtgtttaggttttttttattttttttttttatttttatttttggtttagtttgtttataggtttagtttttatagtagttaggattttgtttttagtttatatagtagttaggatagagatgtatatttgtgtaaagtgtttaagatgtattttggggattataggttttttagatgaaggatttgtttagtttgatgtttttgtgtt

SEQ ID NO: 3397 - DNA, 2223 bp, Artificial Sequence
  chemically treated genomic DNA (Homo sapiens)
gtttttatattggttgtgattttttttatgttttttttatttatttatttatttatttatttgtttatttattttatatttgtatattttttatgtttttagtattttattatatattagaatataaaaggtaattttgtttttatggggtttggagagtaatggggaaatagatgaataattttgtatgtgttttgaagttatagggaatttatatttaatttatatttgtttttttatagtaaagttttttgtagaaaggatttgaattaatttgttagaaaaggtataaggaataatatgatatattttaattaaagaagataattaaaattaaaggagaaagtgtttattgagtatttattatgttttaagtatttttgatatatttttttattttatggtttttatatttttgagttagtgttattttttttttagagataagtaaagtgaggttgattagttttagttgagagttaaatagttgagttaggttttaaagtttatatgatattatagaatagttgttgatgagttttggatttgatgatgagttttttagtagtttgggggagaaggaaagtggaatatattatttgattgtttattagataagaaaaagttagatatttttttgaagggaagtaaagttttttttagtagtgaatttatttgtttttttttaagtgggagttggaagagagtttgtggggtggaatatagggggttttgttaggattgtttaagttgggtgtttttatggtatatatgtgaggaggttgttatgtgaatgtttatggttttttggaaaatgtttgtttttagtgaatattgtttttggtgtttgtgtatgtgtatgtgtgtatgtgtatatgtgtttgtgtgtttttttttgttttattgttttttttttttttatttggttttttttttattttatttgtttgtttgtttgtttgtttgtttgtttttatttttgtttttttttggtaaaagtttttgttgtttaaaattttgttagtttttaggaagtgttgttttgttaaaagtttgtatatgagatttttgtgggttaggattgattttttttttatatagggttgggtggggtaagtaggaaggagtttgttatagttaaggtgatgtatttttgttgggttagtttgaatagtagttgggttggtaagtgataggagtatgggttattttttttttagaggtgttggaatggatttgtgttatttaggtaagtaattgttgttaatttttttgggttttagggtgtttttttttagaatgggatagtagtttttgttttatagggttttagataaaggaatatagtgtaggtgggaaatgtagttgtaagaagtaaatatttgtgggtttagtttgtgtgtttagttgtgttttaggggttggatatatagtagtagtaaagtagatgttgtttttttttttataggtttgtgttttagatgaggagattggtagtgattttaatgtgattttatatgttagttgatggtaggtaggatgaagaatagtaaagtagggtaaggaagataggaatgtatggtggaaaaggttttaagaggagatgttgtttgatgagggatttgaggaagatgttagttaaggggttttttaaggaataaatattttagttagaaggaatagttagtttaaaggtttagaggtggatttagaaaagtgatttgtgattaagatgatgatgggatgttggtgatggtgatgtttgtttgggtgatataagggttttgaggtttttttttggtttttgggggttggggtggtttttggggaggttgaggatgttgtttagagttaggggagggttaggagtgagtaatagaggttttggttgaaattttttttagttattaagataatgtgtttggggagaaagaggagaaaggaggttgtaaagatggtgaggaaaagaatattagggttgtgttttgggaggtaaattgaaggtttggtagaggggttaagtttttgtattttggatgttagtatgttttagagttgtaatagttttggtgaatatggttgttggaattttagaatttaagggtttgtgggagttgtttgttttttaggtttagatgattttagttttgtttaggagtatttttgttttaaatgtatttaatgtggagtagtttggttttgtttattgggtatttttttttt

SEQ ID NO: 3398 - DNA, 2223 bp, Artificial Sequence
  chemically treated genomic DNA (Homo sapiens)
ggaagggggatgtttagtgggtggggttaggttgttttatattaggtgtgtttgaagtaagggtgtttttggataaggttgaggttatttggatttggggagtagatagtttttatgagtttttaggttttggaattttagtagttgtgtttattagaattgttgtagttttggagtatgttgatatttagggtgtagaaatttggtttttttattgggtttttaatttgttttttaaaatatgattttgatgtttttttttttattatttttgtagtttttttttttttttttttttttagatatattgttttagtagttggggagggttttaattagagtttttgttgtttatttttggtttttttttggttttaggtagtgtttttagtttttttaaagattattttaatttttgggggttaaaaaggggttttaaggtttttgtattatttagataagtattgttattattaatattttattattattttaattgtaagttatttttttgagtttatttttgagtttttggattggttgttttttttggttggaatgtttgttttttagaaagttttttagttgatattttttttaggttttttattagatagtatttttttttggggttttttttattatgtatttttgttttttttattttgttttattgttttttattttatttgttattaattgatatatggaattatattagagttattgttggtttttttatttagagtataagtttatgaagggggaaatagtgtttgttttgttattgttgtgtgtttagtttttagaatgtaattggatatataggttgagtttataaatgtttgttttttgtagttgtattttttatttgtgttgtatttttttatttaggattttgtgaggtaggggttgttgttttattttaaaagagagtattttgaggtttagagaggttgatggtagttgtttatttgggtggtataggtttattttgatgtttttggggaaaagatgatttgtgtttttgttgtttgttgatttagttgttgtttgggttggtttggtaaggatgtgttattttgattgtaataggtttttttttgtttgttttgtttagttttgtgtggggaggaagttagttttggtttatgggggttttgtgtgtaggtttttgataaaatagtattttttaaaaattggtagagttttgagtagtagggatttttgttagggagggatagaggtggaaataaataaataaataaataaataaatagatgaagtgaggggagggttagataaaaaagagaaagatagtgagatagaaagaaatatatagatatatatgtatatatatatgtatatatgtatagatattgagggtgatgtttattgaggatgaatattttttaggggattatgggtatttatgtggtagtttttttatatatatgttataggagtgtttaatttggatagttttagtagggttttttgtgttttattttataagtttttttttaatttttatttgagaagagataaatgaatttattgttaggaagggttttgtttttttttaaagaaatatttggtttttttttgtttagtgaataattgggtaatatgttttatttttttttttttttaggttgttgggaaatttattgttaaatttaaagtttattgatagttattttatgatgttatgtgaattttggggtttgatttagttgtttgatttttagttagggttagttagttttgttttgtttatttttgaaaggggaataatattaatttggggatatggaaattatggagtgagaggatgtgttggagatgtttgggatatagtaggtgtttaataaatatttttttttttgattttaattattttttttggttaaaatgtattatgttattttttgtgttttttttggtaggttggtttaaattttttttgtaaaaagttttgttgtaaagaaataggtataaattaaatgtgaattttttataattttaggatatatgtagagttatttatttgtttttttattattttttaggttttatgagggtaaggttattttttgtgttttggtgtgtggtaaaatgttggggatatagagggtgtgtaagtgtggaatgaatgaataaatgaatgaatgaatgaatgaatgaagggaatatggaagagattatggttgatgtgaaagt

SEQ ID NO: 3399 - DNA, 2495 bp, Artificial Sequence
  chemically treated genomic DNA (Homo sapiens)
tttttgatggatattggagttattatttttaatataatggaggattgtttttgagtgttggagatttagaggtatagggagatgttttgttttttgggggatgttttttttttttattattattattttagtttttatggggattttttttttaaggttttttatggtattttattgttaagtttaagtttttttataggatttggttttatttttttttgttttttttgtatttttttttttgtattttttttttggattttgggttttttaggatttagttttggtttttttttttttggttattttttataagattttgattatttttgtggttttttgggttatttgtgttattgttagttatttttaagtttttgattaaagtttaggtttttttttttgtggtttttgttttttagttagtttttttgtgtattttatagaattttatgtttaagtgtttttaattgaattttttattttttttttagttggttttttgtttttgatttttttatgttatttagtgagttttattgggtgttttggaggagtttaggttggtggtttttttttttttatttgtttttagtggtttgggtttagttgtttattttttatttttttttgtttattttttttttttttttagttattttttgggtttttattattagtgttattgttggaaataggggttttttatgtttgttttgttgtatggattgaagtttgttggttgttttgggggttttttttattgggatattattttattttttttttattagggtatatttggtatatatttttattggggatttattatatttttttttttttttttttattagggtatatgtggtttttttttattgtagggtttttgtttgggttgatttagagatgtaaggatatagtgtttagggatttttttttgggggtttgtttattttttttttgtaaaatgggaagttgtgtgttggtgattgttttgtttataggtttttttttttttgggattggttagattttttttagatggttttatttttgttatggttgattggtttaggttggatatgtgatttaagtgaaatttaatgggatttttttttgtgattttgaatttggggaggagatttggagtttggaggtggtagtgatttgggagttgtgtgggtttgtttgttttatatattgtttttttgtttttttttttaatttatggtttttttagaggataatttttttttttaaattttttggatgaggtttttgtggtagttgagagagttatgtagtgggggtgttttttttgtttgtgggggagttttaggtggtttgtatagttttgtggtggttgggtttggttatgtgtgttttttggtttttatgtggttttagtagggtgtttgttttttttttagggtttttttttttaggagggatagtaggaaggtaggtaaggataggatttgagtttatattttgtttgtggttatttgtttgattaggaggaaggggaggggataggagtgattttatggaggttatttgggagttggggttgggtgattttagggttggatgattttagggttgggtgattttagggttgggtgattttagggttgggtgattttaaggttgggtgattttagggttggatgattttagggttgggtgattttagggttgattattggtggagtatttggggtgggtgttatgggtatttgagagggaattttgatttgagtggaggttagaatttttttttgaggaagtgttttattttattgagtttttagaggttggtggtaggttgaataggggattatgttagtagagggattgttttttagagattttggattattattatgatgggttgattttataaatttagttattgttattggaggtttggttgaattttagagttttttttttagtgttggttttttggtttgtaatggggagggttggatttttttgtattgatatttttatggtatggttgtgggaggggtgtttattttgttggtttggtggttgtggagtggttggaggtggtgtgtgttaaagttgttgttggtgttttttttggttgttttggggtgatgataggagttgatggtttggtagtagtttttagggaggtagtagttgggttggtggtgggtggtggtggtggtgggagggggtttttggagagaataaagtattgaggatgttgggttttaggggtgatagaggagtgggggatgggggtagggttttggagtgtgtggtttatagggaggttatggtatgggtgtgtgtgtgggtgtaggatttggaatttattttgtggttgtgtgagtttaggtaggttatttagtttttttgggttttagtttttatagttgtgtaattggaataatattattattatattattgtatttttagtgttgagagtagtgagtggtatagagtaggtattta

SEQ ID NO: 3400 - DNA, 2495 bp, Artificial Sequence
  chemically treated genomic DNA (Homo sapiens)
tgaatgtttattttgtgttatttattatttttagtattggggatataataatgtaatgatggtattgttttaattgtataattgtggaaattgaggtttagagaggttaagtgatttgtttgggtttatataattatgaggtgggttttaaattttatatttgtatatatatttgtgttatggtttttttgtgggttatatattttagaattttgtttttattttttatttttttgttgtttttggagtttagtatttttagtgttttgttttttttagaagtttttttttattattgttattatttgttgttagtttggttgttgtttttttgggagttgttgttaagttgttagtttttgttattattttaaggtagttagagggagtattagtagtagttttggtatatgttatttttggttgttttatagttattaggttagtaggatgggtgttttttttgtagttatgttatgggagtattagtgtagggggatttagttttttttattataaattaagaaattgatgttggagaagaaattttgaagtttagttaggtttttggtgatagtggttaaatttgtaaaattaatttattgtggtgatgatttaaagtttttggaaggtagtttttttgttggtatagttttttgtttaatttgttattagtttttgggagtttagtggggtggggtatttttttagaggagggttttgatttttgtttaggttaaagtttttttttaggtgtttatggtatttattttaggtgttttgttaatagttagttttggggttatttagttttgaggttatttagttttgaggttatttagttttgaagttatttagttttgagattatttagttttgaggttatttagttttgaggttatttagttttggggttgtttagttttagtttttaggtgatttttgtggaattatttttgttttttttttttttttttggttaggtaggtgattgtggatgaggtgtggatttaggttttgtttttgtttgtttttttgttattttttttgggggaggaagttttgggagggaggtgggtgttttgttggggttatatggggattgaggagtatatgtggttaggtttgattattatgagattgtgtgggttgtttggggtttttttataggtggggaaggtatttttgttgtgtgatttttttggttgttataggaattttgtttgaggagtttaaggaaaaaggttgttttttgagggggttataggttgaaggaaggggtaagaaggtagtgtgtggaatagataggtttatgtggtttttaagttgttgttatttttaggttttaggttttttttttgggtttagaattataggagagaattttattgggttttatttgggttatgtgtttagtttggattaattagttatggtaggggtggggttatttggagggagtttggttagttttagagaagaaagagtttgtgggtgaggtagttattgatatgtagttttttattttataggagggaggtggataggtttttaaggaaagatttttgggtattgtgtttttgtgtttttggattaatttagataaaggttttgtagtgggagggagttatgtgtgttttggtgaagaggaggaagaagaggtgtggtaggtttttagtggaggtgtgtattaggtgtgttttggtggagaggaagtagggtaatgttttaatggagaggatttttgaggtggttgatggattttggtttatgtagtaagatagatatgagagatttttgtttttaataatgatattggtaataggagtttaggagatgattgggaggagggagggagtggatagggagagatagagggtgagtagttgaatttaggttattgaggataggtagagggagaggagttattggtttgggtttttttaggatatttagtggggtttgttgggtgatatggggggattgagggtaggaagttagttagggggaggatgaagagtttagttggaaatatttgagtatgaggttttgtggggtatataagagagttggttagagggtaggggttataaggagagaggtttgagttttgattggggatttaggggtgattggtagtgatataggtggtttaggaggttatgggagtagttaggattttataggaaatggttagaagagagggggttaggattgggttttgaggaatttaaaatttaggagaagggtgtagaggaaggagtgtggggagagtagggaggggtgagattagattttgtaggagaatttggatttagtaatgggatgttataggggattttgaggagagggtttttatgggggttaggatgatggtgataagaaggggagatattttttgaaaaatgaggtatttttttatgtttttgagtttttagtatttgggagtgattttttattatgttgagaataatgattttagtgtttattggggg

SEQ ID NO: 3401 - DNA, 2390 bp, Artificial Sequence
  chemically treated genomic DNA (Homo sapiens)
atagattagatttattgatagttaagtagaggtaggaagtgtttttaggagaggaaagtgaggtatttgtttttatgtaggagattgtataggtttatgtagatgttttatgttggttaatagggagttttgtatatataattttgaatattttttgtttaaagtgggtgggattatttttttttaagttatgagaaatagattttatagttattttagtttaatttgatttttattatttatttatttttttaatttatttatttatttaataaatatttttgtaggtttgttggggattatgttttgggttgggttttggttgtagtaatttttaggtttgtttgtaatttttttgttagtttgttattttattgttgggtttttttttatttaagttttttttttttagatagtttgaagggtttgtgtttattttaggttattaagtttttttattgaaatataggagatttttttagtttattaggtgattttgagtaagttttttttttaaattatatttagtgaatattggagagaagaaagttgatagaagttgggttgggttaggtttggttgtggggatatttgagggtagttaggtgtttgtagaagaggaggggttggtgttgaggtttgagatgggaaaagattgtagtggttggagtttgagtgtttggttttgggttgggaagaatagagtttgggattggtagtaggagtggagagggtggtattaagatttgaaaatggggtaagggtgggggttggggtaagttttgagttggtagggagttaggaaggttataggattagggtaagaatttagttgtttttgaggttttggagagggtgtagatttttgaattatttgttttattttaaggtaggtgtgttaatgtttttttttggagtaaagggttgattaggtttatggtagaaaggtgaaggtagatagatagttttttttttgttgttagttgggatttgggttaggtagatgggtatatttttttttttttattttatggttgttttagttttagtagttagtttgaaggatttttagggggtagttattttgttttggttttttttaggttgggaagtgggagtttgtgtttttaaatttttagtaggttgaaatggttgatgatattattggtttttgggagtggtagagttggagttggagttaagggagtttaggttgttgggggttgtagatatggagggttagagtagtaggggtagtaggaggttagggatttgggttggtttgggttttttgtttatgttttagggtgttgtttaaattggggtattttttaaggtaagatttttgagatttagtgttttttgtttttttgatttttggttttatatattttttttatatatattgtaggttttttggtgtttttgattgaggggttggtatttttttttgtttagtgagtaggggttaggtgaagagagtattttgggggttgaggggtagtgataggatgtttggagatagatgaagttagttatttttaggagtttttgggagagttttggattgggtattagaggatttagttgtgttttatttttgttgtgtgattttggttaagttgttttttttttttgagttaatgtaaaatgagggggtttgttgttgaagattaaaattgtgatatttgggatggttaagttgttagtattggaggtggtgtgatagttggggggaagttggtatatagtgtgatatttggagttaaggagggtgtttaaaatgttattttaaagaattgagtttgagaagggaggtggagatggagttttaggtattttgaattgagaaggatatgggatagaaatagaagtgtgtttttagaggtagggtttttttgtgttttgttattttatttagggttattttggggtaagtatagatatttttttgttttttttggtgaaggatattttattttgttttttggagataggggatattagagagaatagatggggaaggaggataggtttttataggattttgtgattttttattttttttatttgttggatataaatgggatatttgtttgtttgtttttttaggtaggggagaaagtggaggatgtaagagggtataatttgggtatagagagatgtgatattaggattaatttagaattttggatttgttttgaatgttagatttatatttggtgaggatggattatttaatggggttagatggaattttagtaaatgttgggtttataaatgtagataatgggagatgaagattttttagaatataatgtggttaggaattttagattttatttttttattttatagatagagaaattgaggtgttgggtagagaggta

SEQ ID NO: 3402 - DNA, 2390 bp, Artificial Sequence
  chemically treated genomic DNA (Homo sapiens)
tatttttttgtttagtgttttagtttttttgtttgtaaaatgaagggatggggtttagggtttttggttatattatattttggggaatttttattttttattgtttgtatttatgagtttaatatttgttagaattttatttagttttgttgaatagtttatttttattaagtgtgaatttagtatttagagtaagtttaggattttaagttgattttggtgttatatttttttgtgtttaggttgtgtttttttatattttttatttttttttttatttgaaaggataggtaagtaggtattttatttatgtttggtaggtgggaggggtggggagttatggagttttgtagagatttattttttttttttatttattttttttgatgttttttgtttttagaagataggataaagtgttttttattaaggagggtagaagaatgtttatatttgttttaggatggttttaggtagggtaatagggtgtagggaggttttgtttttggagatgtatttttgtttttgttttgtattttttttagtttagagtatttaaaattttatttttatttttttttttaaatttagttttttgaggtggtattttaggtattttttttggttttaagtgttatattgtgtgttggtttttttttaattattatattgtttttagtattaataatttagttattttagatgttatagttttagtttttagtgataagtttttttattttgtattggtttagagaggaaaagtaatttggttaaggttatatagtaaaggtggagtatagttgggttttttgatatttagtttaggatttttttaagggtttttggagatggttaattttatttgtttttgggtattttgttattgttttttagtttttagggtgttttttttatttagtttttgtttgttgagtagaggaaagtattagttttttagttaggagtattagggagtttgtagtgtatgtggggggggtgtgtggaattagggattaggaaagtggggggtattgggttttaggggttttattttggagggtgttttagtttgggtaatattttggggtatgggtagggaatttaggttagtttgggtttttggttttttgttgtttttgttgttttggttttttatgtttgtagtttttggtagtttggatttttttggttttggttttagttttattgtttttgggaattagtgatgttattagttattttaatttgttgagaatttaaaggtataggtttttattttttagtttggaagaggttgaagtaaggtggttattttttgggaattttttaaattggttgttgaggttggaatagttatggagtggggaggggagagtgtatttatttgtttggtttaggttttaattggtagtaggaaggaggttgtttgtttatttttatttttttgttgtaggtttggttagttttttgttttagggaggggtattaatatatttgttttaaggtaggataggtggtttagaggtttgtattttttttagggttttagagataattgagtttttgttttgattttgtgatttttttggttttttgttagtttagagtttgttttggtttttatttttgttttatttttaggttttggtgttattttttttatttttattgttagttttaggttttattttttttaatttagaattagatatttaggttttagttattgtagtttttttttattttaggttttagtattagtttttttttttttgtagatatttagttgtttttagatgtttttatagttaggtttaatttagtttggtttttgttagtttttttttttttagtatttattgggtgtggtttgggaggggaatttgtttaaggttatttggtgaattgagaaggttttttgtgttttagtgagaaaatttagtgatttaggatgagtataagttttttgagttatttgggggaagggaatttgggtggagaagggtttagtagtggggtaatagattgataagagagttataaataggtttgagaattgttatagttaggatttagtttaggatatggtttttaataggtttatgggagtgtttgttgaatgaataaatgaattagaagagtgaatgggtgatgagggttagattgggttgggatggttgtgggatttgttttttatggtttagagaggagtgattttatttattttaggtagaaagtgtttagagttgtgtgtgtagagttttttgttaattaatatggagtatttgtatgggtttgtgtagttttttatatgaaggtagatgttttattttttttttttgaaggtattttttatttttgtttgattgttagtaggtttagtttgt

SEQ ID NO: 3403 - DNA, 2497 bp, Artificial Sequence
  chemically treated genomic DNA (Homo sapiens)
aatttttatggttaagtgttgagataagagttttggggtttaaggttttttaggtagggtgtggtgagggtttgttggaggaagggtttttttttgtttattttggttgggtgttgtgtgggattgtaggagtttgagttggggtaaaaggaattttaggggagatagttagatttaaggttaattgtttagtttagtttaggattttagttttttgtaataagatgggttaggttttttgttggagtttgtttagtaaggggtttgtgggtttttgggtaagtattagttgggttttatttttagtttggggtttttttttagttttttttttggtgtagtttagttagagtttgtttattttttgggggtttttgttttttttttttttggttttgtattgtgtgagggtgtattttttagaattagttttttagagtttgttgagattaggagatttggaggttattttagggatattttgtttttgtgttttagataggtgttttttttattatgggtgatgaatgttgaggagttgttattataattagtgtggaatgtgttgttttttttagggaggaaaattttattttggaaatatattttagatgtaagttgaattttatttatggggttataaaattatttttttaattatttggtgttgttgggggttggtattattaattttggagatgttatttagagttaagatattatttggggaaaaaaattaggtttgtattttatgaggaatttttttttatgttttgtagaggttttaggagatggatgagattgtttgggtattaggtagggaggggtagggatgtagttatttttatagttatttttatggtttaggagttatgttttattttattagtttttgttagattttttttattagagatggttttattggtataagggaagattgaggttagagaggaatggaggaattggagggttggaatagttggtgggttggatggtttagttttatttgttttgtttgtttttagtagatattgtttttttttttatttttaaagtttttatttggtttagatttttttttgagattagtattatttaatagttttttataaaaaattgtttttttgattattgagggtaataatgaaaatatgtaattgaatttttaagaaattattatttttataatttgtgtttagtttttgagataaattaaatgttttttttgtatggtgagttgtttattgtgtattagagaggggttgatattgttttttattattgatgtgggatttattaagaagaatgttttatattgttttttgggaggtttttggtatttttagtttatggttttgagtgggtagagttggttagttggaggtgttgggtgggtggttaggtgggtttttttttgattatttttggttttgttattggttagttgtgtggtggtgtgggtggtaagtgggagggttagttagaattttagtttagatttttaagaaaattaggtttgtgtgtagttgggtagtgatagttttttgagaagtgtaattttggagttagagtggggaaaaggtagggaagttgggtaggaggaaggaagtggagatggtagagagggaggatttatttatttgttttttatttgttggttaaagttgattttatttaattgtgttagtgtttagaggatttaagatattataaggttaggtagtagagtggttttgggggaggtgaggttttgttgaggtaaggtattgtttggtatagggtttgggagtaggtgggggtagtagggtggttatatttatttaaggagttgttgggttggttagtagaggggtggggaggtggggttagttattgggatgggttgtttatttgtgagtagttggtagtgggttttttgttggtagttgttagtggttggatttttatggttttttggttggttggaggttgtttgggttgtggggaagtagaagtttttagtttgtggattgagttttttgaaaatgtttgtaggttgtatttagtagagttaattttaagtaaaggatttgagtgatattatttatgtgtaaattattgttttttttagtgtggttgtttgtttgagggtttagagttattttttggggaatattgtttagttagaaatttggtagtggtggttgtatagtgaggaggggtgttgttaggggatagaggatttgttttttgggaatgggagaattgaggtttaaagagtggttttttatttgatttaggtaaatttagggttaagggtaataggttgaggttattaggagtttaaaggttggttttgaaggtgagatttttttttgaggaagtaagtggttttaagtagtattttttggtagttggtttagaggattggagtggggtgggttgggaggaatattgtttgggatggggtgggtgtttatatttataattgtgtttttgtttttttttttttttt

SEQ ID NO: 3404 - DNA, 2497 bp, Artificial Sequence
  chemically treated genomic DNA (Homo sapiens)
agggagggagagaaggtaggagtatagttgtgggtgtaggtatttattttgttttgaatgatgttttttttggtttattttattttagttttttgggttggttgttagagggtgttgtttgaggttatttgtttttttagaagaaggttttatttttagagttagtttttgagtttttggtgattttagtttgttgtttttgattttgagtttgtttagattaagtgggaggttattttttgggttttagtttttttgtttttagggagtaggttttttgttttttgatagtatttttttttgttgtgtagttattattgttaggtttttgattaggtagtgttttttagggggtggttttgggtttttaggtaaatagttatgttgggaggggtggtggtttgtatgtgaatagtgttatttgggttttttgtttgaagttggttttgttgagtgtagtttgtagatatttttaggaaatttagtttataggttggaggtttttgtttttttataatttaaatggtttttagttagttagagagttatgagaatttagttattagtaattgttagtaggaaatttattattagttgtttatagatggatagtttattttggtagttggttttatttttttgtttttttgttgattaatttagtagttttttgggtgggtgtggttattttgttgtttttatttgtttttggattttgtgttaggtggtgttttgttttagtggggttttgttttttttagagttgttttgttgtttgattttgtgatattttgggttttttgggtattggtgtaattgggtggggttagttttggttagtaagtggggggtaggtgggtaaattttttttttttgttatttttatttttttttttttatttggtttttttgttttttttttattttggttttagggttgtattttttagaaagttgttgttgtttggttgtgtataggtttgatttttttgggagtttgggttaagattttgattggtttttttatttattatttatattattatgtagttagttagtaatagggttaggagtgattaggagggggtttatttgattatttgtttggtgtttttagttggttaattttgtttgtttagggttatgagttggaggtgttaggagttttttgggaggtagtgtgaggtattttttttagtaagttttgtattgatgataaagggtagtattagtttttttttgatgtgtagtgagtggtttattatataggggaggtgtttaatttattttgggaattgggtgtaagttataaaaatggtaattttttggagatttaattatgtgtttttattgttatttttggtaattaaggaaataattttttataaaaggttgttggatgatattgattttaggagaggatttgggttgggtgggggttttgggaatgaagaggagggtagtgtttgttgggggtaggtagggtaagtggagttgagttgtttagtttattagttgttttagttttttaatttttttatttttttttggttttagtttttttttatgttgatggggttatttttggtagggagggtttggtaggagttgatgaagtgaggtatggtttttgggttgtgagggtggttgtgagggtagttgtgtttttgtttttttttgtttggtgtttgagtagttttgtttattttttgaggtttttgtagggtatagagaggggttttttatggagtgtggatttgatttttttttttaagtgatgttttggttttaaataatatttttaggattaatggtgttagtttttaatagtattaggtgattgaaaaaatggttttatggttttgtgggtgaaatttaatttgtatttgaggtgtatttttaagatgggatttttttttttgggagaggtggtatattttatattaattataatggtagttttttgatatttattatttatagtgggggggatatttgtttggggtataggggtagggtgtttttggggtaatttttaggttttttaattttagtagattttggggggttggttttaggagatgtgtttttatgtagtgtagggttaggggagggggaggtgggagtttttaggaaatgaataaattttagttgggttgtgttagggaggaggttggaaggaggttttaggttgagggtaggatttggttagtgtttgtttagggatttataggttttttgttgagtagattttagtgaggggtttggtttattttgttgtaagaggttggagttttgggttgagttgggtagttgattttggatttgattgttttttttgaaattttttttattttaatttaggtttttgtagttttgtatagtgtttagttaggatgggtaggaggaagttttttttttgatgggtttttattgtattttgtttgaggggttttgagttttagggtttttgttttagtatttggttgtggagatt

SEQ ID NO: 3405 - DNA, 2349 bp, Artificial Sequence
  chemically treated genomic DNA (Homo sapiens)
ttggtttttattttagttttgatataaatgttatgagggtttttagattagttatttttttttttgtgggatttttagagttttaaagttggaaaagagaagttaagttgtagtttttgttgggtaattttaaatgttaggtagtttatttataaatatatggaaaggttttttttaggggaattggagtttgtttttagagtttttaagtttatgttttaaataaaattttaaaattatgaatgtgtgtatgatggaatggtaaataggtagggtgtaattttttttattggtataaggaggtgttgttaggatgttaatttattttgatttaggtgttaagtttttttttaattttgtatataaatgtatagatatttgtattgatagtgtaagaaatttatttatgtttattattatttaaaaaatagtattttttattaagtattttttatatgtttggtattttttatatttaggtttatagttagttttgaaagggaggtattatttttattttataggtgaggaaataagtttagagaggggaagtgatttgtttagtttgtatgtgttgagttgggatttgaatttaggttttttgttttagtatttattttattgggtattttgtgtttataaagtttttttttgggtaatggttttttggtttagttgattttggatttttttttagtttgtttagttttttggatggtatttaatgaggatttttaggtttgaataagattttttttaattgtgattttatttaagtattttatgatgagatttgtgattgtttttattttatagataaggaaattgaggtttattatggttaagttatttttttagggatatatagtttaggagagtaagggttggggttgaagaaattttgtttttttgattggattttttagtttatatattttttatggtttatttagttttgaggagtttttagtagaatttttaattttatattatagtgtgttaggtatggtttattttttttttttttgttggtgttttttattagggattttattttgttttgttgtttgtttttttttggtttttgttggattttttttaagtgtttggtatgttttttattgattttgaagagtggttagtgttttttgtagtttgggtttgggggtgtggatgaaggagttttaggtagttttatgagtatagagagtattgtaggttgtggtgagttttggtttatttttttagttatatgattgtagttttttatgtgtattttagtgggtatggattagggttagtttttgagtatttttggttaggaagtttaggtattttagtgggttgttagggatggttttggttaagtggtaggaggttttgtattagtggagggtaggggagttttttagggttatttttaggaagtttagtattttaaatagttttgtttgaatttttattttgtattggtttagtttagttagataaagtttttgggatgtttgtttttggtggttttattaggtggtagttgagtagtggaatggaagtggagtttagtaggtttggtgtggtgggattaatgaatggagttgtgggaggaggaggaaagaggttggagtatggggtgattttgggtttgtaattgaatttattagttgggtaggatgttgattggttgaggagtgtatttgttagggtttatgtttttattttgtttgtttttttagtattatttagttatttgttgttagttttgtttagattgggattatgggagttaaagttttaagttgtgggatggggattaggttggggtttttatatttttttgaagggaaggaaaagggtttaggagtttggaggagttttttagaatttattttttttatttttattatagtggtggttgttatatttatttttattaggttggtagggggttatgggtttttgttagggttgggtgaaggaagggttggggttttgaagttattattttgggagtttttaaggtttttgggaaagggagtgttatttggggtgtttttttgttaagttttggtttttagaaaggtttttggtatatttaggggatagagttttagggttttttgttttttaggattttaagtatgggtttggttttgtagtaatttttttggtttgataattgggggagatgtagtgggaataggttttgagagttatatagggtagggttgatgttttggatttgaaagaattatggtttttagagtggtagagagtggtttagggtgtatgtttgtggttatttttatttttggttatttggggggatatagtaggtattatgtgtgtttt

SEQ ID NO: 3406 - DNA, 2349 bp, Artificial Sequence
  chemically treated genomic DNA (Homo sapiens)
gaggtatatatgatgtttgttgtgtttttttaggtggttagggatggaggtggttatagatatatattttgggttattttttgttattttagggattatagtttttttaaatttagagtattagttttgttttgtgtggtttttaaggtttgtttttgttgtgttttttttagttattagattaggagggttgttgtaaggttaggtttatgtttggagttttaggaagtggggagttttggggttttgttttttgagtatgttgagagtttttttaagaattaggatttggtaggggagtattttaggtggtatttttttttttagaagttttgggaatttttagggtggtagttttagagttttagttttttttttatttagttttggtagaggtttatggttttttgttagtttgatggaggtggatgtggtagttattgttgtggtaagggtgagaagggtgggttttaagggatttttttaagtttttgaatttttttttttttttttaaggagatgtgaaagttttagtttggtttttattttatagtttagggttttggtttttatagttttaatttaggtagggttggtagtaggtgattggatggtgttgagaaggtaggtagaatgggggtgtgggttttggtaagtgtattttttagttaattagtgttttgtttggttggtggatttggttataagtttaagattattttatattttagtttttttttttttttttttgtagttttatttattggttttgttgtattgggtttgttgggttttgtttttgttttattgtttagttgttgtttggtggggttattaagggtaggtattttaggggttttgtttgattggattgggttagtgtagaatgggggtttaggtagggttgtttgggatgttgggttttttgggggtggttttggggggtttttttgttttttgttggtataggattttttgttatttgattaaggttgtttttggtaatttattggggtatttgagttttttggttaaggatgtttagggattggttttgatttatgtttgttgggatgtgtataggaggttgtagttatgtagttgggaggatgagttggagtttattgtagtttatggtgttttttgtgtttatgagattgtttggggtttttttatttatatttttggatttgagttgtagagagtattggttattttttagagttagtgggaggtatgttgagtgtttgaggagagtttagtaggggttaggaagaagtgagtagtagggtagagtggagtttttggtggagggtattagtgagagaagagaggatggattatgtttggtatattgtggtgtggagttggagattttgttgggaattttttggagttgggtgagttatgaggggtgtgtgggttggggggtttgattggggaagtaaggtttttttagttttagtttttatttttttaggttgtgtgtttttgggggagtgatttgattatggtgaattttaatttttttatttgtaaagtgggggtaattatgaattttattatggggtgtttaaatgaggttatggttggggaaagttttatttaaatttgggagtttttattaaatgttatttgagggattgggtaggttgggggaggatttagggttaattgagttaaaaagttattatttaggaggaggttttgtgggtatggggtgtttagtggaatggatgttgagatgaaaggtttgggtttaaattttaatttagtatatataagttgagtaagttattttttttttttggatttatttttttatttgtaaaatgaaggtgatattttttttttagggttggttgtgaatttggatgtgggaagtgttaggtatgtgggaaatgtttagtaaagagtgttattttttagatggtaataaatatagatgaattttttgtattattagtatagatgtttgtgtgtttgtgtgtagggttgggggagggtttggtatttgagttagagtaggttggtattttggtgatatttttttgtgttagtgagaaaggttgtattttgtttgtttgttattttattatatatatatttataattttggagttttatttggggtgtgggtttgggaattttggaggtagattttaatttttttgaggaagatttttttatgtatttatgggtgggttatttggtatttagagttgtttaatagaggttgtagtttggttttttttttttagttttgaaattttgagagttttatagaagggagagtgattggtttgaggatttttatggtgtttgtgttagggttggggtgagaattag

SEQ ID NO: 3407 - DNA, 2355 bp, Artificial Sequence
  chemically treated genomic DNA (Homo sapiens)
atgtttttttggtaggaagagggtagagatttggtttttattttagttttgatataaatgttatgagggtttttagattagttatttttttttttgtgggatttttagagttttaaagttggaaaagagaagttaagttgtagtttttgttgggtaattttaaatgttaggtagtttatttataaatatatggaaaggttttttttaggggaattggagtttgtttttagagtttttaagtttatgttttaaataaaattttaaaattatgaatgtgtgtatgatggaatggtaaataggtagggtgtaattttttttattggtataaggaggtgttgttaggatgttaatttattttgatttaggtgttaagtttttttttaattttgtatataaatgtatagatatttgtattgatagtgtaagaaatttatttatgtttattattatttaaaaaatagtattttttattaagtattttttatatgtttggtattttttatatttaggtttatagttagttttgaaagggaggtattatttttattttataggtgaggaaataagtttagagaggggaagtgatttgtttagtttgtatgtgttgagttgggatttgaatttaggttttttgttttagtatttattttattgggtattttgtgtttataaagtttttttttgggtaatggttttttggtttagttgattttggatttttttttagtttgtttagttttttggatggtatttaatgaggatttttaggtttgaataagattttttttaattgtgattttatttaagtattttatgatgagatttgtgattgtttttattttatagataaggaaattgaggtttattatggttaagttatttttttagggatatatagtttaggagagtaagggttggggttgaagaaattttgtttttttgattggattttttagtttatatattttttatggtttatttagttttgaggagtttttagtagaatttttaattttatattatagtgtgttaggtatggtttattttttttttttttgttggtgttttttattagggattttattttgttttgttgtttgtttttttttggtttttgttggattttttttaagtgtttggtatgttttttattgattttgaagagtggttagtgttttttgtagtttgggtttgggggtgtggatgaaggagttttaggtagttttatgagtatagagagtattgtaggttgtggtgagttttggtttatttttttagttatatgattgtagttttttatgtgtattttagtgggtatggattagggttagtttttgagtatttttggttaggaagtttaggtattttagtgggttgttagggatggttttggttaagtggtaggaggttttgtattagtggagggtaggggagttttttagggttatttttaggaagtttagtattttaaatagttttgtttgaatttttattttgtattggtttagtttagttagataaagtttttgggatgtttgtttttggtggttttattaggtggtagttgagtagtggaatggaagtggagtttagtaggtttggtgtggtgggattaatgaatggagttgtgggaggaggaggaaagaggttggagtatggggtgattttgggtttgtaattgaatttattagttgggtaggatgttgattggttgaggagtgtatttgttagggtttatgtttttattttgtttgtttttttagtattatttagttatttgttgttagttttgtttagattgggattatgggagttaaagttttaagttgtgggatggggattaggttggggtttttatatttttttgaagggaaggaaaagggtttaggagtttggaggagttttttagaatttattttttttatttttattatagtggtggttgttatatttatttttattaggttggtagggggttatgggtttttgttagggttgggtgaaggaagggttggggttttgaagttattattttgggagtttttaaggtttttgggaaagggagtgttatttggggtgtttttttgttaagttttggtttttagaaaggtttttggtatatttaggggatagagttttagggttttttgttttttaggattttaagtatgggtttggttttgtagtaatttttttggtttgataattgggggagatgtagtgggaataggttttgagagttatatagggtagggttgatgttttggatttgaaagaattatggtttttagagtggtagagagtggtttagggtgtatgtttgtggttatttttatttttggttatttgggggga

SEQ ID NO: 3408 - DNA, 2355 bp, Artificial Sequence
  chemically treated genomic DNA (Homo sapiens)
tttttttaggtggttagggatggaggtggttatagatatatattttgggttattttttgttattttagggattatagtttttttaaatttagagtattagttttgttttgtgtggtttttaaggtttgtttttgttgtgttttttttagttattagattaggagggttgttgtaaggttaggtttatgtttggagttttaggaagtggggagttttggggttttgttttttgagtatgttgagagtttttttaagaattaggatttggtaggggagtattttaggtggtatttttttttttagaagttttgggaatttttagggtggtagttttagagttttagttttttttttatttagttttggtagaggtttatggttttttgttagtttgatggaggtggatgtggtagttattgttgtggtaagggtgagaagggtgggttttaagggatttttttaagtttttgaatttttttttttttttttaaggagatgtgaaagttttagtttggtttttattttatagtttagggttttggtttttatagttttaatttaggtagggttggtagtaggtgattggatggtgttgagaaggtaggtagaatgggggtgtgggttttggtaagtgtattttttagttaattagtgttttgtttggttggtggatttggttataagtttaagattattttatattttagtttttttttttttttttttgtagttttatttattggttttgttgtattgggtttgttgggttttgtttttgttttattgtttagttgttgtttggtggggttattaagggtaggtattttaggggttttgtttgattggattgggttagtgtagaatgggggtttaggtagggttgtttgggatgttgggttttttgggggtggttttggggggtttttttgttttttgttggtataggattttttgttatttgattaaggttgtttttggtaatttattggggtatttgagttttttggttaaggatgtttagggattggttttgatttatgtttgttgggatgtgtataggaggttgtagttatgtagttgggaggatgagttggagtttattgtagtttatggtgttttttgtgtttatgagattgtttggggtttttttatttatatttttggatttgagttgtagagagtattggttattttttagagttagtgggaggtatgttgagtgtttgaggagagtttagtaggggttaggaagaagtgagtagtagggtagagtggagtttttggtggagggtattagtgagagaagagaggatggattatgtttggtatattgtggtgtggagttggagattttgttgggaattttttggagttgggtgagttatgaggggtgtgtgggttggggggtttgattggggaagtaaggtttttttagttttagtttttatttttttaggttgtgtgtttttgggggagtgatttgattatggtgaattttaatttttttatttgtaaagtgggggtaattatgaattttattatggggtgtttaaatgaggttatggttggggaaagttttatttaaatttgggagtttttattaaatgttatttgagggattgggtaggttgggggaggatttagggttaattgagttaaaaagttattatttaggaggaggttttgtgggtatggggtgtttagtggaatggatgttgagatgaaaggtttgggtttaaattttaatttagtatatataagttgagtaagttattttttttttttggatttatttttttatttgtaaaatgaaggtgatattttttttttagggttggttgtgaatttggatgtgggaagtgttaggtatgtgggaaatgtttagtaaagagtgttattttttagatggtaataaatatagatgaattttttgtattattagtatagatgtttgtgtgtttgtgtgtagggttgggggagggtttggtatttgagttagagtaggttggtattttggtgatatttttttgtgttagtgagaaaggttgtattttgtttgtttgttattttattatatatatatttataattttggagttttatttggggtgtgggtttgggaattttggaggtagattttaatttttttgaggaagatttttttatgtatttatgggtgggttatttggtatttagagttgtttaatagaggttgtagtttggttttttttttttagttttgaaattttgagagttttatagaagggagagtgattggtttgaggatttttatggtgtttgtgttagggttggggtgagaattaggtttttgttttttttttattaggggggtat

SEQ ID NO: 3409 - DNA, 2475 bp, Artificial Sequence
  chemically treated genomic DNA (Homo sapiens)
ttaggatattggtttttaaaattatataattatagttttattgttgtatttaagaaaatgaattttttataagtttttatttattttttgaattgttttgtggaagattttataagttttttaatttaggatattataagggtttttgtgttatatttggttttatgtttttttaatttttttaagtttagaattatttatgatgttgagttgtattaagggttagttattttgtagtagaagaattattgttattgttattatttgttttgtgattattatttaaatttgttaatagagtttttgaatttatttaattgggtataagtaggtagtggtatatggttatttttgtggagttttgggatgttgtggggttttttgtatgttgagttatataaatagggagttttatgttagttgtagttgttagtattaatatatgtgtttaatttttttttaaattttaggtttatttttttgtttgaggttttaatggagttattgagttgtatttggttattaaagtttatttaggatttttgttatttttatattaagtatgaggtttttagtttttaattttgaatgtgttgttattttatttagaattatgttttttttttaattattagtgttaggaggataagttattaggataattatgttttatgaggtaaattttgattttggggtttggaaatttagaagttattgattagttaatagtaatttaaataatgtatttataaagttagggaatgtaaatgtggttggggtttttaggagggtattggtggttatgagaatagggtggtatttgttttgagtaggattgggatagtaggtgtggttttagtttgttgggttttgtagtttttatttttgtttttgttttgttttagtagttaggtatggttttgtttttgtggggtttttttttttttagggaagttggttatttaggttttgattttttttaattttgtttttaggtttattattttttatttattttttttagagatatttaagatattaatagtaggattgggatgtgtttatgaaaagaatttaaattttagtttaagttataggtataaagtatagtttaatagatagggaaggggtagggtaagggagtgtgattttggtggtagttggagaaggtattgttggagtatgtttaggaggagtttgttagtgttagggtaatgggataggaagggtaagttaagtttgagtttagggaatgtaaaggaaatagtagttatgttttttttatgttgttttggtatttttaagtagttttgtataaaatttttgtgtatatatatatatgtatgtttattttttttttttttttttttttttttttatttgtttgatagttttttttaggtttggattttatgtttgatttttgttttggtaagtttgtttttttttttagtttgttaggggtatattttgtatgtttatttttatattttaaggtttttaattttaaaaggaggtgggggataatttagaaagttggttaaagtgagatgtaatagagggttttagagatagttattgtttaatgtagggtttgatttgtaggttgtattggttttatgattgtagttttttttgtaattggggtttatttattttttgtatagtatttttatgggttaggtagtattgggtaagagggaggaggggaggttttgaattagggtgattttgtttagttttaaatatttttatatattagaagggtttatttttgaatgttattttttagtgattttttaaggagtggttttggttagtgataatatattgatagttaatttataatttgtagggtatagagatagagatagagattttagtggtaggagggatgtaattattaatgattgtgtgttttttgttttttgagatagagttttgttttgttattaggatggagtgtagtggtgtgattttggtttattgtaatttgattttttggtttaagtaatttttttgttttagttttttgagtaggtgggattataggtataggttattatgtttagttaatttttgtatttttttttttttttttagtagagatggggttttattatattggttaggatggttttgattttttgattttatgatttatttgttttggttttttaaagtgttgggattgttttttaatagttatattgatttttataatattgagtttttaatatgagatatttatgttagaatgtattaaaatttaaaataagaaagtttatagggtaggaaaagttttattttagggaatttttgttaagattgtttttatgagttaaattggtaaagtttttataatttaagtaagaataattttatttttggtagatatgaaattttatgaatataatttggtgattatgttaaaattataggatagggtattttataggggagatttttatggta

SEQ ID NO: 3410 - DNA, 2475 bp, Artificial Sequence
  chemically treated genomic DNA (Homo sapiens)
tgttatgaaaattttttttgtggagtgttttgttttatggttttagtatagttattgagttgtatttatggggttttatgtttattaagaataagattgtttttgtttaaattgtgaaagttttattggtttagtttatagaaatagttttggtaagagttttttgagataaaattttttttgttttgtgaatttttttgttttgaattttaatgtattttaatatgagtgttttatgttagaagtttagtgttgtggaggttagtatagttattaaaaaataattttagtattttgggaagttgaggtgggtgggttatgaggttaggagattgagattattttggttaatatggtgaaattttgtttttattaaaaaaaaaaaaaaaaatataaaaattagttgggtgtggtggtttgtgtttgtaattttatttatttgggaggttgaggtaggagaattgtttgaattaggaagttaagttgtagtgagttgagattgtattattgtattttattttggtgatagagtgagattttgttttaaaaaataaaaaatatatagttattgatggttgtattttttttgttgttgagatttttgtttttgtttttgtgttttgtaggttgtgggttggttattagtatgttattattggttggaattgttttttggaaggttgttgggaggtggtatttaaaggtgagtttttttggtgtgtgggagtgtttgaagttgggtagagttattttgatttggggttttttttttttttttttatttagtgttgtttggtttgtaggggtgttgtgtagggagtgggtgagttttagttgtagggagggttgtggttatggggttagtgtagtttgtagattaggttttgtattgggtggtggttgtttttggaattttttgttgtattttattttggttagttttttagattgttttttgtttttttttgaagttaaagattttggagtataaaaatgagtatgtagagtgtgtttttggtaggttggaggggaggataagtttgttaggataaaggttagatgtagaatttagatttgaaggaaattattaggtagatagagagagagagagagagagagagagagtgagtatgtatgtgtgtgtgtgtgtaaagattttatgtggagttgtttggaaatattaagatgatgtaaaggaaatatggttgttgttttttttatattttttgggtttggatttggtttgttttttttgttttattgttttggtattggtgagttttttttggatatattttagtagtgttttttttagttgttgttagggttatatttttttgttttgttttttttttgtttgttgggttgtattttgtgtttgtggtttgagttaggatttgggttttttttgtaaatatattttagttttgttgttgatgttttaagtatttttaagaaggataaatgaggagtgatgggtttggggatagggttgaaaagggttaaggtttgggtggttggtttttttggagaaaagagggttttatagaggtggggttatgtttggttgttgggatagggtaggagtagaggtgggggttgtagagtttagtagattggggttatatttgttgttttgattttgtttaggatagatgttattttgtttttatgattattagtgtttttttgagagttttagttatatttgtattttttggttttatgagtgtattgtttagattgttattgattaattaatggtttttgggtttttaggttttagagttaaagtttgttttatagagtataattattttggtagtttgtttttttgatattggtggttgaagagaagatatgattttgagtgggatgatagtatatttagagttggggattgggggttttatgtttggtgtgagaatggtaagggttttgggtgggttttaatggttaagtgtagtttagtgattttattggagttttaggtaggagagtgaatttaaaatttagaaaaagattgaatatgtatgttggtgttggtagttgtagttggtatagagttttttatttgtgtggtttaatgtgtaaggggttttatagtattttggagttttatggaggtgattatgtgttattgtttgtttgtgtttagttaaatggatttgggaattttgttagtggatttaaatagtggttataaaataaatagtaataataataataatttttttgttgtaggataattggtttttgatgtagtttagtattatgagtggttttgggtttaaagagattaaagaaatataaaattaaatgtggtataagaatttttatggtgttttaggttgggaggtttataaaattttttataggataatttaagaaatgagtggggatttgtggaagatttatttttttaggtgtagtaataggattgtggttgtgtggttttaggagttagtattttgg

SEQ ID NO: 3411 - DNA, 2223 bp, Artificial Sequence
  chemically treated genomic DNA (Homo sapiens)
aattaggtttaaaaagattgttttaaaagagtgaattttggtaatttattataaaataattgtaatgtagattgtgtatggaaatgattggagatattttaaggttatagtgtttttataaattgagttgaaagggaattgttaggatgattttgtttaattttttttttttatataggaagaattattttaaatttgagaggttaagtgatttggttaaagttatatagttattattagttaatttgtatatattgatttttttgtggggttgggtagatgaggaattttttgtttttttttttgtttgtagagattttttttgaggttattttttgagttttggtaagtatttttgtttttggtagttttgtgttttgatttaattttattttttttattttattttatttttgagatagggttttattttgttatttaagttggagtgtagtggtgtaattttggtttattgtagtttttattttttgggtttaagtgatttttttgttttagttttttaagtagttgggattatagatgtttgttattatgttaggttaatttatggttttttgtatgtgttttttgtgtttttgtagagatagtgtttttttatgttgtttaggttggtttttaatttttgagtttaagtgatttgtttgttttagttttttaaagtgttaggattataggtgtgagttattgtgtttggatttaattttattttttaatttgttttgttttgttttttttaggaggtttttagtttttttggattggttgagaaaagtggtttggttggtttggggttagtggtatttattttttttttaattgtttaattttttttttttattgaattgtttaattttttttttttaattgtttaatttttttatttttataatttttttttgttataattgagggaggtggtgttgaaaaatagttgattttagtaatgttgtttatgtgattattgtagttgtagtttttgttttattttttgttttgggttaggtgggtattattaggggtttttttggtaaggagtattgggtaggtatttggttttgttaatttattattggaatagttggggggatagtagataggtatggttggatagatttgatagattaggtattaggttttttgtgttggttttgggttttttaagtaggaatgtgaatggttttaagatgttttatatggttttattagttttttttttttttttgttttttatttttaggagggttgttttgttttttttttttttgttttttggttttatgttttttgttattatagatttttttttgttttatttttttgtagatttagttgtgtattgtaggtatggaggattaattagtgataggaagttgtgttttttggagtggtgattagttgtggttaggagagttttagtagggttagttttaggagttttttttgatttttgtttattgtttatttatttgttgttgttatgaggtattttggggttttttttttttttttgggggttttgggggtttttattgagatgtgtggtgagtaatttgtttttattttgtgtttttttttttttgggtttttagtggggtggttagggtataggatgagggaatttatttgtttttttaagtttttatagtagtttgggtttagttggattttagtatttaatatattttattgtgattgattatatgtttgattttttattagataagatttttgttaatttagttatttgtttatatatttatttagtgtatattgagttttttttgtgttaggtttagtgttagtttttggggaatgtgtaaagtatgagataagtttaatttttgttattttagagtttatgttttagggaagggggatagataaaagaaatggttaggtgtttttatttgaaattttagtattttggaaggttgaggtgggaggggaggattgtttgagtttaatagtttaaggttagtttgggtaatatagggagattttatttttataaaaaataaaaaaaattaaaaaatagttgggtatggggaagattttttgaagattaagaggatatatgggagttgaaatttgaaggaagaaaaggagttggtaggaaaggagtgggggatatatattttaggtagtaggaagtgagtttttggaggttttgtttgttttagttttgtgttttaaggggttttt

SEQ ID NO: 3412 - DNA, 2223 bp, Artificial Sequence
  chemically treated genomic DNA (Homo sapiens)
agagattttttggggtatagagttggagtaggtaggatttttgaaggtttattttttgttgtttagaatgtgtgttttttattttttttttgttagttttttttttttttttgagttttagtttttatgtgtttttttggtttttagaaagttttttttatgtttagttattttttaattttttttattttttgtagagatggggtttttttatgttgtttaggttgattttgaattgttgagtttaagtgattttttttttttgttttagttttttaaaatgttgagattttaggtgggagtatttaattattttttttgtttgttttttttttttagaatataagttttaggatggtagggattagatttgttttatgttttgtatgttttttaaaggttaatattgggtttgatatagaaaaggtttagtatgtgttgaatgaatgtgtgaatgaatgattgaattaatggagattttgtttggtgaggagttaaatatataattaattataataggatgtgttaaatgttgaggtttagttaagtttaaattgttatgggagtttagaagggtaggtaagtttttttattttatgttttagttattttattaaggatttaggaggaaagaggtataggatagaggtgagttatttattatatattttagtgagggtttttaggatttttagaaggaagaggaaggttttaaggtgttttatggtagtagtaggtgggtgagtagtgagtaagaattgggaaagatttttggggttggttttgttgaggtttttttgattatagttggttattgttttgagagatgtagttttttgttattgattaattttttatgtttgtaatgtatggttaagtttgtagaggggtggggtgggggaaggtttgtggtggtggggaatataaggttaaagaatagaggaaggaagggtagagtagtttttttggaggtagggaataaagggaggaggagggttagtgggattatgtgagatattttgaggttatttatgtttttgtttaaagagtttgggattagtgtagagggtttgatgtttgatttgttaagtttgtttgattgtgtttgtttgttgtttttttagttgttttagtggtggattggtaggattgggtgtttatttggtattttttattaaaggagtttttggtagtgtttatttagtttaggataaggagtggaatgggagttgtagttgtagtggttatgtgagtagtattgttggagttagttgttttttagtattgttttttttagttgtggtgggaggggattgtgggggtgggggagttgggtagttggggagggggagttgggtagtttggtggggggggggagttgggtaattgaggggagggtgggtgttgttggttttagattagttaggttattttttttaattaatttgaaagggttgggagttttttggagaggataaaataaaataagttaaagaatgggattaagtttgggtatggtggtttatatttgtaattttagtattttgaaaggttgaggtgggtagattatttgagtttaggagttggagattagtttgggtaatatggggaaatattgtttttataaaaatataaaaaatatatataaaaaattataaattagtttggtgtggtggtagatgtttgtaattttagttatttggggggttgaggtaggaggattgtttgaatttaagaggtggaggttatagtgagttaagattatattattgtattttagtttgggtgataaagtgagattttgttttaaaaataaaataaaataaaaagaatgagattgaattgagatataaagttattagaagtaggggtatttgttagaatttggaaagtaattttaaaaaaaatttttgtaaatagggaagagaataaaagattttttatttgtttagttttataggagaattaatgtatatgagttaattagtggtggttgtgtgattttggttaggttatttaattttttgagtttaaaatagttttttttgtgtgagaagagagggttaggtaagattattttaatagtttttttttagtttaatttgtgaagatattatgattttaaaatatttttaattatttttatgtataatttgtattgtaattattttatggtaaattgttaaggtttatttttttaagataatttttttgagtttgatt

SEQ ID NO: 3413 - DNA, 2448 bp, Artificial Sequence
  chemically treated genomic DNA (Homo sapiens)
ggtgtttatagggtatttaagtagatataggttgaggaggtagaatatatgtgaatttggagttaagaagagaggtaagggttggaaatagggatttaagatttttggatagttgtgagtgtgtataatgagggttagatgtagagaaaattaggagattatagagagtagaatttagggtggggatttgggagttagtagttgggtatgggtttggtagaaagggaagttaaggaggaggagagggggtagttttagatattaaggaggggagagtgattagaaagaaaatttttttgtagagatataggggatggggaagaattgtagattgaattggggtaaaggattgttggttttaattagagagatttgagggagagatgaggttgagagttaggggattttgttatgttttagtataaaaatagtatttgatatagatgggtgtttgggagttgttgttggatgaatgagtggatagatgtatggatggatggatggatggaaggatgatagattgatggataaatagatgaatagatgaatagttggatggataattggatggatgggtagatagaatgattttagagattagaaaaagttttatgtattaagtgggattgaattgtgtttttatgggtagaaagtagaggaatttttatttgagttaggaatgatttagtgtttttaatttagggagaaagttagtttggttttattggggatatttgtgtgggggatttagaggttttttaaatgaggttagatgaggttggataggtttaagttaatttagtatttttttgttatattgtataggaggggatgtgttatttagggagttgttgggatttatgggttttagtgttgttattagtattgatagttttagagaggaaagatatatattggggtaattttaaggttgtgtgtggtatttgttttggatagtagataggtatagggatatttttagggggttggttatttttttgttttatgtttaggttttagttttgtttattgtaattttgtgtttgttatgtttagtaggtttttgttttagtttagtttttagagagtagattttaggtgttggttttgggggttttggtttgagttttagttattgtgttatgtttttggaattgggattaaggttattgttttaggtaagtggtttttaattttttttagtttgttttattttttgttgtttttggaaaatttgttttttttttttggggtttttttttttttgtttttttagttttaagtattgatttttatttttttttatggggtttggaggaggtgtattagtttttgggtaattggtaggaagggtttttatagtgggagtagttggatgtagtttggttttggggtttgagttgggattgggtagggttagggtttttttttttttttagggtagatgtttgagtgagggatagaggttggttttgatgaggggttttgtagtgtttttagggatattgtttagtgatttttggggttaaggatagaggttgttggggtgggtttgggagttgttgagttttatagtttaggggagtagttttaagaatagttgagggtttaggttgaggattggatgttaatttagtttgggagggttatatggtttggtgatatagaggttattttaaggggagattaatggagggtatagagagggttttgggtttaggttgtagttttgtggtttgtgttgggttatgaggatatggggatatagagggatgggtgagattgggtgaggtgttagaatttaatttttttaggatagttattagaaaggagatagttttttagggtagagatgtgtttgtttttggagttttgttatttttggggtttagtgtttttttgtttatggattggttttttgttttttttaaagggtatgttagatttaggaaatgattagaggggagtgaatgaggggtgtagagaattttatggttattaggtgaagtttggggttattataggttgttggggtgggtttgggggttgttgagttttatagtttgtgggagtagttttaggaatagttgaggtgaagggttttgtggttgggtttgtggagataggaaatattttagagttttagaggagttttgaggtttgtttaggtggagtttattttttgttaggagagttaagtgggttgggttggggtagagtttggtgtttgtgagggataggaagttttagtttaaagtaggtttgggtttttttatatattgtttgttaggatagttttataggatgagtaggggatttatagtttatggaggaggttttaggttttggaagaataaagtgggtgatggaggggggtatagggatggaaatgagggatttaggggttaaggttagattttaaatttagattttagagattagagaaga

SEQ ID NO: 3414 - DNA, 2448 bp, Artificial Sequence
  chemically treated genomic DNA (Homo sapiens)
ttttttttgatttttggagtttgagtttagaatttggttttgatttttggattttttatttttatttttatatttttttttattatttattttatttttttaggatttagagttttttttgtgaattgtgggttttttgtttattttgtaggattgttttggtaggtagtgtgtggggagatttaagtttgttttgaattggagttttttattttttataggtattgggttttgttttagtttagtttatttggtttttttggtaaggagtgggttttatttagataagttttagggtttttttgaggttttgagatgttttttgtttttataagtttgattatagaattttttattttagttgtttttggggttgtttttatagattatgagatttagtagtttttaggtttattttagtagtttgtgatgattttaaattttatttggtagttatggagttttttgtattttttatttatttttttttggttattttttgagtttaatatgttttttgaggaaggtaggaggttgatttgtgaatagagagatattgggttttagaggtgatggggttttagggatagatatatttttgttttaagagattgttttttttttggtgattgttttgggagggttggattttggtattttatttagttttatttgtttttttgtgtttttatgtttttatgatttagtataggttatagagttgtagtttagatttagagttttttttgtgttttttattggtttttttttggggtgatttttgtgttattaggttgtgtggtttttttaggttggattggtatttagtttttagtttagatttttagttgtttttggggttgtttttttagattatgagatttagtagtttttaggtttattttagtagtttttgtttttgattttaggagttattgggtaatgtttttaaggatattgtagggttttttattagaattagtttttgttttttatttagatatttgttttggaagagaggaggagttttgattttgtttaattttagtttaggttttgggattaggttgtatttggttgtttttattgtggaggttttttttgttggttatttggagattaatgtattttttttaggttttatggagaaaggtaagggttagtgtttaaggttgggaggatagaggggaggaagttttagagagagaaaatagattttttagggatagtagagggtgagataggttgggaaaggttgagagttatttatttaggatggtgattttggttttagttttgaagatataatatagtgattgaggtttagattaaaatttttggggttagtatttggggtttgttttttgggggttgggttggagtaggagtttgttgggtatgatgggtatagggttgtagtgggtggggttgggatttagatatgaggtaggggggtggttagttttttagaggtgtttttgtgtttgtttgttgtttaaggtaagtgttatatatagttttggagttattttagtgtgtgttttttttttttgaggttgttggtgttgatgataatattgggatttataggttttagtaattttttgagtgatatatttttttttgtgtagtgtggtagaggagtgttgagttggtttggatttgtttaattttgtttggttttatttaaagggtttttgagttttttatataagtgtttttagtgaagttaggttggttttttttttggattgagagtattgggttatttttgatttaagtggagatttttttgttttttatttatggagatgtggtttagttttatttagtgtatgaagttttttttgatttttgagattattttgtttatttatttatttagttgtttatttagttatttatttgtttatttgtttgtttattaatttattatttttttatttatttgtttatttatgtatttgtttatttatttatttgataatagtttttaagtatttatttgtgttaggtattgtttttatgttgggatatggtaggattttttggtttttagttttattttttttttaaatttttttggttaaggttaatagttttttgttttagtttagtttgtagtttttttttattttttatgtttttgtaagaaggttttttttttagttatttttttttttttggtgtttgagattgttttttttttttttttttggtttttttttttattaggtttatgtttaattgttgatttttagatttttattttgggttttgttttttgtagttttttaattttttttgtatttgatttttattgtgtatatttataattgtttaggggttttagatttttatttttagtttttatttttttttttggttttagatttatatatattttgtttttttaatttatgtttgtttggatgttttgtagatatt

SEQ ID NO: 3415 - DNA, 2383 bp, Artificial Sequence
  chemically treated genomic DNA (Homo sapiens)
agagagttgggtatatgggtaggtgtttattaaggaagaaagtagagtgttgaggttgtttttttaagttataggtaagaagaaattgttgagttagttttagtatttattaatagttattgattttttgggaaggtttgagggagatgaataagtagtagttgtgattttattaagtttaatttaaaattttggtggaggaaggtatggaaattagtgttgttggttttaggagaatgttggagttgaatatttttgtatttagatgtgggttttatttaggagtaagaaagtttgtgtaattagatttaatgataaagaggttttatattttttttagttttggggtattgggttgtagttgatagttttaattagatattttgtagtttttaaggttagtattttagagaagggatgtagggattttttttagagtagaaggtttttagggattttagtatatgtgttttaagtagatatttttttagttttgaggggtagggttgtggataagtagttggaagtttatttggttagttttgatttagaagatgatttttgggtgatttttggtgaaggttggtattagtggttgtagagatgagggggttttttttatattttaagagttaatttaattagatggttggttattaggtagagatggggttgtttaaggagatttatagtatattttataagatatatatttggttttggttttgtgtttttttgtttgtttttttagttatttattgtttgttgtttattattaggtttttagagtaggtttagttggtgttaagggtttagttgttggggatgttgagatagagtgagggttaagttttttttggtttttagaaggttttggttaggatgtataggtggttgtaggtgttagttttggaggtggttgtaggtagtgggggtgtaggtggtagatttttggtatgaatttaaattattttagttttttagttagttagaaaatagttttaattttattttgttggtttagaagtaggatgaggggagagataaagttaaatttttgattagttttttttgttttggttaggaagttagagtgtgagagtgtgtggggtttggtatttggttttatttggttatttgtgttgaataggatgttttgaaggatgataaggttgttttggattttgatgttatgtttgttttaaatttttgatggggagaaatgtggggtgttatgtggtatttttaggttattggtttttattttgggatttaggtgagaagttagggttttggggttttttgtgattttttggtttttgtttatggagggtagttgtttgattaaaataggattttttttttttaaggtatatttttaagttgttttttatttgtttaagatattttttattttaaatggaatgtagttaagaagtaatgtatggttattatgtatgtggttgttttttttttttgggtttgggtattttgggggtgttttaggaagaggtttttatattatggaggtgagtgaggggttttggttggtttgagggggttgggatggtgaggatggttagattgggtggttgttgggttttggggtttggtgggtttttttttggtggtttgatttgtttgtttttgagtaatgatttggtgggtagtagagttttatttgtaattagtttgtatagtgtagttttataggaatttgtttaggtaaaggttttaattattaagatatttttattttaagtagagtttaatattttaagtttattttgtgtttatgttttagaaaaaaaattttttagtaagaatgtaataaataagattgagagttttattaggagtttgtgagttttatattattagatgtgttgtagttttttgtgatgattgttttttttttgagttttgtatatggtgtgggttatatggaaaaggtattgtagttttttgtgatgtttttttttttttggagttttgtatatggtgtgggttatatggaaaaggtattgtagttttttatgatgattgttttttttttgagtattgtatatggtatgggttatatggaaaaggtattgagtgtggtttataggagaggtggggatggaattaggattttaatgtataggttgggggatgtattttggttattttttgtggtgggatggtttttttaattggagattttagtagggtttatgttggtggttttgtttgtttttggtatggattattttttatttgtggatgatatttttattttaggtttgtttgtaggatttaggtttttttttaggtgtttttttggtatttagggattttttagtagtatatggagttggggttgtatggaggtgtgtggggg

SEQ ID NO: 3416 - DNA, 2383 bp, Artificial Sequence
  chemically treated genomic DNA (Homo sapiens)
tttttatatatttttatgtaattttagttttatgtgttgttggaaagtttttgagtattaggggggtatttggggaggggtttgagttttgtagatagatttgggatgggggtgttatttataggtgaggagtggtttgtgttagggataggtagagttgttagtatgggttttgttgggatttttgattgggaaaattattttgttatgggaggtggttaaggtgtgttttttagtttatgtattggggttttggttttatttttgttttttttgtgggttgtatttagtgttttttttatgtaatttgtgttgtgtgtggtgtttagaggaggagtgattgttatggggagttgtagtgttttttttatgtaatttgtgttgtgtgtggggttttgaggaggagaggatgttatggggagttgtggtgttttttttatgtaatttgtgttgtgtgtggggtttggaggaggagtggttattatggggagttgtagtgtgtttggtgatgtggggtttataggtttttaatgaggtttttagttttgtttattgtgtttttgttggaagattttttttttgaaatgtaggtatagaatgaatttgaaatattgagttttgtttgaaataaaaatgttttgataattagaatttttgtttgaatagatttttgtggggttgtgttgtgtaggttggttatgggtggggttttgttgtttattgagttattgtttaaaggtaaatgggttaagttattgaggagggatttattgggttttgagatttggtagttgtttaatttggttatttttgttattttagtttttttgggttggttagagttttttgtttatttttatggtgtgggggtttttttttggggtatttttagggtgtttaggtttaggagagaggagtagttatgtgtatggtggttgtatattgttttttgattgtgttttatttaaagtaaaaagtattttgaataagtgagaaatggtttggaaatgtgttttgggagagaaaggttttgttttagttaaatgattgttttttatgggtaaaggttaagaggttataggggattttgagattttggttttttatttgaattttagagtgggaattggtgatttggaggtgttgtgtggtgttttgtgtttttttttgttaaggatttgaaataagtgtggtattaggatttgaggtagttttgttgttttttagggtattttgtttagtatggatggttgagtggggttggatgttgagttttgtatatttttatattttggttttttgattagggtagggggagttggttaagggtttggttttgtttttttttttgttttatttttgggttagtaggatgggattggaattgttttttggttggttgaagggttgaaatgatttaaatttatattgaggatttgttgtttgtatttttattgtttgtggttatttttaagattgatgtttgtggttatttgtatattttggttagggttttttgagaattagagggaatttgatttttgttttattttagtatttttgatagttgggtttttagtgttagttgagtttgttttggaggtttggtggtgggtagtgggtagtgggtggttagaggggtagataggagggtatagggttagggttgagtgtgtgttttatgggatgtgttgtggatttttttgggtagttttgtttttgtttggtggttgattatttggttgaattgatttttggggtgtgagaagggtttttttgtttttgtagttattgatgttggtttttattaggggttatttaggggttattttttggattaaggttggttgggtgggtttttagttgtttgtttatggttttgttttttgggattagggagatgtttgtttggagtatatgtgttgagatttttgaagattttttgttttgaagaagatttttatattttttttttggggtgttggttttgggaattgtgaggtgtttggttggagttgttggttgtagtttggtgttttgggattgagggaggtgtggagtttttttgttattaggtttaattatataggtttttttatttttaggtaaagtttgtatttgaatgtagagatatttaattttagtatttttttgggattagtagtattggtttttatgtttttttttattaggattttaaattaagtttgatggaattgtagttgttgtttatttattttttttgggtttttttgggaaattggtggttgttaatgaatgttgaagttgatttagtaatttttttttatttgtggtttaaaaaaatagttttaatattttgtttttttttttgataagtgtttgtttatatgtttgatttttt

SEQ ID NO: 3417 - DNA, 2293 bp, Artificial Sequence
  chemically treated genomic DNA (Homo sapiens)
ttttttgtattattttatggtgttattaaaagttgaattatgggttggtttaattttgtagagaagagattatttaatttatttgtggaaatttattttttagtgatattgatgttttttaagaaatttaattttgggtttgagtgatggttggtgtaaaaaataaatttaagattttagtgttttttagaagtttggatttttagggattttgttgtgagttataggatgttattggtttttttttttttgtgggttgagtgtgggggttatgtggatttttttatgagtagatgttattagggttattggttttagtttttttttttatagttgtagtgggggttggggttggggtattttagggagggtttttgtatgagtttgtgttatagtgtgtggtatttggtggagggattaagttgattgttttaggtgagtttttttttttttttttttttttgtttttgggataatttttgttgtttttgtttgtttttgtattttgttttaatttgtggttagtttttttttttgtattttaggtttgagtaaggatttttgttttttttgtttagatttttgtttgttttagtaggttattataattattttatttttgattataggggtaggggattagatagaatgatttattgagttttgtttgtttgtttgtttgtttgtttttttgtttgtttttttgtttttttgtttgtttttttgattgtttgataggtgtaggttgggtttttaagttttgttttgttttggtttttttagtttgggtttttgttggaatagttttgtttttgggttatttgggttttattttttggggaattgggaataaggggtttgagggaggtattttttgggagattttagaaggatttagtgtttttggggttgatgtttgggaattatagagttgggatttagagttaggatttagatttagaatgaggtaggaggtggaggggttgttttgggtgtttgggggttgttagggattgagttttgagttagtttgagatttaggaaattttgttaggagggagaagggagaagtagattttggatattagaaagttaggggaagggttataaaaggagtggatgtgatggaagggtgggtttttgggtttttttagaatatattttttgtgtttagggggattagaggggtagagtttattgtgtgaaagttttattgttatgattaggtagttgggatgtggggtggatgttagaaaagattttatggaataagagagagtttaggatagtaggtaggttttttgatttttttaggtttttgttttatatatgggttttagaatatatatttggttggaatagtttgagggattaaaaggttttagtattttatagagttgaggagttaggttagaaaagtaattttagagtttgttgtgtaggggagatatagagttttttttatttgttaggatggtaggaggggatagggttagggtgttgagggttagatgttggtgttgggggttaaggttttgagagattttaggataggtggttaggtgtttaaggtaaaatagttttttgtgtagattagggtatagtggaaaatattttgatttttttgtttggtatagatttttagatatagagtttttgaataagggtattttaatattttattatatattgaggttaggggttttttaggtggatattaggattttgattttttgttttttatttattttgtaggttagtttaaggttgtttttttggttattttgtttttgtttttttttgaggagttttaagttaataaggttatattggtgtgttttataagtgatttttatttgggagttgtgatagtggtttggaaggtagatagtagttttgttaaggtgggagtggagattattatattttttaaataaagtaataataagtatgtggttagtagttatttgagtttgatgtttgagtagtggaagttttatagaagttatagttgttaggttatgtatgaagggagtattgtggagaagatagtggtttttatagaatgtttataggtttttaatttttattttttattatgggagattagagttgtaggattttaggggaggggtttttttttttattttaaggtattaagtttttttttttgtatttaataaatttttaataaatatttttattgttaattagaaattttgttttattttattttttttttttttatatataatttttagttttttttgggtttttaatttgtggtggaaag

SEQ ID NO: 3418 - DNA, 2293 bp, Artificial Sequence
  chemically treated genomic DNA (Homo sapiens)
ttttttattataaattgagaatttaggaaaggttaggaattatatgtgagaaaagaaaaaatgagataaaataagatttttgattgataatgagaatatttattgagggtttattgagtgtagggagaagggtttgatgttttggggtgggaggagagattttttttttgggattttgtagttttagttttttgtggtggggggtgagggttgagaatttatgaatattttgtaggggttattgttttttttatggtgttttttttatgtgtgatttggtagttgtagtttttgtgggatttttattgtttaggtgttaggtttagatagttgttggttgtgtatttgttgttgttttgtttggagggtgtggtggtttttatttttgttttgatggggttgttatttgttttttaggttattgttatggtttttgggtagaagttatttatgagatatattagtgtggttttgttggtttgaagttttttagaggagggtgggaatagagtgattgagggggtagttttgggttgatttgtggggtggatgaggggtagggggttagagttttggtgtttatttggggagtttttgattttagtatatgatgaggtgttggggtgtttttgtttaggggttttgtgtttgaaggtttatgttaggtagaggggttagggtgttttttattatgttttgatttgtatggggagttgttttattttagatatttgattatttgttttgagattttttggggttttggtttttaatattgatatttgatttttagtgttttgattttgtttttttttgttattttgatagataaagagagttttgtgttttttttgtatagtgaattttggggttatttttttggtttggttttttagttttgtgggatattggggttttttggttttttaggttgttttagttaaatgtgtgttttggagtttgtgtatggggtaagggtttggggggattggagagtttgtttgttgttttgggtttttttttattttgtggagttttttttggtatttattttatgttttggttatttggttatagtagtggggtttttatgtagtggattttgtttttttgatttttttgggtataggggatatgttttgaagagatttaggagtttgtttttttgttatatttattttttttgtgattttttttttggttttttggtgtttagagtttgtttttttttttttttttttgatggggttttttgagttttaggttggtttagggtttagtttttggtagtttttagatgtttagggtagtttttttattttttattttattttgggtttggattttggttttgggttttagttttgtgatttttgagtattagttttgagggtattgggtttttttaaagttttttaggaggtgttttttttagattttttgtttttaattttttaggagatggaatttaggtaatttaaggataaagttgttttgataagaatttagattgaggaggttagaatagaataaggtttagagatttagtttgtgtttgttagatagttagagagataaatagagagatagagagataaatagagagatagatagatagatagatagatgaggtttagtaggttattttatttagttttttgtttttgtggttagaggtgaagtggttgtagtgatttgttgaggtaagtaagggtttgaatagggagggtagaggtttttgtttaggtttgggatgtagggagaaaggttgattataagttgagataagatatagaaataaataaaaatagtagaaattgttttaagagtggggaaggagaggggagaagagatttatttaggatggttagtttggtttttttgttgaatattatatattgtgatataggtttatataaaaattttttttgggatgttttagttttagtttttattgtagttgtgaaggaggaagttggggttagtggttttggtggtatttgtttatgagggagtttatatggtttttatatttaatttataaagagaaggggattggtgatgttttgtgatttatagtaggatttttggaaatttaggtttttggaggatattgggattttgaatttgttttttgtattaattattatttaggtttaggattgaattttttagggagtattagtattgttaaggagtgaatttttatagatgggttaggtggttttttttttgtaaagttgaattaatttatggtttaatttttggtaatattatggggtggtgtagaggg

SEQ ID NO: 3419 - DNA, 2388 bp, Artificial Sequence
  chemically treated genomic DNA (Homo sapiens)
gtttttattgtttgatgttgtagatattgtagtttttgatgtagggtttggttttatggggtttagtgggtgttttttttgtgtgtggagatgagaaattgtaaaaagtaaagatataagataaagagataaagtgaaaatagttgggtttgggggattattattattaagatatggagatgggtagtggttttaaatggttgtgtgtattgttatttattgtatataagataaggggggtagggtaaggagggtgagttgtttaagtgattgataaggttgagtaagttatgtgattataggatagggggttttttttttataggtagttgaagtagagagggaaggtagtatatgttagtgtttttttttatgtatttattagaaagattaaagattttaagatttttattattttttttattgttattttttgagaattttaaagagggattaggagtataggaggaaagtggataaggagtgtgattattgaagtatagtattatagggaggggtttaggtttttggatggttgtaggtaggtttggatattatttagttttttataagaagttggtggagttgagtgttttttgatttttttaagaaaagggagatttttttttgtggtttgttaagtaatgatgtttttttaggtattggtgttattgtttgattaaggagttttttagtagtttttatgtgggtgtgatagagggtttattttttgtatttttggttattttttataatagttttttagtatttgattttatatttattggttattttttggttatattagtaatataataaagagtaatattaaaagttaatgattaataatatttatattaatgattgataatgtttatgattatttttgtatttaatttgtattataattatttttattgtaagtatattttttattatattgaaatagtttgtgtttttagttttttgttttagtatttaggtaattttttgtttatatttttgaggggttgaattgttttttattttttggaagttgggaggttggaagaggggatgtgtgtgatggatttagtatatagttgggaatttgaggtatatttaagtttttgtttgtgttgtgtggagtttatatttttttttttattggggttttaaaatttttttttatttaatagggtggtgttgtttaaagttttgggtatatattagggttggggagggggtggtggagagggggttttagtttgtttaattattaggtaatggggtatttgttttttttttagttgggtttggatttgtgttttaggtttaggttgtaatgttttttttttttttttttttttttttttgtagttttgttgggttttgtttaggatagataaagatagagtagtttgtttttattggaggtttttttgttagtaggaggggtttggagaaaattagaaagagggttagagttagagaaatatgaagtattttggggttttttatattagtgtttgagtaggaatggggaggggttatgatttataaggttttgggaggttattttaaagagggttgtttaattgtaaggatgttgtaagtaggaagagaagttatagtgttttagaaaagagtgggatagggataagtatatttaagaggttgaatatgaatttatagattaggtatttttgtatgttttgtttgttaggttttttttgttattttttgttaggtggttttgttgggttttagttttggtttttttttgttttagttttatttttgggtttttttttttttggtttttttgttgtttttatttttagttaagttttttgttttgttgtgtggttttatgattgttgtttttgaatgggttattttttttatttgttttagtttagtttgtttgttgagatttttttttgaaaattatgtttgggttggtgttttttgttttgggagggtgttttttttgtgtgttttttattatttttgggagttttggaattgggagaattgaattaaaggatgatttgagtaattaggtattttgtttttagtgttttggtgtaatttttgtaagatttattttgttttaatataaagttttaggagagggtgtgggggagggaatggtttttgtattagaaaataagttattttttttaaagatgtttttattgtgagtagagtaggatgtatatgattttagatataggttttttttttgtgagtattgtttattttttagaatgatatttgtaatatggagtgtaggaaaaaatatgatgattaggagaaatgtttttattttaggttaggtatggtggtttatgtttgtaattttagtattttgggaggttgaggtgggtgggttatttgtggtta

SEQ ID NO: 3420 - DNA, 2388 bp, Artificial Sequence
  chemically treated genomic DNA (Homo sapiens)
tgattataagtgatttgtttgttttagttttttaaagtgttaggattataggtataagttattgtgtttggtttaaaataagagtattttttttgattattatatttttttttatattttatgttgtaggtgttattttgaaaggtgaatggtgtttatagaggaggagtttgtgtttggggttgtgtgtattttattttgtttatagtggaggtatttttggaagaagtgatttattttttggtatagagattatttttttttttatatttttttttaagattttgtattgaaataaagtaaattttatagaaattgtattaaagtgttgagaataaaatgtttgattgtttaaattattttttggtttaatttttttagttttagagtttttaggaatagtgggaagtatatagaggaagtatttttttagggtgggaagtattagtttgggtatgatttttgggggagagttttagtaggtggattgggttggggtaagtggggaaggtggtttatttagaagtagtagttgtgggattatatagtagggtaaggagtttggttgggagtgggggtagtgggggaattaggggggagggagtttagaggtggggttggggtagggggaggttagggttgaggtttagtaggattgtttggtaggaagtggtaggaggggtttggtggataaagtgtgtagaggtatttgatttgtggatttatgtttagttttttagatatgtttgtttttgttttatttttttttgaagtgttgtggtttttttttttgtttatagtgtttttgtagttgagtagttttttttaaagtgattttttagggttttgtgaattatggtttttttttatttttgtttaggtattggtgtgggaggttttggggtgttttatgtttttttggttttggttttttttttggttttttttgggttttttttattggtagaggaatttttgataaagataggttgttttgtttttatttgttttgggtaggatttaatggaattgtaaaaagaagagaaagagaaagagaaaggtattgtagtttgagtttgggatgtgggtttagatttagttgagagaggggtaggtgttttgttgtttggtggttgggtaggttggagttttttttttattattttttttttagttttaatgtgtgtttagagttttgagtagtattattttgttgagtgaggggaggttttgagattttagtggggaaggaagtgtggattttgtatagtataagtgaaggtttaggtgtgttttgagtttttagttgtgtgttgagtttattgtatgtatttttttttttaattttttagtttttagaaggtggggggtagtttagttttttagagatgtgggtggaggattatttaggtgttgaggtaagagattgaaggtataaattgttttagtataataaagaatatatttataataagaatagttataatataaattagatatagagatgattatggatattattaattattagtgtagatattattaattattagtttttaatattattttttattgtattattaatataattaagaaataattggtgggtatagggttaggtgttgaagggttgttgtgagaagtgattgagaatgtaagaggtgagttttttgttatatttgtataagggttattggagggttttttggttaggtggtaatgttagtgtttaggaaggtattgttatttagtggattatgaaagggagtttttttttttttggaggagttagggaatgtttagttttattagttttttgtgggaggttggatagtatttaggtttgtttgtagttatttggaggtttaaatttttttttgtgatgttgtgttttaatggttatgttttttgtttattttttttttgtatttttggtttttttttgaagtttttagaagatagtggtagaagaaatagtgaaagttttaaagtttttgatttttttgataggtgtatagaagaaaatgttgatgtatattgttttttttttttgttttggttatttataagggaagggttttttgttttatgattatgtgatttgtttgattttattaattatttggatgatttattttttttattttgttttttttgttttgtatgtaataaataatagtgtatgtaattatttggggttattatttatttttgtgttttgatggtagtggttttttgggtttagttgtttttgttttatttttttgttttgtgtttttattttttatgattttttatttttatatatggggagaatatttattaagttttatagggttagattttatattagggattgtgatgtttgtgatattaagtggtggaagt

SEQ ID NO: 3421 - DNA, 2267 bp, Artificial Sequence
  chemically treated genomic DNA (Homo sapiens)
ttttatttgttttttttaattatatttatttttttttttatttttgtttttttttatttttttttttttttttttttttttttttttttttttttttatttttgtttttatttttatggttttgttttttgatttttatggtattgttatttttgtttttttttttttgtttttttttttttttttttttttttttagtttttagttgggttgtgggtttttttttatttggggatttgttattttttgttggaggataggtaggtgggtaggtgttatgggtgattagagtttgattttttattttatagtttggtagatattaggttttatagtttgtggtataaaggggaagttggtttagtaggtttgggtagggagtgggggattggggttttgattttgtttggattattgtagatagtagtatttttttttgtgagattagtatatatagtagaaattttggttatagtagttttattttttaattttattttgattttttttttaataattttagttagggatgggtttttaaaagggtttttgttggttgttaatatggggtagggaaaaggggagattttgggaggtaggagattagagtttgaattttgatttagttattgtgtgttgtgtggtttttggtaggtttttatttttaggggggtttttgtgtttgtaattataaggtgggtatgtgtttttgttggatgttatatagaaaagaaggtgataatgagtatagaagtgttttgtaaaggtagatgtgggtttgatatggatagttttttttatggagtgtttattgtgtgttgaatttgtgttattttggttagtttttgggataatttgttttatttggtatttttattatgtttattttatagaagaggaaagtgaaggtatagagaggttagagttagtttaggttagttagttttgggtttgtgtgttttttttttttgttgtttagttttgattttggtttgaggttttttggtttgattttttttttgtaggttggggtgggaatgggagagttgtattgtgtttagttgggttggatattggagatttgggttttttttttttttttatattgggttttatttttttttgatttattgatagtgattttttttgttattttagttttttgtttttatttaggttatgttatttgatttggaggatagtgttggtggttagaaatatgattgtttgttttagagttttttgttttggtaagttttagatgtttattatattttgtttattattggttttagtatttagttgggtttggttaggtagagtttggtatattatgggtttttagttaataattggtgatttaatggtggttttaatggattggaatagaaggtagggtatggaggagatagggaaattaaggtaaggagagagaagtaaggaggtagatagaagtaatagataaagagagaggtggagatagagatatagagaggtataggggatatggatagtgaaggagtgagagatggagagatagaggttaagttggggtgattaagttttaggatggaggaatagatgttagaaattatagggtttaatttttttattttataaatggagaaattgaggtttaggtggaataaatgattttaatatagttatatggtgggaatttatagtatagttggggttagaaggagtttggggagttgtttagttaggttatttgtagttggttttttagttttaggtagggtatattgtgggggtatttggataggtttttgtttttttttttttggggttttaggttttttgtggagtttagttttgttttgaattttttttggtttggagttagttttgtttttgtttttttattatttagtatttttttgttttttagtttttttttggttttttattttgggttaagatttggtgggtggggtgtgggtaggaattgtaagatggggtagttattggaattggggttaagatgtttgtggtgagggtttatttattagtttaggttttaaagttaggttatttggggtagttttgtgttttttttaaagttttaggaatgggttgtttgttagagggtgggggtagagaagggggatggtttattatgttggtggttttattttgagtatttattattattattgtattttttattatattttttttttttttgttttgttttatggagttaatttattttttttttttttttttttttttttttttttttt

SEQ ID NO: 3422 - DNA, 2267 bp, Artificial Sequence
  chemically treated genomic DNA (Homo sapiens)
aaaaaaaaaaaagaaaagaaaaaaagaaaagaaaataaattggttttataagatagggtaaaaaagaaaaagatataatgaaggatataataataataataaatgtttagagtggagttattaatatggtgggttattttttttttttgtttttattttttggtagatagtttatttttggggttttagggggggtatggaattgttttagatgatttggttttgaagtttagattggtgggtgggtttttattataggtgttttggttttagttttagtggttattttattttgtagtttttgtttatattttatttattaagttttggtttaggatgaaaggttaaggagaggttaggaagtgagggggtgttgggtggtggagggatagaggtaaagttggttttaggttagggagagtttaagatagagttgggttttatggggagtttagaattttgaaaaagaagagataggagtttatttagatgtttttgtaatatattttgtttgggattggggagttgattgtaggtgatttagttgagtagttttttaggttttttttgattttagttgtattgtgagtttttgttatgtgattatgttgaagttatttgttttatttgggttttggtttttttatttgtgaaatgggaggattgggttttgtgatttttggtgtttgtttttttgttttgaggtttgattattttaatttgatttttgtttttttgttttttgtttttttattgtttatgttttttgtgtttttttgtgtttttgtttttatttttttttttgtttgttatttttatttgtttttttatttttttttttttgttttggtttttttattttttttgtattttattttttgttttgatttattggaattattattgagttattagttattgattgagaatttatgatgtgttaagttttatttagttaggtttagttaggtgttggggttagtggtgaataagatgtggtgggtatttggggtttgttagggtaggaggttttgggataggtagttatatttttggttattagtattgttttttaggttagataatgtggtttgggtagaggtggggaattggggtggtgagagggattattgttgataggttaggaaaggatggggtttaatgtggggaaaagaaaaagatttaggtttttgatatttaatttagttgagtatagtgtgatttttttatttttattttaatttataaagaggaagttaggttagggggttttaggttaaggttaaggttggatagtaggagaagaaagtatataggtttagagttggttggtttgggttggttttgatttttttgtgtttttattttttttttttgtgaaatgggtataatgaaagtattaaataaggtagattgttttggggattgattgagataatatgggtttggtatatagtaagtattttgtaaaaaaggttgtttatattaaatttatatttgtttttataaaatgtttttgtgtttattgttatttttttttttatatggtatttaatagggatatgtgtttattttataattgtagatatagaggtttttttaggggtagagatttattaaaagttatatagtgtgtagtggttgagttaggatttaaattttggttttttgttttttagggtttttttttttttttgttttatgttggtagttagtagggatttttttgggggtttatttttggttggggttgttgagaaaggagttagggtagggttggaaggtgaagttgttgtggttagggtttttgttgtgtgtgttggttttataaaggaaagtgttgttgtttgtagtgatttaggtgaggttagggttttagttttttattttttgtttaggtttgttgagttagttttttttttgtgttatagattatagggtttgatgtttgttagattataaaatggggggttggattttagttatttatagtatttgtttgtttgtttgttttttagtaggaagtagtaagtttttaggtaagagggaatttatagtttagttgagagttgaaggggaggggaagagaaaagggagatagagagagggaggtagagatagtagtgttatgagagttagagagtagggttatggagataaagatggaagtggagagaggaagaaagggagggagagggagaggggagagagtgagaaaagatagaaatagagagagaagtaaatataattaaaaaggatagatagag

SEQ ID NO: 3423 - DNA, 2408 bp, Artificial Sequence
  chemically treated genomic DNA (Homo sapiens)
attataggtgtttgtgttatttttggttaatttttgtgtttttagtagagatggggttttattatgttggttagtttggttttgaatttttgattttaggtgatttatttattttggttttttaaagtgttgagattataggtgtgagttattgtgtttagtttaaagttatgtgtttgatagagttgtattttatttttttaaaaggaaattggtgtggttattttataggttatgagtaggatttaggtgttttttaggttatatggatggtaagaaagaagtagggttggattttattttagatgatttggtttttagttatgttgtttttttatgtttgttatatttattttatatataagtatgtatgtatgagggattttttaggttttttatatgttaatttagagggtagggttttgggataagaggtatatagtaaattgtataagttttggatatttggtaagtgtgttatagtttgtaaagtatgtttgtaattaatagtttttttatgttgtttatagtgttatttggatttatttttaggttttgtggatttagtaggttttggtttagttttttttttttgttttatttttttttaggttttttgagttttaggttaattgggttattagtttttttttgtatatgtgttttaagtttttatttttgaatttttttttagaatgtttttttttttattttattttgtatatattttttttattttttagagtttagtttaaatgttttttttaatggtaagtttatttggattgttttaattggaagagaaaggggaaagagagaaggaaaggaataggtattttttgaatgtttattttgtattaggtatgttatgtaattttataataattttgtgatatggtttgtttttgttttattttataggtagaaattgaggggaaatgatttgttggagtttatatagttaggaaggatgtttttggattttttatttagtgtttatttttttgttttagttaggaattttgtggggttgatgagggttaatattttatttttttttttttttgtggttgatttttgggggtggtgatttggttttttttttttttgttaaagttagagttgttgatggtttgttattggttttttagttagggttggtttttgtttttgtggtttagttgttgagttggggttttgttttttaggggttttttttttttttttgtttataagagtttgattttggttggttttagatttgatatgttttttgggtttattttggtaagttttaggtttggaggaggggtgggattagagttttgagtgagtattttgggaggtgaggaatttaggtttttagttttagggatgttattgtgttattttgaatgttatttttattttaattaaggatgagttttaattattaagattagtatttgttttttttatttaaaaataaattatttttgtagttttattgtttaaatttttattattagagttatttttttgagttaggtgttgtttttggaagggtttttttatgttgagtattttagtatttgttggggtgatgtatttatttattagtagttataaaaatttttttataataagtagataagagaatatagagtggggtttagagttaatgagatttagtaagggtgagttttgagatggggataggatggaagatggtattggtgatagatggaaaggataggagagggataggttaaagttatgtattgtttttagtttagttatttttggattttttatgtggattttgattaggtttaagttagttatttgtataaagaggagagtagagggttagggtggaagattataatgttttttttttttgtaggaaggggttataatgattttgtaatgtataaagttagtgggattttggaaggtaggaagaggtatggggagggggtgtttagggggtatggggagggtttaggtttttatgaattttaggaggggggtattataaatgtttattttatagaggtgtaattaaggtttagagttgagaagggatttgtatgttatatatagggaggttgaatgtgaatttgggttttttggtttttaaagttgatttgttatattttttggtagaggttgtagtttttgggtatgatttttttgattatttttgtgtgtgtttgtttgttttataaagtttttggatttattattagtttttaaaagtttggaagaattatataaaagtttagatttagtgattgttttgagaaattggaaggtttggtttgtatttttatttggtaattattggtggtattgggaagaggttatttatttatttggtatttgtgttgtttagtgttttatatttattattgtttttgtttttt

SEQ ID NO: 3424 - DNA, 2408 bp, Artificial Sequence
  chemically treated genomic DNA (Homo sapiens)
ggaaggtaagagtagtgataaatgtgagatattagatagtataggtgttaggtaaatgggtggtttttttttagtgttattaatggttgttaagtgggaatgtaggttagattttttaattttttaagataattattagatttggatttttatgtggtttttttaggtttttaaaggttgatgataaatttaaaagttttataaaataaataaatatatatagagatggttaaagaaattatgtttaaagattgtaatttttgttaaagagtgtaataggttaattttgggaattagaagatttaaatttatatttaatttttttgtatgtgatatataagtttttttttaattttgagttttgattgtatttttgtgaaataggtatttataatgttttttttttaggatttatggggatttgaattttttttatattttttgaatattttttttttatgtttttttttattttttagggttttgttgattttgtgtattgtagggttattgtggtttttttttgtagaagagaagaatattataattttttattttgattttttgtttttttttttatgtagatggttggtttggatttggttaggatttatatagggagtttaggagtgattgggttaggggtaatgtatggttttggtttgttttttttttgttttttttatttgttattaatgttattttttattttatttttattttaaaatttatttttgttgggttttattgattttgagttttattttgtatttttttatttgtttgttatgggaaaatttttgtggttgttggtgggtgggtgtattattttagtgagtgttgaaatgtttagtataagagagtttttttaaagatagtatttagtttaaagaggtagttttgatggtggaaatttaggtaatagggttataggaataatttgtttttaaatgagggaagtaggtgttggttttgatggttggggtttatttttggttaggatgaggatggtatttaggatgatatagtgatatttttaggattggggatttgggttttttgttttttagaatgtttatttagaattttgattttattttttttttaaatttgggatttattgagataggtttagggaatatgttagatttgagattagttgaggttgggtttttataggtagggagggaagaggggtttttgggagataaagttttgatttagtaattgggttatagaaataaaagttagttttggttgaagagttaatggtaagttgttagtagttttggttttagtagggagggaaaggattagattattatttttagggattagttatgaagaaggagagaggtggaatattggtttttattagttttataaggtttttgattagagtaggagaatgagtattagatgaggagtttagaagtattttttttagttatgtgagttttagtgagttatttttttttaatttttgtttataaaatggggtagaaataaattatattatagagttgttgtgaggttatataatatgtttggtatagagtaaatatttaggaaatgtttatttttttttttttttttttttttttttttttttagttgaagtaatttagataggtttgttgttagaggaggtatttgaattagattttgaaggatgaggaagatatgtatagagtgagatggaaggagaggtattttaagaaaaagtttagaggtgggaatttggggtatatgtataagaaagagttggtagtttaattggtttggagtttaggggatttgaagggaagtgaggtaggagaagagggttaggttagggtttgttgggtttataaagtttgaagatgaatttggatggtattgtgggtagtatagaggagttgttagttgtaaatatgttttgtaaattgtggtatatttgttaaatatttaggatttgtataatttgttgtgtgttttttgttttgaaattttgttttttgaattggtgtatgagggatttaagaggttttttatatatatatatttgtgtgtaaaatgggtgtaataagtataggaaaatagtatgattggaaattagattatttgagatgaaatttagttttgttttttttttattatttgtgtgatttggaggatatttgagttttgtttatgatttgtaaagtggttatattagtttttttttaagagggtgaaatgtagttttattaaatgtatgattttaggttgggtgtaatggtttatgtttgtaattttagtattttgggaggttgaggtgggtggattatttgaggttaggagtttaagattaggttggttaatatggtgaaattttgtttttattaaaaatataaaaattagttgggagtagtgtgggtgtttgtaat

SEQ ID NO: 3425 - DNA, 2432 bp, Artificial Sequence
  chemically treated genomic DNA (Homo sapiens)
ttggtttagtatttgagtgtttatttataggatatttatttgtagaggtgttttgagtgttattgtgggttaagggatttttttttttttggagatagtttttgagaagttgaaggttttgggggttttttattaaatgtttttgggaggtgggaaaatattaaatgtgggtgtggtttttttggaatagttttgtgtggggatttaggagttaagttttttagtatatgtttttaatatttttagtaggggttatttttttggagttatgggtggttgttaatattttgtggtttttagtaggtattatttaggtaagagagagaataggttggggaataatgggttggtttggttgtaagtgttggggtagattatagattggatggtttaagtttatgttttggggttatttttgattttttgtaagtgtggtaagggttttttttggatattttgagaagttgtagttgggagaggattatttgtttgtttggatgtttagtttaggtgttagggtttaaatgattagttttaggttgtagtttttattatttgttttggttgtaggggtttttagaagttattaagggtttggtttggttttgtttatttgtatttgagttttagtttttttatttgtttaagaagggaggtgaatattgattaaattatgtaaatttttagtggtaggattaggtgtggttgggatagttaaggttttttagggtggtggtatttttggagtttggggatgggttttgttttttttttgggttttttgttgggtttgggtattttttttttttttttttttttttttttttagaggggatttttgtagagttgtttttgttttagggtttagtttgtgtttgatttaaatagtttttgtttttttttgaggatgagttgggtgtattttttttttgtaggaagatgagggttagagatggaggtttatgttagggttatagagtttggaattttttttggagttaaaatagttttgttttatttattttgtgtattttattttttgttttagttttgttgggtttgttttgtatgtaaggtggggttgggatttagggtttgagttttgttttttggatatttggtttattgtttgttaaaggttttgtggttggaggttttggtttttttatttttttatagggttttagggttgatttaggtttgtgggttaggaatgtgttaatggggtaatttgggttttgttggtttatgtaggtatttgtggattttgagaggggattgggtggggaggggtggggaggggtggggtggggtggtgttgtagagtgtagggtgggtggggttaggttagtagggagtgagtttgtttggttgttttgttttggagttattgtattgttggttgtagatataggttgtattatgaagttagtttttttgttttgggttttgttgttgttggtgatagtttttggtttgggttttggatttatagtaggtatgtttttttgtttttttgtgtttttgtttgtttgtttatttgtttgtagttaggtttgggttgatatttttttgggtttagtttttgtttatttgttaggttatttgtggttgtgttaggggtgatgggaagaaattttgagggtttatgtggaggggtagtttatggggatgggaggtttgagttgggtttattttaaatttgttggtagttaggagggaggtgggggagattagtagaggtttttgtttgtgtttttagttttgatagggtgggattatggagggggagttaggattgtgggtttttattagggtggggttgaatttaggaaagtttagggaaagttttgaattttagaattaggatattggttttaggttgttttttgttttttattttattttttattgatttttttgttatttattttatttgtaagtattttttggtttttttttttgatttttgtgtgttattaaatttttggttagtatatatttattgttgtttttaagtgttaggtattgtatttggtgaagtggggttagtggggtggtttaggtttaggtttggtttttgattggttttttttgatgggggatggggaagggttagggaagtgtaattttagtttgggtgtatgtatttgttttagtttttttttgtaattttttttttatgttagtttttggaaatatggttttgtttattggttttatggtttataggagaagttttgggtttggtgtttatagttttttgtggtgtgtatttttatttttttttttttattgttgggatttttgtttgaaatgttttttttttttttagaaaggaggggagtggttttggttttttgttttgagtatggagttttttttggggttttaattgtagtttttgggagagtgagaagtgttatgtttag

SEQ ID NO: 3426 - DNA, 2432 bp, Artificial Sequence
  chemically treated genomic DNA (Homo sapiens)
ttgaatgtgatattttttgtttttttaggggttgtaattgagattttaaagagagttttgtgtttagggtagaaggttagggttgttttttttttttttggggagaggagggatattttaagtaggggttttagtagtggggaaagggaagtgggggtgtatattataaggggttgtgggtgttgggtttaaaattttttttatgggttataagattggtgggtaaggttatatttttaggggttggtatgaaggaagggttgtagggagggattggggtaggtgtatgtatttaggttggaattgtatttttttggtttttttttattttttattaaaagaggttagttgagggttaggtttgggtttgagttattttgttggttttattttattaagtgtagtgtttggtatttaaaagtaataataaatatgtattggttaaggatttggtggtgtataggggttgggggaggaggttgagagatgtttgtaagtgagataagtggtaagagggttgatgggaaatggggtgggggatggggggtagtttgggattagtgttttggttttggagtttggggttttttttagatttttttggatttagttttattttgatgaggatttataattttggttttttttttgtgattttgttttgttagggttggggatataggtggaggtttttgttggttttttttgttttttttttagttattagtaggtttagggtgggtttggtttagattttttatttttatgggttgtttttttatatggatttttagaatttttttttattatttttagtatagttatagatggtttgatagatggatagaggttgagtttagagggatgttagtttaggtttggttgtagatagatggatagatagatggggatatagaagggtagggaggtatatttgttgtgggtttggggtttgggttgagggttgttgttagtagtagtagggtttagggtaggagggttggttttatggtgtagtttgtgtttgtagttagtagtgtagtggttttgaggtgaggtggttagataagtttattttttgttggtttggttttgtttgttttgtattttgtggtattgttttgttttgtttttttttgtttttttttatttagtttttttttaaagtttataggtgtttgtgtggattagtaaggtttaagttgttttgttagtatatttttggtttgtaggtttggattggttttgggattttgtgggagggtgaggaggttggagtttttagttataggatttttggtaggtgatgagttggatgtttagagggtgaagtttagattttgggttttagttttgttttgtatgtagggtgagtttggtggggttgaagtagaggatgggatgtgtagggtgaataaggtagggttgttttagttttagggaggattttagattttgtggttttgatatagatttttatttttagtttttatttttttgtaggaaggaggtgtatttaatttatttttagggggaggtaggagttgtttgggttagatataggttgagttttggggtggaggtagttttgtaggggttttttttggagggaggaaggaggaaggggagagaaggtatttaagtttagtggggggtttggaagggagatagggtttatttttgggttttagagatgttattattttggggagttttggttgttttagttatatttaattttgttgttaagagtttgtataatttaattagtatttatttttttttttgagtagatgaggaaattgaagtttagatgtggataggtaaggttgagttaggtttttggtggtttttgggagtttttgtagttagggtgggtggtaagggttgtggtttgggattggttatttggattttgatatttgggttggatatttagataggtgggtggtttttttttagttgtagttttttaaggtgtttaaaagggatttttgttatatttgtagggagttagaggtggttttagggtatgagtttaggttatttggtttgtgatttgttttagtgtttgtggttaggttagtttattgttttttggtttgtttttttttttgtttgggtggtgtttgttgggaattatagggtgttggtagttatttgtggttttagagaggtggtttttattgaaagtgttagaggtgtgtgttgggggatttggtttttgagtttttatatagagttgttttagggaagttatatttgtatttgatgtttttttattttttaaagatatttggtgagaggtttttaagatttttagttttttagggattgtttttagaggggagaaagttttttaatttataatggtgtttagggtatttttgtaggtgagtgttttgtaagtggatgtttaggtgttgagttag

SEQ ID NO: 3427 - DNA, 2359 bp, Artificial Sequence
  chemically treated genomic DNA (Homo sapiens)
aggatggatattttggatttttttttgtatttagtgttgtagggagtaattttagttttgggtttgggatgaatgtttttgttagtttggggttaggagataggttttttttggtttagtatttgagtgtttatttataggatatttatttgtagaggtgttttgagtgttattgtgggttaagggatttttttttttttggagatagtttttgagaagttgaaggttttgggggttttttattaaatgtttttgggaggtgggaaaatattaaatgtgggtgtggtttttttggaatagttttgtgtggggatttaggagttaagttttttagtatatgtttttaatatttttagtaggggttatttttttggagttatgggtggttgttaatattttgtggtttttagtaggtattatttaggtaagagagagaataggttggggaataatgggttggtttggttgtaagtgttggggtagattatagattggatggtttaagtttatgttttggggttatttttgattttttgtaagtgtggtaagggttttttttggatattttgagaagttgtagttgggagaggattatttgtttgtttggatgtttagtttaggtgttagggtttaaatgattagttttaggttgtagtttttattatttgttttggttgtaggggtttttagaagttattaagggtttggtttggttttgtttatttgtatttgagttttagtttttttatttgtttaagaagggaggtgaatattgattaaattatgtaaatttttagtggtaggattaggtgtggttgggatagttaaggttttttagggtggtggtatttttggagtttggggatgggttttgttttttttttgggttttttgttgggtttgggtattttttttttttttttttttttttttttttagaggggatttttgtagagttgtttttgttttagggtttagtttgtgtttgatttaaatagtttttgtttttttttgaggatgagttgggtgtattttttttttgtaggaagatgagggttagagatggaggtttatgttagggttatagagtttggaattttttttggagttaaaatagttttgttttatttattttgtgtattttattttttgttttagttttgttgggtttgttttgtatgtaaggtggggttgggatttagggtttgagttttgttttttggatatttggtttattgtttgttaaaggttttgtggttggaggttttggtttttttatttttttatagggttttagggttgatttaggtttgtgggttaggaatgtgttaatggggtaatttgggttttgttggtttatgtaggtatttgtggattttgagaggggattgggtggggaggggtggggaggggtggggtggggtggtgttgtagagtgtagggtgggtggggttaggttagtagggagtgagtttgtttggttgttttgttttggagttattgtattgttggttgtagatataggttgtattatgaagttagtttttttgttttgggttttgttgttgttggtgatagtttttggtttgggttttggatttatagtaggtatgtttttttgtttttttgtgtttttgtttgtttgtttatttgtttgtagttaggtttgggttgatatttttttgggtttagtttttgtttatttgttaggttatttgtggttgtgttaggggtgatgggaagaaattttgagggtttatgtggaggggtagtttatggggatgggaggtttgagttgggtttattttaaatttgttggtagttaggagggaggtgggggagattagtagaggtttttgtttgtgtttttagttttgatagggtgggattatggagggggagttaggattgtgggtttttattagggtggggttgaatttaggaaagtttagggaaagttttgaattttagaattaggatattggttttaggttgttttttgttttttattttattttttattgatttttttgttatttattttatttgtaagtattttttggtttttttttttgatttttgtgtgttattaaatttttggttagtatatatttattgttgtttttaagtgttaggtattgtatttggtgaagtggggttagtggggtggtttaggtttaggtttggtttttgattggttttttttgatgggggatggggaagggttagggaagtgtaattttagtttgggtgtatgtatttgttttagtttttttttgtaattttttttttatgttagtttttggaaatatggttttgtttattggttttatggtttataggagaagttttgggtttg

SEQ ID NO: 3428 - DNA, 2359 bp, Artificial Sequence
  chemically treated genomic DNA (Homo sapiens)
tgggtttaaaattttttttatgggttataagattggtgggtaaggttatatttttaggggttggtatgaaggaagggttgtagggagggattggggtaggtgtatgtatttaggttggaattgtatttttttggtttttttttattttttattaaaagaggttagttgagggttaggtttgggtttgagttattttgttggttttattttattaagtgtagtgtttggtatttaaaagtaataataaatatgtattggttaaggatttggtggtgtataggggttgggggaggaggttgagagatgtttgtaagtgagataagtggtaagagggttgatgggaaatggggtgggggatggggggtagtttgggattagtgttttggttttggagtttggggttttttttagatttttttggatttagttttattttgatgaggatttataattttggttttttttttgtgattttgttttgttagggttggggatataggtggaggtttttgttggttttttttgttttttttttagttattagtaggtttagggtgggtttggtttagattttttatttttatgggttgtttttttatatggatttttagaatttttttttattatttttagtatagttatagatggtttgatagatggatagaggttgagtttagagggatgttagtttaggtttggttgtagatagatggatagatagatggggatatagaagggtagggaggtatatttgttgtgggtttggggtttgggttgagggttgttgttagtagtagtagggtttagggtaggagggttggttttatggtgtagtttgtgtttgtagttagtagtgtagtggttttgaggtgaggtggttagataagtttattttttgttggtttggttttgtttgttttgtattttgtggtattgttttgttttgtttttttttgtttttttttatttagtttttttttaaagtttataggtgtttgtgtggattagtaaggtttaagttgttttgttagtatatttttggtttgtaggtttggattggttttgggattttgtgggagggtgaggaggttggagtttttagttataggatttttggtaggtgatgagttggatgtttagagggtgaagtttagattttgggttttagttttgttttgtatgtagggtgagtttggtggggttgaagtagaggatgggatgtgtagggtgaataaggtagggttgttttagttttagggaggattttagattttgtggttttgatatagatttttatttttagtttttatttttttgtaggaaggaggtgtatttaatttatttttagggggaggtaggagttgtttgggttagatataggttgagttttggggtggaggtagttttgtaggggttttttttggagggaggaaggaggaaggggagagaaggtatttaagtttagtggggggtttggaagggagatagggtttatttttgggttttagagatgttattattttggggagttttggttgttttagttatatttaattttgttgttaagagtttgtataatttaattagtatttatttttttttttgagtagatgaggaaattgaagtttagatgtggataggtaaggttgagttaggtttttggtggtttttgggagtttttgtagttagggtgggtggtaagggttgtggtttgggattggttatttggattttgatatttgggttggatatttagataggtgggtggtttttttttagttgtagttttttaaggtgtttaaaagggatttttgttatatttgtagggagttagaggtggttttagggtatgagtttaggttatttggtttgtgatttgttttagtgtttgtggttaggttagtttattgttttttggtttgtttttttttttgtttgggtggtgtttgttgggaattatagggtgttggtagttatttgtggttttagagaggtggtttttattgaaagtgttagaggtgtgtgttgggggatttggtttttgagtttttatatagagttgttttagggaagttatatttgtatttgatgtttttttattttttaaagatatttggtgagaggtttttaagatttttagttttttagggattgtttttagaggggagaaagttttttaatttataatggtgtttagggtatttttgtaggtgagtgttttgtaagtggatgtttaggtgttgagttagggagagtttgttttttggttttaggttggtgagggtatttattttaggtttagggttgaagttgttttttatagtattgggtgtaggggagggtttgaggtgtttgtttt

SEQ ID NO: 3429 - DNA, 2436 bp, Artificial Sequence
  chemically treated genomic DNA (Homo sapiens)
tattgggtgggtattattaaaggattatttttaaataaaggtaaaattatgatttttgtgtaattatagaatgaatatttattagagattttatttaaagtattaattaatgatagaataaggaaaatggtataattggtttaaaggagaatttaagtattatatatagatatgtaggtaaatataaatgttggtatttatttataagtagatatgaaattggttaataatttgaggataataattaattgtattttattggatataatttatttgtatttttatggtattaagtatttgtattattattggttttttttttaagttttgagagttaggaaatagtttaaagatgatgaaaggtatagatattttggagagttatgttagatagaatatttagtaatttttatagattttttggtttatattaatattttttataattttttttgatagtatagtgtagttattattattttagagaagaagtgaggggttatgttgtgttttttggatttttgttttttaatttgtaaaatgggtatgataagagtttttgataatttagagatatgaggttttgttgggataagtattgtgggaaatgtgaagtgttaagggatagtgttttaaattttagtgtggtttttttttttgatttagtttatatttttgttttattttggaagatttatttttttttttttatattaattttgatttgataatatttttgaaattagagaatgaggtgttgattttgtatgttttttttttttaatatatatgaatatagataaaaagttattgagataagaaaggtaagtttatttttgtattaattaatttagtgttttgtgggaagtataggattaggaagaaattaaatgatagtttataaatatatatatatatatatatatatatatatatatattttattaattattattattattattgttgttattattaatgtattttgtaaatttatatataatttgtaaatttttttttgaaataagagagagagggtaattgaaattatttaaggtagtatttggaatatgtaggttaaagattgagttagggagggattgttattatatgggttgtggggaggtagagtttttttgtgtttttgagagtatttttttttggggttttattagtttttaatttgttttttgaatttttatttttttttttgttttgtgtttttggaaatttagatagtggttttatttttgtgatttatttagtaggaatgtgggagtttttgaattgttttagttaaagttttttaatttttttttggtgatgaatgggtgaggtttttaaatgaaatgtggaggtttttagttttagtttgtggttttttttttttttggtgtaattatttttgtgtagaatatgttaagtgttttgttttttgggaatttgttttgtatgtaaatatttggtgattaagtgaggtttatttaattaagtattttgtaatgatttttaaattaaagaatagtggattaggagtttagtttgtgttggtgatgggaaaggtagttttatattataaggaggtagatagtgatttggtgtggggaggtggttgggttaagtggggtagagtaggtgttttgggaattttgttagaattatttatttatttatttaattaatttatttttggagtattttttggagttagagtagttggtgaataataataataataataatagggttaggtattgtgttaataagtttgttgaataataagagtgaggaggagttagagatagttattgagagttgattttattaggtatgaattgttagtagtagtgatggtaataataagtatttttattgtagtagtaaatttttgaataggattttgttgtggttttgtgtgttttgaaattgttgggtttttgttatggatttggtttttggaaatagtttttatttttgttgttgttttattgatttattggttttttatttattagtggtttattttttatatttgtgtaatgggtagttggatttagattttttttaagatgtttttgggttttaggagtttagggtgttttttttgtttttgggggttataggaatggtggtgttattttgggggttttagttgtaatattgtagaaggttttagagtttagttttatatagttttaggatagagtaagggtgatttttagtttagatttttataaattgtgggatttttattaggtagtttgttttttttgatggataagttttttattttttaattgaaataatttttttatttgtttttagggtttttgtaagggaattatatagatttatggatatagatgttttttgaaaattatttatttggtggtagaagttattatgttttaaatttggatttatgaatatatttta

SEQ ID NO: 3430 - DNA, 2436 bp, Artificial Sequence
  chemically treated genomic DNA (Homo sapiens)
tggggtgtgtttgtgggtttaagtttgagatatgatggtttttgttattaggtagatggtttttaaagggtatttatgtttatgagtttgtgtgatttttttataggagttttggaagtagatggaagggttattttaattgagaggtgaaggatttgtttgttagagaggataagttatttggtgaaggttttataatttatgaaggtttgagttgagagttatttttgttttgttttggagttgtgtagggttgggttttgaagttttttgtaatattgtagttgaggtttttaaagtggtgttattatttttgtggtttttagaagtagaggagatattttaggtttttaagatttaaaagtattttagagaagatttagatttaattatttattatatagatgtgggaagtgagttattggtgggtgagaagttagtgagttagtaagatagtaataaagatgggggttgtttttaaaggttaagtttatggtagaaatttagtagttttagggtatgtagggttatagtaaaattttatttaaggatttgttgttgtaatgaaaatgtttattattgttgttattattattagtagtttatgtttagtagagttagtttttaataattatttttggtttttttttatttttgttatttagtagatttattagtatagtgtttggttttattattattattattattgtttattagttattttggttttaagaagtgttttaaaaataaattgattgaatgaatgaatgagtgattttagtagagtttttagagtgtttattttgttttgtttggtttggttgtttttttatattagattattgtttgtttttttgtgatatgaagttgttttttttattattagtatgaattggatttttaatttattgttttttggtttaagagttattataaagtgtttaattaagtaagttttgtttaattattaaatgtttgtatgtgaaataagtttttgggaagtagggtatttgatatgttttgtatagaaataattatgttgaggagggggagggttgtgggttgggattgggagtttttatattttatttgagggttttatttatttattattgaaggggaattaaaaggttttagttggagtaatttgagaatttttatatttttgttggatgaattatgggagtggggttgttgtttgggtttttaaaggtgtagagtaaggggagaggtgggaatttgagaggtgagttgggggttggtggggttttggggaggggtgtttttggggatataggggagttttgtttttttatagtttatgtgataataatttttttttggtttagtttttggtttgtgtgttttaagtgttgttttagatagttttaattgtttttttttttttattttaggaggaggtttgtaaattgtatatgaatttgtagaatatattggtggtggtggtggtggtggtggtggtggttagtggagtgtgtgtgtgtgtgtgtgtgtgtgtgtgtgtgtgtttgtaggttattatttaatttttttttaattttgtattttttatagagtattggattagttggtataagaatgaatttattttttttattttaatggttttttgtttatatttatatgtattagaaaaaaaaaatatatagaattagtattttattttttgattttaagggtattattaaattaaagttggtataaaggaaaaaaaataaattttttaaggtagaataaggatgtgaattaaattaggaaggagggttatattgaggtttgggatattgttttttagtattttatgttttttatggtatttgttttagtaggattttatgtttttggattgttaaaggtttttattatgtttattttgtagattaagaaatagaggtttaggaaatataatatagttttttattttttttttgggatggtggtggttgtattgtattgttagaaaaaattataaaagatgttgatatgggttaaaaaatttataaagattgttgaatgttttgtttagtataattttttaggatatttatgttttttattatttttgagttattttttaatttttgaagtttaagaaaaaaattaatagtaatataaatgtttggtgttatagaaatgtaaatgaattgtgtttagtggaatgtaattgattattatttttaagttattgattgattttgtatttatttgtaaatgaatgttagtatttgtgtttgtttgtatgtttatgtgtggtgtttaaatttttttttgaattagttgtgttattttttttgttttgttattaattaatgttttaaataaaatttttgatgggtgtttattttgtaattgtatgagagttgtgattttgtttttatttaaaaatgattttttaatggtatttatttaata

SEQ ID NO: 3431 - DNA, 2391 bp, Artificial Sequence
  chemically treated genomic DNA (Homo sapiens)
ttatttttggtatttttagggttgtttatgttgtatttttgttttgtttgtttttattatgagtagttgtattgttgagggttatttgggggaataagttggttggtggttaggtattttttatttgagaatatggtggtttaaaatttaattatgatgtttatgtttttatgtagttgtttttttttttgagtaggaaattttgggggatagttttaaataattataagaggataatggttgagtgtttggagttagggattagaggttagttatataaagtagtgagaaggtgatgtagataattttttaatgataaaaggttagtttaaagttagttattagtaaggatgatttggtttatttttatgggaaggtgtggtggtttgggagtttttttatgttttttttttttattgtttatagtagtttttatagttttttattgaagttgtatttgtggtagattagggtaaggaagttgtatttatataatagtatagtttatgggtgtagagttttaggtagtgggtgtttgtaattttttgtgtaataagtttttatattaatagggaaattaaatggatgtatttaattttttaaattagttgaattgagggaaaatttgtttatattttgttgggaggttagttttaagtatatgggatatatgtatagggttgaaaggtatttaaatttatagggttagggatattgaaggaggaggttggtgagtataattgggtaattgtgtatttttgtgagtgattttttgggggtttggggtgatggagtatttggaggggttgggttgtttttggatgttgtatagtatattttgggggagtatttgaagtagttaaaggtagtggagtagatttttttgtgaagtatattgtggatggttgtatttggaattatattggtatgtaggagggatagttttagggttagtagtttgtgagggagttttggatttggttagagtaggagtttggtttggggttaagtttattttatggatttttttttttgtttttttaggagtagtttattgaaatgtgttttttgtttatagaagtattgtgatatatagatgttttatgatatattgtatatattaggggttttgtgttttttaggaagagggtttttatttgaagtggggtttgatggttgttatgtgttggtttatgttttttttggttttgttgatgtttagggatatggagtgttgtagtaggttggagaagatttttatttggttagagttgtagtatttggtgattttaaattgttgtattaggaattgagtgaaaagaggaagatgttgtggtggtggggttgagttgggttaattttggggttggtagagatagttgaggaggggttttgggttgattggttgagtttgttgaaggttttgggtttggttatttttattttaggaatagttttggttttttaggtggagtattttatagtttttgtgggggaataggtatgtatgttgatttagatgtagtggggggttattttggggggatagggtttgggttgatttgtttttgaggtagttagggggtttgttttttttattttagtagaaaataggttaaatttttgttttattgttatgtgttagtttttgttattttttgtatgaattataggtatagaaggaatgttagtttttttgtgaaatataaaaaggggttattgttaagttttttttaattaaaaaaaggaatatgtgtttattgaataagatttagaaattaagaaaagtatgaagaaaaaattgaagattgtttatagttttatattttagggttatttgtgttagtgtttggtgtattttttttagttttttgaggttgtattttgtttaatttggtttattgtgtggatattgtaggtgtgaggtggtagtatttgggatgtatttgatgttttgataggtattgggtaggtgatttttttttataattttgataattttttgtggttgtgagtgggaagatttttttgtgggttgttgagttggtaagggtagaagagggttttggatttagggtttggttttttttttttattttatatagattttatttgatatttttattttgttaattagattaggaaggtttatggagttgaggtgagtttgtagttattatggttaggtttgggagtttagggttaggttgtttttatggtttagttatgtttagttaggtttttattttgtgggggggtatgaggggtgtttagagggagtagtatggtgtttgggagatatttgggtgttgtagagagtaagaggtgtagtttatatatggaaagtttttatgatttttgggtgtttttataaggagattaataaatagt

SEQ ID NO: 3432 - DNA, 2391 bp, Artificial Sequence
  chemically treated genomic DNA (Homo sapiens)
gttgtttgttggtttttttgtaaaaatatttagaaattatgggggttttttatgtgtgagttgtattttttattttttgtagtatttaggtgttttttgggtattatgttgttttttttgggtattttttatgtttttttatggaatggggatttggttgagtatgattgggttatgggagtagtttgattttgggtttttaggtttggttatggtggttgtaggtttgttttggttttatgggtttttttaatttggttagtgggatgaaggtattgggtagggtttgtgtggggtggagaggaggagttaggttttggatttagaatttttttttgtttttgttagtttagtagtttatagaggggtttttttgtttatagttatagagggttattagggttatagagaagagttatttatttagtgtttgttagggtattaggtatattttgggtgttgttattttatatttgtaatgtttatatggtgaattgggttgaatagaatgtagttttgagaggttggagaaaatatattaagtattgatatagatgattttgggatgtgggattataggtgatttttaattttttttttatattttttttggtttttaaattttatttagtgagtatgtgtttttttttttaattagagaaaatttgatagtagtttttttttgtgttttatagaggagttaatattttttttgtatttgtagtttatgtgggagatggtaggggttggtatatgatagtggagtagaaatttggtttgttttttgttgagataaaggaagtagattttttggttgttttggaagtaagttaatttaaattttgtttttttgaagtgattttttattatatttggattgatgtatgtgtttgtttttttatgaaggttgtggggtgttttatttggggggttaggattgtttttggggtgggggtagttgagtttaaggtttttggtaagtttggttagttagtttagaatttttttttagttgtttttgttggttttagggttagtttggtttagttttattattatagtgtttttttttttttgtttagtttttggtgtagtggtttgagattgttaagtattgtagttttgattaagtggagattttttttagtttgttgtagtgttttatgtttttgaatattggtagggttaaggggagtatgaattggtatgtggtggttattgggttttgttttaagtgagggttttttttttggggagtatagggtttttggtgtgtatagtgtgttatggggtgtttgtgtattatggtatttttgtagatggggaatatattttagtgagttgtttttggaagggtagggaagagagtttataaggtgaatttggttttaggttaggtttttgttttgattgggtttggggtttttttataggttgttgattttggggttgttttttttgtatgttgatgtggttttaaatgtaattatttgtaatgtgttttgtgagaagatttattttattgtttttgattattttaggtatttttttaagatgtgttgtgtagtatttagggatggtttagtttttttaagtgttttattgttttagatttttaggaagttatttataggaatatatagttgtttagttgtgtttattaatttttttttttagtatttttggttttgtggatttaaatattttttagttttgtgtatgtgttttgtgtatttagagttagttttttagtgagatgtaggtaaatttttttttagtttaattgatttaggagattaagtgtgtttatttaatttttttgttaatgtgaaggtttattgtatgaagaattgtaaatatttattgtttggggttttgtatttataggttgtgttgttgtgtgagtgtagtttttttgttttgatttgttataagtgtagttttagtggaaagttgtaggggttgttgtgggtagtgagggaggagggtataagagggtttttgagttattatatttttttatgggaatgggttagattatttttgttaatgattggttttgggttgattttttgttattaagaaattgtttgtattatttttttattgttttgtgtgattggtttttagtttttgattttagatatttagttgttgtttttttatggttgtttgaagttgttttttaaagttttttatttaaggagagaagtggttgtgtgaagatataagtattatgattaaattttggattgttatgtttttagataagaagtatttgattgttagttagtttgtttttttaggtaatttttaatagtgtagttgtttatggtggaggtaggtaggataggggtgtaatgtgggtagttttgagggtgttagaggtag

SEQ ID NO: 3433 - DNA, 2258 bp, Artificial Sequence
  chemically treated genomic DNA (Homo sapiens)
ggttgaagtgtaatgatatgattatagtttattgtaattttgaatttttgggtttaagtgatttttttgatttagttttttaaagtgttaggattataggtatgagttattgtatttggtatgtggatatttttgatttattttaattagggaaggtatttaataaatgttaatttttttttttttttttttaattatttgattttagtattttaggaaatgaggattgggatattggatggtttgggagaggaggaaagaggtgtttagggaaaaggaagaaattgggaaatagaagattatggataaataaaagaggaggggttaatttagaatagggaagatgggttaggtgtaggggtttatatttgtaattttagtattttgggaagttgagataggtggattatgaggttaggagtttgagattagttttgttaatatggtgaaattttgtttttattaaaaatataaaaattatttgggtgtggtggtatttaattgtagttttagttgtttaggaggttgaggtagaagaattgtttgaatttgggaggtggaggttgtagtgagttgagattgtgttattgtattttagtttgggtaatagagtaagattttattttaaaaataaaaaaaaagaaaagaaaagaatagagaagatgattttaattattagagttttttaataaaggtaggttttggttgtttgggggaggttgagagttttttgttattagaggtatgtaagtagaggttgagggattgtgagttatatagatgtgtttgtgaggatttgtaatggttaggaggtagatttttttatttagtaaattttgggagagggttgtttttgtttggttttgtaatggggtagggaagttaaggtgaataggatattatttttggttttagggagtgtttagtttaggaaataagtaaattgttgagatttttttattttgtagttttgtgttttgaagtatttaagttttggagggagttggttggggatttttagtgtgtgttttttggtattgatttattgaagttggagttggttggggaatggtaggaggatgttgtagtgttattagtgtggaggatatgttgtaatttgttagtgttattttggttgtagttggttaggaattattttgttgttaatgtttttttttttagtagttatggagtatataatttgtatagtatttgttagtgtttttatttttttttgtaggagggagagtgtggatatttattttttttttgtatttttttagtatgagtttttgtttttaattatattaatttatttagtgttttttaatatattttgggtatttttatttttgtatttttagttattagaattttttattagtggtggttatttttgtttatttatttatttatttgtttatttatttaattatttatttatttatttatttatttatttaattatttatttatttatttgttatttatttatttttttatttatttatttaattatttatttatttatttatttatttatttatttattttttatttatttaattttgtaatttgttttagtttaatttaatttaatttatttttatttaatttataaggttattgggttttgttatgtattatatatatgtgataagtgaggtatgtttttgtttttaaggagtttatgggaagaattttttttattttttatggttagttttgtattttatttttgttaattttttgttatgttttttagtagaagtaatggattttgaagggttgttttgtgaggagagtttagttttggtttttatgaattgtagaggatagagtttagataaggagagaggtaaagggtggggaggaggtgagagtgagatgagttagtgggatggggattttggttttgtggagggagttgtttttagttagttgtgagtatttagtagtgtattgggggatgaagggaaagagaagggggtaaggaaattattattggagaagtgggttagtgtggtggtgaggaggtgagttttgtagttaatggattatttggtttattgttttagttttattatatttttgttgtgtgaatttgggtatatattttaatatttttgagtttttatgtttttatttgtaaaatgaggataataagatttattttataatgttgtttttagtattaatatatgtagtgtttaaattaatgtgtggtataaagggagagtttaatagattttagtttt

SEQ ID NO: 3434 - DNA, 2258 bp, Artificial Sequence
  chemically treated genomic DNA (Homo sapiens)
aaagttggaatttattaagttttttttttgtgttatgtattaatttaagtattgtatgtgttaatgttaaaggtaatattgtgagataggttttattatttttattttataaatgaggatatggaggtttagagatgttaagatatgtgtttaggtttatatagtaggaatatggtggagttgagataataagttaggtagtttattggttgtagagtttatttttttattgttatattaatttatttttttaatagtggtttttttgtttttttttttttttttttattttttaatatattgttgagtatttatagttaattggaagtagttttttttataaagttaaaatttttgttttattagtttattttatttttattttttttttattttttgtttttttttttgtttgagttttgttttttgtaatttatgaaagttagaattgaattttttttataggatagttttttagagtttgttgtttttgttgaagggtatggtaaaggattaatagaggtgagatgtaaagttggttatggagaatggggaggattttttttatgggttttttgagggtagaggtatgttttatttattatatgtgtgtggtatatggtaaagtttagtaattttatgagttgaataaaggtgaattgaattgaattgaattgaagtggattgtaaagttgaatggatggaaggtgggtgggtggatggatgaatggatggatggatgattgaatggatgaatggggggatggatggatgatggatgaatggatggatgattgaatggataggtgggtggatggatggatgattggatggatggataggtggatggatgaatggataggagtgattattgttggtagggaattttggtaattgaaggtatagaggtaggaatgtttaaggtgtgttggaaaatattgaataaattagtgtgattggagatgaggatttatgttagggagatgtagaaaaagaataaatatttatatttttttttttataaggagaggtggaggtattggtaggtgttgtataagttgtgtgttttatggttgttgggaagggaggtgttaatagtaggatggtttttggttagttgtaattggggtgatattgatagattatagtgtgttttttgtattaataatattgtggtgtttttttgttattttttagttagttttaattttagtggattaatattaaaaggtgtatattgaaaatttttagttaattttttttaaggtttggatgttttaaagtatagaattgtagagtaaaaggattttagtgatttgtttattttttgggttgggtgttttttggggttagggatggtgttttatttattttggtttttttgttttattataggattaggtaaggatagtttttttttaaagtttgttgagtgaaggaatttattttttggttattgtgagtttttataaatatatttgtgtggtttataattttttagtttttatttgtatatttttaatgataggaggtttttaattttttttaagtagttagagtttgtttttattggaaagttttgatgattaaaattattttttttattttttttttttttttttttttatttttgagatggagttttgttttgttgtttaggttggagtgtagtgatatgattttagtttattgtaatttttgttttttaggtttaagtgatttttttgttttagttttttgagtagttgggattatagttgagtgttattatgtttaggtaatttttgtatttttagtagagatggggttttattatattggtaaggttggttttgaatttttgattttgtgatttgtttgttttggttttttaaagtgttgggattataggtgtgagtttttgtgtttggtttgttttttttattttgaattaatttttttttttttatttgtttgtggttttttattttttaattttttttttttttttggatattttttttttttttttttaaattatttaatattttagtttttattttttggggtattgaagttaaataattaaggggaggaagaagggaattagtatttattgagtattttttttagttgagataagttagaaatgtttatgtgttagatgtagtggtttatgtttgtaattttagtattttgagaggttgagttgggaggattatttgaatttaggagtttaaggttgtaatgagttatgattatgttattgtattttagtt

SEQ ID NO: 3435 - DNA, 2486 bp, Artificial Sequence
  chemically treated genomic DNA (Homo sapiens)
agaataatagtaagatagtttgaatttgttttttttttttataataatttaaaaattaatatgattttatttatatgaaatatttagaaatatatttgtatatgtggatatttttattgtatattttttatttaggttgttttaaagtggtattttttttttttttgtttatgttttttttttttttttattttttttgttgatatgtggtttttttttgtttttttttttagtagttttagtagattaggtttaattagttaataagtttttggatttggggaataaaagtatatttttttggatttttgaggatttgttttgttagggtgttttttttaatttaattttttttttttggtagtttattttttttagattttgtaatttatttaattttatttatttgtatttattttgtggatttttttatatttttatttgaatattaggaatttttaggttatgtttatatgtttttggtttttttgtagtttttttttttttttttttttgtgatgttattaagttgaagtttttttttagattttggagtgtagtagggatttttttggtttttgttttagggattaagggggtggaagagtggatttttgtgttttttttatgtttgtgtttttattagggttagttgtaaaaggtagggattaggttgtttaggtagggattatggtattaggtagggattatggtatttttagagttgagttttatgtttagtaaaagatatgtgtttagtaattatttgatagagatttattttttattatatgggatatattatattggatttaggatggggttgaattgggagaggtagttgtggatttgttttttgttttgtttttattttaagagttgatggggtatttattaggaagagtatttttgggtagggagagggttatgagtagttttgttttgtatgtgagatatagtttagtttggttataagatttagatgattatgattgtaatttaggggaagtagagaatgaagattgattagaataattttttgggaatgtgttttgggttttttagagggaagagttttttttttatttagtgttgtaggatttatagaggaaggagagttttggttattagggaggagttatatgagaggatttggtgtttttataaatgggaatgtgagtttatgaaagttggtttttgttttgggtttgattgtgatttatgaggatattgtgtagttattatttgagttttttataataaatagtgagagtgttatggatagatttatttttgaggagtttagtaaagtgggaggattgaggttatagggagaagatataggtattatttggtttggttttgatagggggtagtggatagaatagtgtggaggtagtggggtttttagaggttttggttattttgttatattatggtttgttttggtttggatattagagggtatttggggattatttttgagaagattgaggttgattagagtagaattagttatttgttttgtttagtgttttttgtttagggtttatagttgtgttttttatatttgtgggattatatagttttatttttgttattttttgatatttttaggtatagggatttgatttagggtttagggtgggattagaaagttgggggtttgatttgtatggatggatttttttatttttagagtatgaagaggggtagggagagatttggggaggttttgttttagttgtgggtataagaggtagtatttaggataatttttagtatggtttggtttttttttttttttattttttttgtttattgtataggtgattggatataggtttaggggaggggttttgggaagtttatggatttttgtttttttttgttgtttttagaagttgaataatgatgtttgtgttttttttatttttagggttttgggtttagtttgtgttgatgtagttgtttttagtgtttggggttttagggtagagggttattattttttgtattgggagtagttttaatattggggtaggttatgatgtatattggtattagtagtttttaggaatagtttttaaattttttatttatggtaatagtaattggtttttaggggtttttgattgattttttggttttaagtttggtattttagtttttttggttattattgggttttaggttgaggatgaggttgattattattgttagttttatgatagtagtttgagtggttttatagtgttttaggtttggggggaattgagataagaatttatttttttttttgttaggagggtgagttttggtagttgttgtttaggtttggtttgtggtttttgtggttgttgttttttttatggttttaggggtatttagggttttgtttgggagtggaggttttttttttttttttgtttttagagttaggaatagggaatttaggaagtagaatattttttttttttaatttg

SEQ ID NO: 3436 - DNA, 2486 bp, Artificial Sequence
  chemically treated genomic DNA (Homo sapiens)
taagttaagggagagggatattttgttttttggattttttgtttttgattttgaggatagaaggggaggaggagtttttatttttaggtagggttttggatgtttttgggattatgagggaagtagtagttgtagaagttataggttaggtttgagtagtagttgttggggtttatttttttggtagaggaggaagtgggtttttgttttagttttttttgggtttggagtattgtggaattatttaggttgttgttataggattggtagtaataattagttttatttttagtttggagtttagtgatggttagggaggttgaggtgttagatttggagttagagaattggttagggatttttgagggttgattgttgttattatagatgaggagtttgggggttgtttttggaagttgttggtattagtgtatattataatttgttttgatgttggagttgtttttagtgtaggagatggtgattttttgttttggggttttagatattgagggtggttgtgttagtatagattgggtttaggattttggaagtgggagagatataggtattattatttggtttttagagataataggagaaagtaagaatttataggttttttagggttttttttttggatttgtatttagttatttgtgtagtgagtgaggagagtgaggaggagaggagattaggttatgttggagattgttttgagtgttgttttttgtgtttatagttgaagtagagtttttttaaatttttttttgtttttttttatattttgagagtgggagggtttatttatgtaaattagatttttagttttttaattttattttgggttttgggttaggtttttatgtttgaggatgttagggggtggtaggggtggggttgtgtggttttatgggtgtaaaggatgtagttgtgagttttgagtagaggatattaggtaggataggtggttggttttgttttgattaattttagtttttttaggaatgatttttaagtgttttttagtgtttagattgagataaattatggtatgataaggtgattagagtttttagagattttattgtttttgtattgttttgtttattgttttttgttagggttaggttaggtggtgtttgtgttttttttttgtgattttagtttttttattttattgggttttttgggagtgaatttgtttgtggtgtttttattgtttattgtagaggatttaggtggtgattatataatgtttttataggttataattaaatttagagtagggattgatttttatggatttatgtttttatttgtggggatattgggtttttttatgtggtttttttttggtggttagggtttttttttttttgtggattttgtagtgttgaatagaagggaagtttttttttttaggaggtttagggtatatttttagagggttattttggttaatttttattttttattttttttgaattgtagttatagttatttggattttgtgattgggttgagttgtgttttatatataggataaggttgtttatggttttttttttgtttaggaatgttttttttggtggatgttttattagtttttagggtgagggtagagtgaggagtaggtttatagttattttttttagtttagttttattttgggtttagtataatgtgttttatgtgataagaggtaggtttttgttaagtagttgttgagtatgtattttttgttgggtatagagtttagttttggaaatgttataatttttatttaatgttataatttttatttagatagtttaatttttattttttgtagttaattttgatgaaaatataggtataggaagggtataggagtttatttttttatttttttaatttttggggtagagattagagaagtttttgttgtattttagggtttgagaagagattttgatttggtggtattataggggaagaaggaagaagggattataggagaattaagggtatatgggtatgatttgaagatttttggtgtttaggtgaagatgtaaggaagtttatgaagtagatatagatgaataagattagataaattataggatttaggagaagtggattgttgggaaggagagattggattgagaaagatattttggtagggtaagtttttagaaatttaagaagatgtatttttgttttttaagtttaggagtttgttgattggttgggtttgatttgttggggttattggagaggaaggtagggaggagttatgtgttagtaggagaggtgaggagagggggagaatatgagtagaagaagaggagatgttattttaggatagtttggatgggaggtgtgtgatgggaatgtttatatgtatagatatatttttagatattttatataaatgggattatgttaatttttagattgttgtgagagaagaagataaatttaaattattttgttattatttt

SEQ ID NO: 3437 - DNA, 2411 bp, Artificial Sequence
  chemically treated genomic DNA (Homo sapiens)
tgtggatatttttattgtatattttttatttaggttgttttaaagtggtattttttttttttttgtttatgttttttttttttttttattttttttgttgatatgtggtttttttttgtttttttttttagtagttttagtagattaggtttaattagttaataagtttttggatttggggaataaaagtatatttttttggatttttgaggatttgttttgttagggtgttttttttaatttaattttttttttttggtagtttattttttttagattttgtaatttatttaattttatttatttgtatttattttgtggatttttttatatttttatttgaatattaggaatttttaggttatgtttatatgtttttggtttttttgtagtttttttttttttttttttttgtgatgttattaagttgaagtttttttttagattttggagtgtagtagggatttttttggtttttgttttagggattaagggggtggaagagtggatttttgtgttttttttatgtttgtgtttttattagggttagttgtaaaaggtagggattaggttgtttaggtagggattatggtattaggtagggattatggtatttttagagttgagttttatgtttagtaaaagatatgtgtttagtaattatttgatagagatttattttttattatatgggatatattatattggatttaggatggggttgaattgggagaggtagttgtggatttgttttttgttttgtttttattttaagagttgatggggtatttattaggaagagtatttttgggtagggagagggttatgagtagttttgttttgtatgtgagatatagtttagtttggttataagatttagatgattatgattgtaatttaggggaagtagagaatgaagattgattagaataattttttgggaatgtgttttgggttttttagagggaagagttttttttttatttagtgttgtaggatttatagaggaaggagagttttggttattagggaggagttatatgagaggatttggtgtttttataaatgggaatgtgagtttatgaaagttggtttttgttttgggtttgattgtgatttatgaggatattgtgtagttattatttgagttttttataataaatagtgagagtgttatggatagatttatttttgaggagtttagtaaagtgggaggattgaggttatagggagaagatataggtattatttggtttggttttgatagggggtagtggatagaatagtgtggaggtagtggggtttttagaggttttggttattttgttatattatggtttgttttggtttggatattagagggtatttggggattatttttgagaagattgaggttgattagagtagaattagttatttgttttgtttagtgttttttgtttagggtttatagttgtgttttttatatttgtgggattatatagttttatttttgttattttttgatatttttaggtatagggatttgatttagggtttagggtgggattagaaagttgggggtttgatttgtatggatggatttttttatttttagagtatgaagaggggtagggagagatttggggaggttttgttttagttgtgggtataagaggtagtatttaggataatttttagtatggtttggtttttttttttttttattttttttgtttattgtataggtgattggatataggtttaggggaggggttttgggaagtttatggatttttgtttttttttgttgtttttagaagttgaataatgatgtttgtgttttttttatttttagggttttgggtttagtttgtgttgatgtagttgtttttagtgtttggggttttagggtagagggttattattttttgtattgggagtagttttaatattggggtaggttatgatgtatattggtattagtagtttttaggaatagtttttaaattttttatttatggtaatagtaattggtttttaggggtttttgattgattttttggttttaagtttggtattttagtttttttggttattattgggttttaggttgaggatgaggttgattattattgttagttttatgatagtagtttgagtggttttatagtgttttaggtttggggggaattgagataagaatttatttttttttttgttaggagggtgagttttggtagttgttgtttaggtttggtttgtggtttttgtggttgttgttttttttatggttttaggggtatttagggttttgtttgggagtggaggttttttttttttttttgtttttagagttaggaatagggaatttaggaagtagaatattttttttttttaatttgggatataaagtttttatattgaagttt

SEQ ID NO: 3438 - DNA, 2411 bp, Artificial Sequence
  chemically treated genomic DNA (Homo sapiens)
gaattttagtgtagagattttgtgttttaagttaagggagagggatattttgttttttggattttttgtttttgattttgaggatagaaggggaggaggagtttttatttttaggtagggttttggatgtttttgggattatgagggaagtagtagttgtagaagttataggttaggtttgagtagtagttgttggggtttatttttttggtagaggaggaagtgggtttttgttttagttttttttgggtttggagtattgtggaattatttaggttgttgttataggattggtagtaataattagttttatttttagtttggagtttagtgatggttagggaggttgaggtgttagatttggagttagagaattggttagggatttttgagggttgattgttgttattatagatgaggagtttgggggttgtttttggaagttgttggtattagtgtatattataatttgttttgatgttggagttgtttttagtgtaggagatggtgattttttgttttggggttttagatattgagggtggttgtgttagtatagattgggtttaggattttggaagtgggagagatataggtattattatttggtttttagagataataggagaaagtaagaatttataggttttttagggttttttttttggatttgtatttagttatttgtgtagtgagtgaggagagtgaggaggagaggagattaggttatgttggagattgttttgagtgttgttttttgtgtttatagttgaagtagagtttttttaaatttttttttgtttttttttatattttgagagtgggagggtttatttatgtaaattagatttttagttttttaattttattttgggttttgggttaggtttttatgtttgaggatgttagggggtggtaggggtggggttgtgtggttttatgggtgtaaaggatgtagttgtgagttttgagtagaggatattaggtaggataggtggttggttttgttttgattaattttagtttttttaggaatgatttttaagtgttttttagtgtttagattgagataaattatggtatgataaggtgattagagtttttagagattttattgtttttgtattgttttgtttattgttttttgttagggttaggttaggtggtgtttgtgttttttttttgtgattttagtttttttattttattgggttttttgggagtgaatttgtttgtggtgtttttattgtttattgtagaggatttaggtggtgattatataatgtttttataggttataattaaatttagagtagggattgatttttatggatttatgtttttatttgtggggatattgggtttttttatgtggtttttttttggtggttagggtttttttttttttgtggattttgtagtgttgaatagaagggaagtttttttttttaggaggtttagggtatatttttagagggttattttggttaatttttattttttattttttttgaattgtagttatagttatttggattttgtgattgggttgagttgtgttttatatataggataaggttgtttatggttttttttttgtttaggaatgttttttttggtggatgttttattagtttttagggtgagggtagagtgaggagtaggtttatagttattttttttagtttagttttattttgggtttagtataatgtgttttatgtgataagaggtaggtttttgttaagtagttgttgagtatgtattttttgttgggtatagagtttagttttggaaatgttataatttttatttaatgttataatttttatttagatagtttaatttttattttttgtagttaattttgatgaaaatataggtataggaagggtataggagtttatttttttatttttttaatttttggggtagagattagagaagtttttgttgtattttagggtttgagaagagattttgatttggtggtattataggggaagaaggaagaagggattataggagaattaagggtatatgggtatgatttgaagatttttggtgtttaggtgaagatgtaaggaagtttatgaagtagatatagatgaataagattagataaattataggatttaggagaagtggattgttgggaaggagagattggattgagaaagatattttggtagggtaagtttttagaaatttaagaagatgtatttttgttttttaagtttaggagtttgttgattggttgggtttgatttgttggggttattggagaggaaggtagggaggagttatgtgttagtaggagaggtgaggagagggggagaatatgagtagaagaagaggagatgttattttaggatagtttggatgggaggtgtgtgatgggaatgtttata

SEQ ID NO: 3439 - DNA, 2386 bp, Artificial Sequence
  chemically treated genomic DNA (Homo sapiens)
ttgatggagaaattttatttgaaattttaaagtagggtagggatatttttattagatatttttgtagtttttgttttgtgggatgaagtaagggatgatgatatatttgtttgtttatttggaagtgagttttaggttattgtattagaagggtgataatttaatataagttattgttaagtaatttttgtgtgtttagtatttatatttttttgttttattttgattattatattgtataggagttattatttttattttttgtttttatttatagatgaggatattgagatttagagagttttttgttttgttttgttttttgagatggagttttgttttgttatttaggttggagtgtaatggtatgattttagtttattgtaatttttgttttttgggtttaagagatttttttgttttagttttttgagtagttgggattataggtatttgttattatatttagttaattttgtattagagatggggttttattatgttggttaggttggtttttaatttttgattttgtgatttatttgttttagttttttaaagtgttgggattataggtatgagttattgtgtttggtttgttttattttttgttttgtttgtttgttttgttttgtttttagagatagggtttggttttgttttttaggttagggtgtagtggtgtgattatagtttattgtagttttaaatttttgggtttaagtaatttttttgttttagtttattaggaattggaattataaatgtatgttattatttttagttaatattttttttttttggaaaaatgaagttttattatgttgtttaggttggttttaaatttttgggtttaagtgatttttttgtagtgttgggattataggtatgagttattttgtttggttaattttagagagttttgatgaagttataaaattttgattatggagttagaatttaaatttaggtatgtgaggtttgagtttaggtttttattagggttattgtgttgtaattgttattattttttggtattttaagtgatatttgagtattatttaagggaaatggtttatattttggtaatttttttatttgttttatttttttttttgaattagggattttggtagagatagagttttagtagtttttatttgtttttttgtgttggttttgtttatttatggatgagttagttggaatgtttggatattttagtttagtggttgtggtattaggagttgttaggaggtgggaatgtagagaatgtggtttattgtgtttttgtttgtttaggttgaatttgtagagaggtttggaaggtgaatgatataatgtttgttaagggtttgggatgataggtgtatgtgaagatgaggataaagattgattttttttttggggttgttagtatagttttgtattttttttatatatgtttgtattttaggtttagatattttgtgttttgggtttttatgaagggtaagaaattattgattaggaagtaagaagaagaaaaagaaatgttttaggtttttaaaagaaagagtgtttgatttttttatttaaatgttattttgaaatatagtttttttgttttttgtttttttttttttttagagatagggttttgttttgttatttaggttggagtgtagtggtatgtttatagtttattgtagtttttaatttttgggtttaagtgatttttttgttttagttttttaaagtattgggattataggtgtgagttattgtattaggttttgaaatattgttttgattttgttttttttttatttagatgtttttgtgtaggttgataattttttttggtgttttttttgtgtggggttgtgtttgggtattgagtagatagtagtgaagaagatgatgatagtttttttttagggagttttttttttggagagaggtttagataattaaaaagtgagtgtgtttatgtttgtaattttagtattttgggaggttaaggtggatggattataaggttaggagtttgagattagtttggttaatatggtgaaattttgtttttattaaaaatataaaaattagttagttatgatggtgggtatttgtaattttagttatttaggaggttgagataggagaattgtttgaatttgagaggtggaggttgtagtgagttgagattgtgttattgtattttagtttggatgatagagtgagattttgttttaaaaaagaaaagtgagtgtgtgattatagatgagtagtgtgggggaggaaataaattaggtttatgatggaaattaggggaatggggtttttttaaaatgaaattaaattttgagagttgtgtgttgtttaaatgtgttattttattgtttat

SEQ ID NO: 3440 - DNA, 2386 bp, Artificial Sequence
  chemically treated genomic DNA (Homo sapiens)
gtgggtagtgaggtgatatatttaggtagtatgtagtttttggagtttgattttattttaaaggaattttatttttttaatttttattatagatttagtttgtttttttttttatattgtttatttgtaattatatatttattttttttttttgagatagagttttgttttgttgtttaggttggagtgtaatggtgtaattttggtttattgtaatttttgttttttgagtttaagtgatttttttgttttagttttttgagtagttgggattataggtgtttattattatggttggttaatttttgtatttttagtagagatggggttttattatattggttaggttggttttgaatttttgattttgtgatttatttgttttggttttttaaagtgttgggattataggtgtgagtgtatttattttttaattatttgaatttttttttagaaaggaaattttttggggaaggattattattattttttttattattgtttatttagtgtttagatatagttttgtatagagaagatattagaaaagattgttggtttgtataaaggtatttgagtaggagagagatagaattaaagtagtgttttagggtttggtgtagtggtttatgtttgtaattttagtgttttgggaggttgaggtgggaggattgtttgagtttaggagttggaagttgtagtgagttgtgagtgtgttattgtattttagtttgggtgatagagtaagattttgtttttaaaagaaaaaaaaaatgaaaaataaaaaagttgtgttttaggatggtatttgggtaaagaggttaaatatttttttttttaagagtttgggatattttttttttttttttttgttttttaattagtggttttttgttttttataggagtttagggtatggagtgtttgggtttggaatgtggatatgtgtgggagggatgtgaaattgtgttggtagttttaagaaaagaattagtttttgtttttatttttatatgtatttgttgttttaaatttttgataaatattgtgttatttattttttaaatttttttgtggatttagtttgggtgggtgggagtatagtgagttatattttttgtatttttgttttttgatagtttttggtattatagttgttgagttgggatgtttaaatattttaattgatttatttgtgggtgagtaaggttgatatgaggggatgggtggaggttgttggggttttgtttttgttgaagtttttaatttagagaagaaagtggggtgggtgggggaattgttgggatatgggttattttttttgaatgatgtttgggtgttatttgaggtgttaggaagtggtggtagttgtagtatagtggttttggtggaagtttgggtttagattttatatatttagatttgagttttggttttatggttagaattttgtaattttattaaaattttttgagattggttgggtagagtggtttatgtttgtaattttagtattgtaggaggattatttgagtttaggagtttgagattagtttgggtaatatagtgagattttatttttttaaaaaggaaaaatattagttggggatggtggtatgtatttgtagttttagtttttggtaggttgaggtgagaggattgtttgagtttaggagtttgaggttatagtgagttatggttgtattattgtattttaatttggaaaataaagttagattttatttttgaaaataaaataaaataaataaataaaataaaaaataaaataggttaggtgtggtggtttatgtttgtaattttagtattttgggaggttgaggtaggtggattatgaggttaggagttggagattagtttggttaatatggtgaaattttatttttaatataaaattagttgggtgtggtggtaggtgtttgtagttttagttatttaggaggttgaggtaagggaattttttgaatttaggaggtagaggttgtagtgagttgagattgtgttattgtattttagtttgggtgatagagtaagattttattttaaaaaataaaataaaataaaaaattttttgggttttggtgtttttatttgtaaatggaggtggggggtgagaataatggtttttgtgtagtgtagtggttagaatgaagtaagaaaatgtgaatattgagtatgtgagagttgtttagtaatgatttgtgttaggttgttatttttttgatgtaatgatttgagatttatttttgggtgggtaggtgagtgtgttattattttttgttttgttttataggataaaggttgtaaaagtatttggtgggaatgtttttgttttgttttgggattttgggtaggatttttttattag

SEQ ID NO: 3441 - DNA, 2500 bp, Artificial Sequence
  chemically treated genomic DNA (Homo sapiens)
tttgaatgaggttattgaatgtgtatgggaggtttagtgttgttttattttagtttgatggagaaattttatttgaaattttaaagtagggtagggatatttttattagatatttttgtagtttttgttttgtgggatgaagtaagggatgatgatatatttgtttgtttatttggaagtgagttttaggttattgtattagaagggtgataatttaatataagttattgttaagtaatttttgtgtgtttagtatttatatttttttgttttattttgattattatattgtataggagttattatttttattttttgtttttatttatagatgaggatattgagatttagagagttttttgttttgttttgttttttgagatggagttttgttttgttatttaggttggagtgtaatggtatgattttagtttattgtaatttttgttttttgggtttaagagatttttttgttttagttttttgagtagttgggattataggtatttgttattatatttagttaattttgtattagagatggggttttattatgttggttaggttggtttttaatttttgattttgtgatttatttgttttagttttttaaagtgttgggattataggtatgagttattgtgtttggtttgttttattttttgttttgtttgtttgttttgttttgtttttagagatagggtttggttttgttttttaggttagggtgtagtggtgtgattatagtttattgtagttttaaatttttgggtttaagtaatttttttgttttagtttattaggaattggaattataaatgtatgttattatttttagttaatattttttttttttggaaaaatgaagttttattatgttgtttaggttggttttaaatttttgggtttaagtgatttttttgtagtgttgggattataggtatgagttattttgtttggttaattttagagagttttgatgaagttataaaattttgattatggagttagaatttaaatttaggtatgtgaggtttgagtttaggtttttattagggttattgtgttgtaattgttattattttttggtattttaagtgatatttgagtattatttaagggaaatggtttatattttggtaatttttttatttgttttatttttttttttgaattagggattttggtagagatagagttttagtagtttttatttgtttttttgtgttggttttgtttatttatggatgagttagttggaatgtttggatattttagtttagtggttgtggtattaggagttgttaggaggtgggaatgtagagaatgtggtttattgtgtttttgtttgtttaggttgaatttgtagagaggtttggaaggtgaatgatataatgtttgttaagggtttgggatgataggtgtatgtgaagatgaggataaagattgattttttttttggggttgttagtatagttttgtattttttttatatatgtttgtattttaggtttagatattttgtgttttgggtttttatgaagggtaagaaattattgattaggaagtaagaagaagaaaaagaaatgttttaggtttttaaaagaaagagtgtttgatttttttatttaaatgttattttgaaatatagtttttttgttttttgtttttttttttttttagagatagggttttgttttgttatttaggttggagtgtagtggtatgtttatagtttattgtagtttttaatttttgggtttaagtgatttttttgttttagttttttaaagtattgggattataggtgtgagttattgtattaggttttgaaatattgttttgattttgttttttttttatttagatgtttttgtgtaggttgataattttttttggtgttttttttgtgtggggttgtgtttgggtattgagtagatagtagtgaagaagatgatgatagtttttttttagggagttttttttttggagagaggtttagataattaaaaagtgagtgtgtttatgtttgtaattttagtattttgggaggttaaggtggatggattataaggttaggagtttgagattagtttggttaatatggtgaaattttgtttttattaaaaatataaaaattagttagttatgatggtgggtatttgtaattttagttatttaggaggttgagataggagaattgtttgaatttgagaggtggaggttgtagtgagttgagattgtgttattgtattttagtttggatgatagagtgagattttgttttaaaaaagaaaagtgagtgtgtgattatagatgagtagtgtgggggaggaaataaattaggtttatgatggaaattaggggaatggggtttttttaaaatgaaattaaattttgagagttgtgtgttgtttaaatgtgttattttattgtttattgaatatattatatttttttgttttattgttttagtttttgtaatttttttatttgggtt

SEQ ID NO: 3442 - DNA, 2500 bp, Artificial Sequence
  chemically treated genomic DNA (Homo sapiens)
aatttggatggggagattataggaattgaggtagtgaggtagaaaaatatggtgtgtttagtgggtagtgaggtgatatatttaggtagtatgtagtttttggagtttgattttattttaaaggaattttatttttttaatttttattatagatttagtttgtttttttttttatattgtttatttgtaattatatatttattttttttttttgagatagagttttgttttgttgtttaggttggagtgtaatggtgtaattttggtttattgtaatttttgttttttgagtttaagtgatttttttgttttagttttttgagtagttgggattataggtgtttattattatggttggttaatttttgtatttttagtagagatggggttttattatattggttaggttggttttgaatttttgattttgtgatttatttgttttggttttttaaagtgttgggattataggtgtgagtgtatttattttttaattatttgaatttttttttagaaaggaaattttttggggaaggattattattattttttttattattgtttatttagtgtttagatatagttttgtatagagaagatattagaaaagattgttggtttgtataaaggtatttgagtaggagagagatagaattaaagtagtgttttagggtttggtgtagtggtttatgtttgtaattttagtgttttgggaggttgaggtgggaggattgtttgagtttaggagttggaagttgtagtgagttgtgagtgtgttattgtattttagtttgggtgatagagtaagattttgtttttaaaagaaaaaaaaaatgaaaaataaaaaagttgtgttttaggatggtatttgggtaaagaggttaaatatttttttttttaagagtttgggatattttttttttttttttttgttttttaattagtggttttttgttttttataggagtttagggtatggagtgtttgggtttggaatgtggatatgtgtgggagggatgtgaaattgtgttggtagttttaagaaaagaattagtttttgtttttatttttatatgtatttgttgttttaaatttttgataaatattgtgttatttattttttaaatttttttgtggatttagtttgggtgggtgggagtatagtgagttatattttttgtatttttgttttttgatagtttttggtattatagttgttgagttgggatgtttaaatattttaattgatttatttgtgggtgagtaaggttgatatgaggggatgggtggaggttgttggggttttgtttttgttgaagtttttaatttagagaagaaagtggggtgggtgggggaattgttgggatatgggttattttttttgaatgatgtttgggtgttatttgaggtgttaggaagtggtggtagttgtagtatagtggttttggtggaagtttgggtttagattttatatatttagatttgagttttggttttatggttagaattttgtaattttattaaaattttttgagattggttgggtagagtggtttatgtttgtaattttagtattgtaggaggattatttgagtttaggagtttgagattagtttgggtaatatagtgagattttatttttttaaaaaggaaaaatattagttggggatggtggtatgtatttgtagttttagtttttggtaggttgaggtgagaggattgtttgagtttaggagtttgaggttatagtgagttatggttgtattattgtattttaatttggaaaataaagttagattttatttttgaaaataaaataaaataaataaataaaataaaaaataaaataggttaggtgtggtggtttatgtttgtaattttagtattttgggaggttgaggtaggtggattatgaggttaggagttggagattagtttggttaatatggtgaaattttatttttaatataaaattagttgggtgtggtggtaggtgtttgtagttttagttatttaggaggttgaggtaagggaattttttgaatttaggaggtagaggttgtagtgagttgagattgtgttattgtattttagtttgggtgatagagtaagattttattttaaaaaataaaataaaataaaaaattttttgggttttggtgtttttatttgtaaatggaggtggggggtgagaataatggtttttgtgtagtgtagtggttagaatgaagtaagaaaatgtgaatattgagtatgtgagagttgtttagtaatgatttgtgttaggttgttatttttttgatgtaatgatttgagatttatttttgggtgggtaggtgagtgtgttattattttttgttttgttttataggataaaggttgtaaaagtatttggtgggaatgtttttgttttgttttgggattttgggtaggatttttttattaggttggagtggggtagtgttgagttttttgtgtatatttagtgattttatttagg

SEQ ID NO: 3443 - DNA, 2340 bp, Artificial Sequence
  chemically treated genomic DNA (Homo sapiens)
gttttattaagttttttagaggggaaaaattttaggttgggaggggaggtgatttgtttagagttatatagtttttggagggtagaggggaggttaatatttgtttttgtgattttgatattgaagtaaaaatgggtgattttaataatttaatagtgtttaggtttgattttgtttttataaatatagagatttaagtttttatttttgtagttatatttataattttatagtgtggtttttgaattttatgattgtaaagttggtattatgttataggtattattttgtaatgtgatttttttatttttttgttttagttatgttttttattagggatatagtatagtttgttttttttttattagtttagaggtttgaatagagggatagaggtgagggttagagatgtgaagttttatgatttgtttgtttagttttttgatatgggattttggtaagttattttttttttagggttttagtttttttatagggtttggtataagtaggtgtttagatttagggtgagtgagataatttttgagttttttgtgttttaaaagaaatttgttgtttttattgggttttagtagtagtattttggggttagtttgggtgtggtttggttataaggatatgttgggttttaggttatttttttttttttattttttttgatttttttaaattttttaaagagatgggtatttttaatatttattttttttttggggttagttggttgtgtttgagggtgttagaattagagttgagtttggggagttttgtgaatttatttaagttgttttttttatttttttttatagtttatttgtttagtaggagggagggagtaattagatttaagtttgggtgtaaattttggttttgttattgtttttttgtttgatttgaattagttatttaatttttttgagtttatttataaaagttgaatgattttttttttatagagttattgtaagaataaggatatgggggtagattatattatttttaatttattaagggatttttttttgatagagattgagtaagatttaattgttttgagttgtgtggattttatgtttagttgtgtatttgtgtaataattagatatgttttttggttttttagatatattttggaatttgaaagggaaagtgaaagttataattttttagtagtttatgattaagtatagtaaatatgttgttttttagtattatttgtagtttaggtttagtttttttgttgttgtatttagaggagtagttgtagattagatatttgggttttttttatttaatttatttgttttatatttttaggatttaaggtttgttgtgttagttgtttatgttttaggtagttagaattagagttgagtttggggagttttttgaatttatttgagttgtttgttttttaatttttgttttgatttttgtagtttaagggtatagtaggtgggggagagaagttagatttaagttttagtgtaattttaggttttgtttttgttttattgtttgatttgaattagttatttaatttttttgagtttaagaaagatttgttattgattgattgtggggttttttagattattttttgtttttttgtttttttatattttttagatgtttgttttatttttatatatgttattagtattagtatagttttttatatatgttgggtggatgtttattgtatatttattgtaatgtttttgaggttatgttttttgttatgtttttgatatagagttttgttttgtagtttaggttggagagtagtggtataattatagttattttaagtggtataattaagttatttttttattttagtttttgagtagttgggattataggtgtttgttattatatttagttaattttttgtaattttagtagagatggggttttattattttggttaggttggttttgaatttttgattttaagtgatttatttgttttggttttttaaagtgttgggattataggtgtgagttatggtgtttagtttattgtattttttttgtgattttgtgtttttatagtttagtttttattaataaatgagaatatataatatttggttttttatttttgagttattttatttagaataatggtgtttaattttatttagattgttatggatgttattattttttttttttttatagttgagtaatattttatggtatatatatatataggggtgtgtgtgtgtgtgtgtgtgtgtgtatatatatatatattttttttatttatttgttggttgatgagtatttaggttggttttatatttttttggtt

SEQ ID NO: 3444 - DNA, 2340 bp, Artificial Sequence
  chemically treated genomic DNA (Homo sapiens)
aattgaaaaaatatggaattaatttaaatgtttattagttaataagtggatgaagaaaatgtgtgtgtatatatatatatatatatatatatatatatttttatatatgtatatgttatggaatattatttagttgtaaaaaggaagggaataatggtatttgtaataatttggatgaagttggatattattattttgagtgaagtaatttaggaatggaaaattaaatattgtatgtttttatttattagtaggagttaagttatgaagatataaagttataagaaggatataatgggttgggtgttgtggtttatatttgtaattttagtattttgggaggttaaggtaggtggattatttgaggttaggagtttaagattagtttggttaagatggtgaaattttatttttattaaaattataaaaaattagttgggtgtagtggtaggtatttgtaattttagttatttggaagttgagatgggaggatggtttgattgtgttatttgaagtagttatgattgtgttattgttttttagtttgggttatagagtaagattttatattaaaaatataatagaaaatataattttagaagtattataataaatatgtaataagtatttatttagtatgtgtgggggattgtgttgatgttgatggtatgtgtgggagtaaggtaggtatttgaggaatgtgggggaatggaaggatggggagtaatttggagagttttatggttagttagtggtaggttttttttgagtttagaaaggttaggtaattagtttagattagatagtaaaataggggtagagtttggaattgtattgaggtttgagtttgattttttttttttatttgttgtgtttttaaattgtagagattggggtgggggttggggggtaagtggtttagatgggtttaaaaaattttttaggtttaattttggttttgattgtttgagatatgggtagttgatatagtagattttgaattttgaggatgtgaggtaggtgggttggatgagagggatttggatgtttggtttgtggttgtttttttaagtgtagtagtaaggaggttgggtttggattgtaggtggtgttggggagtagtgtgtttattgtgtttggttatgagttgttgggaagttgtgatttttatttttttttttgaattttagggtatatttgggaggttggaggatgtgtttggttattatatagatgtatagttggatgtgggatttatatagtttagaatagttggattttgtttagtttttgttagaggaagattttttggtaagttggggatagtgtgatttatttttatgtttttatttttgtaatagttttataagggaaggattatttagtttttgtagataagtttagagaggttaggtagttggtttagattagataggaaagtagtggtagagttgggatttgtatttaggtttgagtttgattgtttttttttttttgttgggtgggtaaattgtagagagaggtggggaaaatagtttagatgggtttataaagttttttgggtttagttttggttttgatatttttagatatggttagttgattttagaagaaaggtaggtgttgggggtgtttatttttttgggaaatttgaaggaattaaagaaggtggaggaggggaggtgatttggagtttggtatgtttttgtggttgggttatatttaggttggttttagggtgttgttgttgaagtttaatgggaataatagattttttttgagatataaggaatttagaggttgttttatttattttgagtttgagtatttatttgtgttaggttttgtggggaaattgaggttttgggaggggaatgatttgttagggttttgtgttaggaggttgagtaggtagattataggattttatgtttttggtttttatttttgtttttttgtttagatttttgagttgatagagaagaaataggttgtgttgtgtttttaatgggaaatatggttgagataggggagtgagaaggttgtattgtagaatggtatttgtggtatgatgttagttttgtaattatgagatttaaaagttatattgtggaattgtgagtataattataggagtgagagtttaggtttttgtgtttgtagaagtagaattaaatttggatattgttggattattaaaattatttatttttgttttaatattagagttataagggtagatgttggttttttttttgttttttaagagttgtgtgattttgggtaagttatttttttttttagtttaagattttttttttttaaaaaatttgatagagt

SEQ ID NO: 3445 - DNA, 2495 bp, Artificial Sequence
  chemically treated genomic DNA (Homo sapiens)
ggttttatgattagttttgttttatatgggaggaaattgaggtttagaaaagtgatttggttagtttttttgtttttgtttaatggtttagtgaggatttgttgattgtgagaatgattttagtttagagtatgtttttaggttgtggtgaggttttggtttagggtaggtttggaagtagtttgtttttagattgatatgatgttagtttttaggtggtaggagtataatggtattttttagaaaggagggaggtatttagtttgggtttttgagtttttttttgtttgtttgtttaaatagagataagttttgttttgttgtttaggttggagtttggagtgtagtggaatgattatggtttattgtagtttttattttttgggttaaagtgatttttttattttagttttttgagtagttgggattataggtatatattattatgtttggttaattttttaattatttttggtagagatagggttttgttatgttgtttgggttggttttgaatttttggttttaagtgattgttttattttggttttttaaagtgttaggatgatagattattttttttgtttagttggtttttttgtttttagtttgtgttaggtatggttttttttttattgttgggttgttttttggtttttaggagttttttttttgttgtttattggattattgtttgttttggagttttttttgggttttaggttttagtttttgtgttggagttggtggtttttttagagtttgtggtgaaggttgtgttttagggtaggttagggaggggatttatggggatagattgttgaagtgataagtatttataatgtagggattattgttgggtttttagataagttttagaggattagtttttggtagtggttatattgttatgtgttttagagtttattttgggagattttttttttggagaattttaggaagtttttagagtttttgtttgttagtttttgagaggtttagagggggtagagatttatttgaggttattgagttgttttgaatttttttttgtattattgggtttaaagatttatttttttatgttgtttggaattgttggtttagtttggaggtgtagtgtagggataggttgtttttgtttggtaggagtttttttttatggtttgtaggtttggtagttgggatagggttgaatgggaggtattgttggtagattaggtaagttaggtttttttaggttgaggtgaagaaggggtgggtggtgggtgggagtagtggttggagttatagggttttttgtttgttttagttgaggattgaggttttggtttgaatttttgggttagtttgatagggagggggtattagtagttggtttgggagttagtagttttgggtttttttttgttatgtgggttgtttttttagaggttgttttttagtttttgaaaaatatattttattaataagtagttttgaggttatagtgggggtttaggtttgtatttggtatatagtgggtgttttagaataggtgattttttttttttgtttgtgtttatatattgatataaatagtttaatattggatatataggattttagatatttattttttttatttaattttagattattgggagttatttaaattgatttttttgaattttattattttgtggtatatagtattttattgtgtaaatgtattatattgatttagttatttattttggatattggttatttttaattttttgttatttataaataatattgtaaagaatatttaaatatgtatttttttaagtttgtgtttgttttttaaataatatatttagattatggttaatgtttatgtattttgattttttagatttttgtttttgatggaattgtattttttattgtttgtttttttaattggaaataggggttaggtatagtggtttatgtttgtaattttagtattttgggaggttgaggtgggaggattatttgagtttaggagtttgagattagtttgggtaatatagattttgttttaagagaaaaaaaaaaggttgggtgtggtggtttatgtttgtaattttagtattttgggaggtggaggtgggtggattatgaggttgagattaagattattttggttaatatagtgaaattttatttttattaaaagtataaaaaattagttgggtgtggtggtaggtgtttgtagttttagttatttgggaggttgaggtaggtaaatggtatgaatgtgagagttgagatggtgttattgtattttagtttgggtaatagagtgaaattgttttaaaaaagaaaaaaaatatatatatatatatatatatatatatatatatatatatatatatatatatatatatgtatgtgtgtgtgtatatatttatgtgtgtatatatttatatataataaaaatataaatgtatatgtttatatatatttatatatgttaaataatgaat

SEQ ID NO: 3446 - DNA, 2495 bp, Artificial Sequence
  chemically treated genomic DNA (Homo sapiens)
gtttattgtttaatatatataaatatatataaatatatatatttatatttttattatatataaatatatatatatataagtgtatatatatatatatatatatatatatatatatatatatatatatatatatatatatatatatatatgtatatatttttttttttttttgagatagttttattttgttgtttaggttagagtgtagtggtgttattttggtttttgtgtttatgttatttgtttgttttagttttttaagtagttgggattataggtgtttgttattatatttggttaattttttgtatttttagtagagatagggttttattgtgttagttaggatggttttgattttgattttgtgatttatttgtttttgttttttaaagtgttgggattataggtgtgagttattgtgtttggtttttttttttttttttgagatagagtttgtgttgtttaggttggttttaaatttttgggtttaagtgatttttttattttagttttttaaagtgttgggattataggtatgagttattgtgtttgatttttgtttttaattaaaggaataaatagtagaagatgtaattttattagaagtaggaatttgaaaaattaagatatatgaatattggttatggtttggatgtattatttaaaaaataaatatgagtttgggaagatgtgtatttggatattttttgtaatattgtttgtaaatagtaaaaaattggaggtagttaatgtttaagatgaatggttaagttaatgtgatatatttatataatggaatattatatattatagaataatgagatttggaagagttaatttggataatttttagtaatttgaggttaagtgaaaaaaatgagtgtttagaattttgtgtgtttagtattaaattatttatgttaatgtgtaagtataaatggaaggaaagggttatttgttttgaagtatttattgtgtgttaggtgtgggtttgaatttttattgtgattttagagttatttattaatgggatgtgttttttagagattaggaagtagtttttgggagggtagtttatatggtaggagggagtttaggattgttgatttttgggttagttgttggtgttttttttttgttgggttggtttaaggatttaggttggggttttagtttttggttggggtaggtaggaggttttgtaattttagttgttgtttttgtttgttgtttgttttttttttattttagtttggggaagtttggtttgtttggtttgttgataatgttttttatttagttttgttttagttgttaggtttgtgggttgtggaggggggtttttgttaggtggggatagtttgtttttgtgttgtgtttttaggttggattagtagttttaggtggtatggaggggtgagtttttgggtttgatggtgtaaggggggatttagagtagtttagtggttttaggtaagtttttgttttttttgggttttttagaggttggtgggtaggggttttggggattttttggggttttttaggaagggggttttttaaggtgggttttgagatatgtggtaatgtggttattgttaggaattggttttttggggtttgtttgagagtttagtagtggtttttgtattatgaatgtttgttgttttagtgatttgtttttatgggttttttttttggtttgttttgaggtatagtttttattataggttttggagaagttattaattttaatgtaggggttggagtttgggatttaaaggagattttaaaatagatgatagtttagtgagtagtgagggggaggtttttgggggttggggaatagtttagtgatgggggagaggttatgtttgatataggttgagaatagaggggttagttgggtaggggaggtgatttattattttagtgttttgggaggttaaggtgggataattatttgaggttaggagtttaagattagtttgggtaatatagtgagattttgtttttattagaagtaattaaaaaattagttaggtgtggtggtgtgtgtttgtagttttagttatttaagaggttgaggtgagaggattattttagtttaggaggtgaaggttgtagtaagttatagttattttattgtattttagattttagtttgggtaatagagtaaggtttgtttttatttaaataaataaataaaaaaagatttaaggatttggattggatgttttttttttttttggggggtattattatgtttttgttatttgggagttggtattatattagtttgaggataggttgtttttgagtttattttggattagagttttattatagtttgagaatatgttttgaattggagttatttttatagttagtaagtttttattgagttattgggtagaggtaaagggattaattaggttatttttttgagttttggtttttttttatgtaaaataggattaattataggatt

SEQ ID NO: 3447 - DNA, 2492 bp, Artificial Sequence
  chemically treated genomic DNA (Homo sapiens)
taaaaattttttagagtttttttttttgggtttaggaaagtgttaattattttgagtttttttgttttttattttttatgtagtggaggttttatgattagttttgttttatatgggaggaaattgaggtttagaaaagtgatttggttagtttttttgtttttgtttaatggtttagtgaggatttgttgattgtgagaatgattttagtttagagtatgtttttaggttgtggtgaggttttggtttagggtaggtttggaagtagtttgtttttagattgatatgatgttagtttttaggtggtaggagtataatggtattttttagaaaggagggaggtatttagtttgggtttttgagtttttttttgtttgtttgtttaaatagagataagttttgttttgttgtttaggttggagtttggagtgtagtggaatgattatggtttattgtagtttttattttttgggttaaagtgatttttttattttagttttttgagtagttgggattataggtatatattattatgtttggttaattttttaattatttttggtagagatagggttttgttatgttgtttgggttggttttgaatttttggttttaagtgattgttttattttggttttttaaagtgttaggatgatagattattttttttgtttagttggtttttttgtttttagtttgtgttaggtatggttttttttttattgttgggttgttttttggtttttaggagttttttttttgttgtttattggattattgtttgttttggagttttttttgggttttaggttttagtttttgtgttggagttggtggtttttttagagtttgtggtgaaggttgtgttttagggtaggttagggaggggatttatggggatagattgttgaagtgataagtatttataatgtagggattattgttgggtttttagataagttttagaggattagtttttggtagtggttatattgttatgtgttttagagtttattttgggagattttttttttggagaattttaggaagtttttagagtttttgtttgttagtttttgagaggtttagagggggtagagatttatttgaggttattgagttgttttgaatttttttttgtattattgggtttaaagatttatttttttatgttgtttggaattgttggtttagtttggaggtgtagtgtagggataggttgtttttgtttggtaggagtttttttttatggtttgtaggtttggtagttgggatagggttgaatgggaggtattgttggtagattaggtaagttaggtttttttaggttgaggtgaagaaggggtgggtggtgggtgggagtagtggttggagttatagggttttttgtttgttttagttgaggattgaggttttggtttgaatttttgggttagtttgatagggagggggtattagtagttggtttgggagttagtagttttgggtttttttttgttatgtgggttgtttttttagaggttgttttttagtttttgaaaaatatattttattaataagtagttttgaggttatagtgggggtttaggtttgtatttggtatatagtgggtgttttagaataggtgattttttttttttgtttgtgtttatatattgatataaatagtttaatattggatatataggattttagatatttattttttttatttaattttagattattgggagttatttaaattgatttttttgaattttattattttgtggtatatagtattttattgtgtaaatgtattatattgatttagttatttattttggatattggttatttttaattttttgttatttataaataatattgtaaagaatatttaaatatgtatttttttaagtttgtgtttgttttttaaataatatatttagattatggttaatgtttatgtattttgattttttagatttttgtttttgatggaattgtattttttattgtttgtttttttaattggaaataggggttaggtatagtggtttatgtttgtaattttagtattttgggaggttgaggtgggaggattatttgagtttaggagtttgagattagtttgggtaatatagattttgttttaagagaaaaaaaaaaggttgggtgtggtggtttatgtttgtaattttagtattttgggaggtggaggtgggtggattatgaggttgagattaagattattttggttaatatagtgaaattttatttttattaaaagtataaaaaattagttgggtgtggtggtaggtgtttgtagttttagttatttgggaggttgaggtaggtaaatggtatgaatgtgagagttgagatggtgttattgtattttagtttgggtaatagagtgaaattgttttaaaaaagaaaaaaaatatatatatatatatatatatatatatatatatatatatatatatatatatatatatgtatgtgtg

SEQ ID NO: 3448 - DNA, 2492 bp, Artificial Sequence
  chemically treated genomic DNA (Homo sapiens)
tatatatatatatatatatatatatatatatatatatatatatatatatatatatatatgtatatatttttttttttttttgagatagttttattttgttgtttaggttagagtgtagtggtgttattttggtttttgtgtttatgttatttgtttgttttagttttttaagtagttgggattataggtgtttgttattatatttggttaattttttgtatttttagtagagatagggttttattgtgttagttaggatggttttgattttgattttgtgatttatttgtttttgttttttaaagtgttgggattataggtgtgagttattgtgtttggtttttttttttttttttgagatagagtttgtgttgtttaggttggttttaaatttttgggtttaagtgatttttttattttagttttttaaagtgttgggattataggtatgagttattgtgtttgatttttgtttttaattaaaggaataaatagtagaagatgtaattttattagaagtaggaatttgaaaaattaagatatatgaatattggttatggtttggatgtattatttaaaaaataaatatgagtttgggaagatgtgtatttggatattttttgtaatattgtttgtaaatagtaaaaaattggaggtagttaatgtttaagatgaatggttaagttaatgtgatatatttatataatggaatattatatattatagaataatgagatttggaagagttaatttggataatttttagtaatttgaggttaagtgaaaaaaatgagtgtttagaattttgtgtgtttagtattaaattatttatgttaatgtgtaagtataaatggaaggaaagggttatttgttttgaagtatttattgtgtgttaggtgtgggtttgaatttttattgtgattttagagttatttattaatgggatgtgttttttagagattaggaagtagtttttgggagggtagtttatatggtaggagggagtttaggattgttgatttttgggttagttgttggtgttttttttttgttgggttggtttaaggatttaggttggggttttagtttttggttggggtaggtaggaggttttgtaattttagttgttgtttttgtttgttgtttgttttttttttattttagtttggggaagtttggtttgtttggtttgttgataatgttttttatttagttttgttttagttgttaggtttgtgggttgtggaggggggtttttgttaggtggggatagtttgtttttgtgttgtgtttttaggttggattagtagttttaggtggtatggaggggtgagtttttgggtttgatggtgtaaggggggatttagagtagtttagtggttttaggtaagtttttgttttttttgggttttttagaggttggtgggtaggggttttggggattttttggggttttttaggaagggggttttttaaggtgggttttgagatatgtggtaatgtggttattgttaggaattggttttttggggtttgtttgagagtttagtagtggtttttgtattatgaatgtttgttgttttagtgatttgtttttatgggttttttttttggtttgttttgaggtatagtttttattataggttttggagaagttattaattttaatgtaggggttggagtttgggatttaaaggagattttaaaatagatgatagtttagtgagtagtgagggggaggtttttgggggttggggaatagtttagtgatgggggagaggttatgtttgatataggttgagaatagaggggttagttgggtaggggaggtgatttattattttagtgttttgggaggttaaggtgggataattatttgaggttaggagtttaagattagtttgggtaatatagtgagattttgtttttattagaagtaattaaaaaattagttaggtgtggtggtgtgtgtttgtagttttagttatttaagaggttgaggtgagaggattattttagtttaggaggtgaaggttgtagtaagttatagttattttattgtattttagattttagtttgggtaatagagtaaggtttgtttttatttaaataaataaataaaaaaagatttaaggatttggattggatgttttttttttttttggggggtattattatgtttttgttatttgggagttggtattatattagtttgaggataggttgtttttgagtttattttggattagagttttattatagtttgagaatatgttttgaattggagttatttttatagttagtaagtttttattgagttattgggtagaggtaaagggattaattaggttatttttttgagttttggtttttttttatgtaaaataggattaattataggatttttattgtgtggggggtggggggtagggaggtttagggtgattggtatttttttgggtttaaaggaggaggttttgaggggtttttg

SEQ ID NO: 3449 - DNA, 2354 bp, Artificial Sequence
  chemically treated genomic DNA (Homo sapiens)
aatatttatatttgttaggagttgtagttattgattggtagtgttttatttatttattgaatattggttgagtatttgtaatgtgttaggtatgttgttagttaaggaggtagttattaaatatatagataaataaataaatgtgagatgataatagttatgagtgttttgtagtagatgtgtagggatttgtgagagaatgtagtagggagggttttaatttagggtgtgtggttagggaaggttttgttaaagatgtagtttttaagttgagatgtaaaggaggtagtgaagagttttttttagtagagggaatattatgagtataggttttggggtggatgttttagaatattttagaaatggaaaggaggttagtgagaaaaagggagtttaggagtagaggttggggaaggttgtagggttttaggggtattggaggtaggtagggtaaggattttggattttattttgagtatagggtgatggggtaggagagtttaagtagggagggtgaaatttattttgattggtagttttgtgaaagaggattggttgggtatggagatttaaggatgaggaaaggatattttagagtgttagggtgtgtaaattaaattttatattttaggaagatagaggttagaggaattaggagggttttttggaggaggtggtatttattttgggtttaagagattataggaaaatggaggttagtattttaggtttggggaagagtttgggtaaaggtttggtagtaagagaataaaggtggggtttgatgggttagaggataagtgattttttaaggttataagatattttgatggttgggattttatttttgatggagtaaggtttttgatatttaattgaggtttggtgttaaggattgatattaaggaagtggatttttgtaaatttggtatttgagggtttatttttttaatttttgtgtagttgggaggtgaggtaagaggaagtgtgggttataggttaggtttagagagtttggaggaggagtttttgttagattggagagaagtaggtttgagtttttttaaaggtagtttttggggatttttaggattataggttgagatgagatgtagggtggttggaggaagtgagaggtgaatttagtttgggattggttgggtgagattttttatttgttttttgggattattgtttattatggttgtggtttagtagttgtgggttgagaggtgagtgttggggtgtggttgtttttgggtttttttattgttttttataggttttagggataaaggttagtttttttgtagtttttgattaatatgagaggttggggttgagttagaatttaaatatttagaaatgtaattttttagaattgttttaatgaaattttgagttgtggtttattatttttagatataaatgagaatattgaggttttaagagtgggagtgatttgtttatggttatataatgagtgattggtagtgtttggagaggaatgtaggtgttttgggttttaggttggggttttttgttttatatggtgattagtaatgattttttattttttgtgtaaatagaatttatagaatttggtttgtttttttgttaattagggtttgttttaaatgttattttttttaagaagtttttttgatagtttttattttattgttgtttgattttttgttttattttttttttttgtttggtttttatattataggaataatattatatgtttatttattatttttttttgaatgttggtttttttatgagaagtaagttttatgaggttgtgtttgttttgattgttgttgtattattaggaggtagtttatttttattgagtattaggattaagggtttaataaatgttgttgaatgaatgaataaatgaatgaatgaatgggtggatttttgagatggaaaaggttttagatttttttagtttaattttgttattgtatagattggaaatttgaggtttagggaggataagagatttatttagggttatagagagtgattggtaaggttggggtttggagtatggttttattagtatttagttttgttgtttgggaagtatttttagaatttttttttagtagttaggtttgagttttaagttgtgggggttttgaggatgtaaagtttggtttttgtattttttggattggaatagtaggtgatttttgttatttatgtggaggttatttagggggttattagagataggttaggttggtgtgtgtttatgtggggaatagaaggtttatgttggggtttggggttggaagtagaatttgaagtgtgggttggggtaagggtagtagaag

SEQ ID NO: 3450 - DNA, 2354 bp, Artificial Sequence
  chemically treated genomic DNA (Homo sapiens)
tttttgttgtttttgttttaatttatgttttaggttttatttttagttttaggttttaatatgggttttttgttttttgtgtaggtatatattagtttggtttgtttttggtgattttttgagtggtttttatgtaggtaatagaggttatttgttgttttaatttagggggtgtaggggttaggttttgtgtttttagggtttttgtagtttagagtttagatttggttattgaggaaaaattttgaaaatgttttttaagtgatgaggttagatgttggtgaggttgtgttttaagttttaattttgttagttattttttgtgattttgagtaagttttttattttttttgggttttagatttttaatttgtataatggtaaggttggattagaagaatttaagattttttttgttttaaagatttatttatttatttatttatttatttatttatttagtaatatttattgagtttttggttttggtgtttaatagggatgagttattttttagtgatatagtagtgattaaaatggatatagttttgtggagtttgttttttatgggggagttaatgtttaagaaaaaataataaatgagtatataatattatttttgtaatataagaattaggtagaaaagggaaatagggtaaagggttagatagtaatgaggtaggggttgttaggaaggttttttggaggaggtgatatttgaggtaagttttgattagtggaagaataagttagattttgtgaattttgtttgtgtagaagatggaaagttattgttgattattatgtgaagtaaagggttttagtttgggatttaggatatttgtatttttttttagatattgttggttatttgttgtgtgattgtgggtaagttatttttatttttggagttttagtgtttttatttgtgtttgagggtggtgagttatagtttaaagttttgttaaagtagttttgagaggttgtatttttgagtatttgggttttgatttaattttagttttttatgttgattagggattgtagaaggattggtttttgtttttaaggtttatgaggagtagtgagaaggtttgggggtggttatattttggtatttattttttggtttgtagttgttgggttatagttatggtgggtgatggttttagggagtaggtggagagttttgtttagttagttttaggttgagtttattttttattttttttagttattttgtgttttgttttagtttgtggttttgggagtttttaggagttgtttttggggaggtttaggtttgtttttttttagtttggtagaggttttttttttaggttttttgggtttagtttgtggtttatatttttttttattttattttttagttgtatagaaattgaggaagtggatttttgggtgttaggtttgtaggaatttatttttttgatgttagtttttggtgttaagttttagttgggtattagaagttttgttttattagagatggggttttagttattagggtgttttgtgattttgaggagttatttattttttggtttattaagttttatttttatttttttattgttaagtttttgtttaaatttttttttaggtttagaatgttggtttttatttttttgtgattttttaggtttagagtaaatgttattttttttaggaagtttttttggtttttttggtttttgtttttttagagtgtgaagtttggtttgtgtgttttggtattttgggatattttttttttatttttagatttttatgtttagttaatttttttttatagggttgttaattagagtgagttttattttttttgtttaaatttttttgttttattattttgtgtttaggataaagtttagagtttttgttttgtttgtttttaatgtttttgaggttttgtagttttttttagtttttgtttttgagtttttttttttttattggttttttttttgtttttagaatgttttaagatgtttgttttaaggtttatgtttatggtgttttttttgttggaaaaagttttttattgttttttttgtattttagtttagaagttatatttttagtgaggttttttttgattatatattttaaattaaggttttttttattatatttttttataggtttttgtatgtttattgtagagtatttataattattgttattttatatttgtttgtttatttgtatgtttaatgattgtttttttggttagtagtgtgtttggtatattgtaagtgtttaattaatatttagtgaatgaatgaaatgttgttagttagtgattgtagtttttaataggtatgggtatt

SEQ ID NO: 3451 - DNA, 2282 bp, Artificial Sequence
  chemically treated genomic DNA (Homo sapiens)
tgtagttattgattggtagtgttttatttatttattgaatattggttgagtatttgtaatgtgttaggtatgttgttagttaaggaggtagttattaaatatatagataaataaataaatgtgagatgataatagttatgagtgttttgtagtagatgtgtagggatttgtgagagaatgtagtagggagggttttaatttagggtgtgtggttagggaaggttttgttaaagatgtagtttttaagttgagatgtaaaggaggtagtgaagagttttttttagtagagggaatattatgagtataggttttggggtggatgttttagaatattttagaaatggaaaggaggttagtgagaaaaagggagtttaggagtagaggttggggaaggttgtagggttttaggggtattggaggtaggtagggtaaggattttggattttattttgagtatagggtgatggggtaggagagtttaagtagggagggtgaaatttattttgattggtagttttgtgaaagaggattggttgggtatggagatttaaggatgaggaaaggatattttagagtgttagggtgtgtaaattaaattttatattttaggaagatagaggttagaggaattaggagggttttttggaggaggtggtatttattttgggtttaagagattataggaaaatggaggttagtattttaggtttggggaagagtttgggtaaaggtttggtagtaagagaataaaggtggggtttgatgggttagaggataagtgattttttaaggttataagatattttgatggttgggattttatttttgatggagtaaggtttttgatatttaattgaggtttggtgttaaggattgatattaaggaagtggatttttgtaaatttggtatttgagggtttatttttttaatttttgtgtagttgggaggtgaggtaagaggaagtgtgggttataggttaggtttagagagtttggaggaggagtttttgttagattggagagaagtaggtttgagtttttttaaaggtagtttttggggatttttaggattataggttgagatgagatgtagggtggttggaggaagtgagaggtgaatttagtttgggattggttgggtgagattttttatttgttttttgggattattgtttattatggttgtggtttagtagttgtgggttgagaggtgagtgttggggtgtggttgtttttgggtttttttattgttttttataggttttagggataaaggttagtttttttgtagtttttgattaatatgagaggttggggttgagttagaatttaaatatttagaaatgtaattttttagaattgttttaatgaaattttgagttgtggtttattatttttagatataaatgagaatattgaggttttaagagtgggagtgatttgtttatggttatataatgagtgattggtagtgtttggagaggaatgtaggtgttttgggttttaggttggggttttttgttttatatggtgattagtaatgattttttattttttgtgtaaatagaatttatagaatttggtttgtttttttgttaattagggtttgttttaaatgttattttttttaagaagtttttttgatagtttttattttattgttgtttgattttttgttttattttttttttttgtttggtttttatattataggaataatattatatgtttatttattatttttttttgaatgttggtttttttatgagaagtaagttttatgaggttgtgtttgttttgattgttgttgtattattaggaggtagtttatttttattgagtattaggattaagggtttaataaatgttgttgaatgaatgaataaatgaatgaatgaatgggtggatttttgagatggaaaaggttttagatttttttagtttaattttgttattgtatagattggaaatttgaggtttagggaggataagagatttatttagggttatagagagtgattggtaaggttggggtttggagtatggttttattagtatttagttttgttgtttgggaagtatttttagaatttttttttagtagttaggtttgagttttaagttgtgggggttttgaggatgtaaagtttggtttttgtattttttggattggaatagtaggtgatttttgttatttatgtggaggttatttagggggttattagagataggttaggttggtgtgtgtttatgtggggaatagaaggtttatgttggggttt

SEQ ID NO: 3452 - DNA, 2282 bp, Artificial Sequence
  chemically treated genomic DNA (Homo sapiens)
aggttttaatatgggttttttgttttttgtgtaggtatatattagtttggtttgtttttggtgattttttgagtggtttttatgtaggtaatagaggttatttgttgttttaatttagggggtgtaggggttaggttttgtgtttttagggtttttgtagtttagagtttagatttggttattgaggaaaaattttgaaaatgttttttaagtgatgaggttagatgttggtgaggttgtgttttaagttttaattttgttagttattttttgtgattttgagtaagttttttattttttttgggttttagatttttaatttgtataatggtaaggttggattagaagaatttaagattttttttgttttaaagatttatttatttatttatttatttatttatttatttagtaatatttattgagtttttggttttggtgtttaatagggatgagttattttttagtgatatagtagtgattaaaatggatatagttttgtggagtttgttttttatgggggagttaatgtttaagaaaaaataataaatgagtatataatattatttttgtaatataagaattaggtagaaaagggaaatagggtaaagggttagatagtaatgaggtaggggttgttaggaaggttttttggaggaggtgatatttgaggtaagttttgattagtggaagaataagttagattttgtgaattttgtttgtgtagaagatggaaagttattgttgattattatgtgaagtaaagggttttagtttgggatttaggatatttgtatttttttttagatattgttggttatttgttgtgtgattgtgggtaagttatttttatttttggagttttagtgtttttatttgtgtttgagggtggtgagttatagtttaaagttttgttaaagtagttttgagaggttgtatttttgagtatttgggttttgatttaattttagttttttatgttgattagggattgtagaaggattggtttttgtttttaaggtttatgaggagtagtgagaaggtttgggggtggttatattttggtatttattttttggtttgtagttgttgggttatagttatggtgggtgatggttttagggagtaggtggagagttttgtttagttagttttaggttgagtttattttttattttttttagttattttgtgttttgttttagtttgtggttttgggagtttttaggagttgtttttggggaggtttaggtttgtttttttttagtttggtagaggttttttttttaggttttttgggtttagtttgtggtttatatttttttttattttattttttagttgtatagaaattgaggaagtggatttttgggtgttaggtttgtaggaatttatttttttgatgttagtttttggtgttaagttttagttgggtattagaagttttgttttattagagatggggttttagttattagggtgttttgtgattttgaggagttatttattttttggtttattaagttttatttttatttttttattgttaagtttttgtttaaatttttttttaggtttagaatgttggtttttatttttttgtgattttttaggtttagagtaaatgttattttttttaggaagtttttttggtttttttggtttttgtttttttagagtgtgaagtttggtttgtgtgttttggtattttgggatattttttttttatttttagatttttatgtttagttaatttttttttatagggttgttaattagagtgagttttattttttttgtttaaatttttttgttttattattttgtgtttaggataaagtttagagtttttgttttgtttgtttttaatgtttttgaggttttgtagttttttttagtttttgtttttgagtttttttttttttattggttttttttttgtttttagaatgttttaagatgtttgttttaaggtttatgtttatggtgttttttttgttggaaaaagttttttattgttttttttgtattttagtttagaagttatatttttagtgaggttttttttgattatatattttaaattaaggttttttttattatatttttttataggtttttgtatgtttattgtagagtatttataattattgttattttatatttgtttgtttatttgtatgtttaatgattgtttttttggttagtagtgtgtttggtatattgtaagtgtttaattaatatttagtgaatgaatgaaatgttgttagttagtgattgta

SEQ ID NO: 3453 - DNA, 2398 bp, Artificial Sequence
  chemically treated genomic DNA (Homo sapiens)
tagagattaaatggaggtgtgttaagtatagtgttgggtatggagggggagtttaggagagttgttatgtgagttggggaagttaatgatatgatatatttggttttttttagttttgatagtttgtgattttgtgattttgagattttagaattatggtatgagattttgagattaatgtttttgtttttgtagttgattgggaggttataggaaggttttttttttgtttttttgggagtttttattttttgtttttttagttttagttttttaagtttattttgggtagaggatgggtttttaggattttattttttgggatattatttgggttttagtttttttatttgtttatggggtgagggtttttttttttgttgttaggttggttattattttgttgttttttttttttgtttagtttttaggtgtttttagggtatttttaattagggtttttataaggtatttatttttagattgtttgtgggtttaggtttttttttaggtttttggttatggttgtttatagagttttttttatttggtttttggttttgattttttaattagagtttggtatgttattttttatttttaggatatattttgggggggtaggggtaaggataggggggagaagttttttagggtgaggaagagaagaggggagtaagggatatagaagttaatagaaatagaggggaaagggggttgggaggaggtggagaaagagagagagagagaaagagggagggggagagagagagagggagagggagaggagattgtgagtaggaggaaaggtagaatgagggggagtgatgagagatgtgtgatagggagaagatgagaaggaaagagaggagaggagatatgggtgagagggagagatgtagagagaggtaggagggaggaaggagaatgagggggtggtagggagagtgatagagagggattgtgttatagatggtgatatggagtttgtgaaggagggagtaagtagggaggggttgagggttggagagtaggtgtggggggtgggggtggggtgtaggttaagggaggaggtttggagagggagtaggaggggtgtagattttgttattggggagattttagttatttatgtttgttggttttggtttttgtagggagttggagagaagaatgtgtttagtgtttaggggagttgaggttgttagttagtagttagagtagtttgtgaggttattgtggtataggttttttggggtagtagttgtgttttaaggtaaggttgggtgtggggttggttagtttgggagtttatagtttagttttgtagttgggtatattggttgtagtatggattattggggaggttgggtgggggttattagttttgggattggttatatttggagagttttaggtagggtgaggagtggaaggatagaatagagaattaatattttaggttttgagggtaaaattattgtgtagtgagaaaatagatttttattattttgtaattgataaaatttaaaatagaataataataattgaggttagtattttgtaatgtaggtttatttatgagaagaatagagttttttttatagatattattttttgtttaattggagtttagagttagtgttttattaaattgattgtaaatgtttatttgtaaaaattatttttagtttttaggttgtataaaaataggtagtgggtgggatttgttttgtgggttatatttattgatttttggtttaagagattttgttgtatagttttgagtataggtttagatgttttgggatgttgtgtttttgtttgtgttgatttttgttttagtataggagtgataaggaaaggaatagttagagatggaagggaaaaggatatatgttttggttgagtatttattatgtgttaggttgtatttaggttgttttttaaattgggttattttttgggattagggttggattttttttgttattaggtatttggtattgtagagaattggaagttgaatgtatttagaggtgttattatgtatgtggtagtatatagtaggatatatttatttttagttggagttggtttggttttttaatgttgtttgtttttttgttttgtgtttgggataaggtttttgttttaggttttagttttttattgtttttgtttgtataagtttatgaggtgtgggtgggtttttgggagtgtgtttttagggttaagggtgggttttttatggtattgattatttatttttatttatggttttttattgtttttagaataaagtttttttgttgtagtttatttggtattgtatttttgatttttgttgtttgtgtgggtttttttttttgttgattttatttgtttttttgtgttt

SEQ ID NO: 3454 - DNA, 2398 bp, Artificial Sequence
  chemically treated genomic DNA (Homo sapiens)
gggtatagaggagtgagtgaaattagtagaggaggaggtttgtgtaggtggtaggaattaaggatgtagtgttaggtgggttgtggtgagagagttttattttgagggtagtgagaagttgtgggtaggggtgggtggttagtgttatggaaaatttatttttgattttgaggatatgtttttaggagtttatttatattttatgaatttgtatggataaggataatgggaggttgagatttggagtaagggttttgttttgggtataaggtaaagggatgggtagtgttaagagattaggttggttttggttggaagtgggtgtgttttattgtgtgttgttgtatgtatggtggtatttttggatgtatttaatttttagttttttgtagtgttaggtatttagtgataaaggaggtttagttttggttttagggaatggtttagtttggaaagtagtttaggtatagtttggtatatagtaggtgtttagttaagatgtgtgttttttttttttttgtttttgattgtttttttttttattatttttgtgttgaggtaggaattagtataggtaggggtatggtattttaagatatttgggtttgtgtttaggattgtatggtagagttttttagattaaagattagtaaatatggtttatggggtaaattttatttattgtttgtttttgtatagtttaggagttgagaatggtttttatggatgaatatttgtaattggtttgatgaaatattaattttaaattttaattaagtaaaaggtgatgtttgtaaaaagaattttattttttttatgagtggatttatattataaaatattggttttaattattattattttattttgagttttgttagttataaaatagtaaaaatttgtttttttattgtataatgattttgtttttaaagtttaaaatattggttttttgttttgtttttttattttttattttgtttggggttttttagatgtaattaattttaggattaatgatttttatttggtttttttagtggtttgtgttgtggttggtgtgtttgattgtagggttggattgtggatttttgggttggttagttttatatttagttttgttttgggatatagttgttgttttgggggatttgtgttgtagtggttttatgagttgttttggttattggttggtagttttggtttttttgagtattgagtatatttttttttttaattttttgtaggagttaaggttagtgggtgtgggtggttgaaatttttttggtaatagggtttgtgttttttttgttttttttttgggtttttttttttaatttgtattttgtttttattttttatatttgttttttggtttttagtttttttttgtttatttttttttttatgggttttatgttattatttgtggtatagtttttttttgttattttttttgttatttttttattttttttttttttttttgtttttttttgtattttttttttttatttgtgttttttttttttttttttttttttgttttttttttgttatgtattttttattatttttttttattttgtttttttttttatttatggttttttttttttttttttttttttttttttttttttttttttttttttttttttttttttttatttttttttgatttttttttttttttatttttattggtttttgtgttttttgtttttttttttttttttttattttgggaagttttttttttttatttttgtttttgtttttttaggatgtgttttggagatggggggtgatgtattaggttttggttgggaagttagggttggagattagatgggagaggttttgtggatagttgtggttgagggtttgggagggaatttgagtttgtaagtggtttagaagtgggtgttttgtggggattttagttaggagtgttttgggggtatttggggattgggtagggagaggggatagtagaatgataattagtttggtggtaaggagggaagtttttattttatgggtaggtaaggaggttggggtttggatgatgttttgaagggtggggttttggaagtttattttttgtttaggatgaatttgggaggttggggttggggaggtagagggtggggatttttagggaggtaggagggaggtttttttgtgattttttggttggttgtaggggtaggggtgttagttttagaattttgtgttatgattttaggattttggaattatagaattgtaggttgttagggttggagggagttagatgtattatgttgttggtttttttagtttatgtggtagtttttttgagttttttttttatatttggtattgtgtttggtatgtttttgtttaatttttg

SEQ ID NO: 3455 - DNA, 2479 bp, Artificial Sequence
  chemically treated genomic DNA (Homo sapiens)
tggaagataagtggatttattttttagggttgtttgtagagattaaatggaggtgtgttaagtatagtgttgggtatggagggggagtttaggagagttgttatgtgagttggggaagttaatgatatgatatatttggttttttttagttttgatagtttgtgattttgtgattttgagattttagaattatggtatgagattttgagattaatgtttttgtttttgtagttgattgggaggttataggaaggttttttttttgtttttttgggagtttttattttttgtttttttagttttagttttttaagtttattttgggtagaggatgggtttttaggattttattttttgggatattatttgggttttagtttttttatttgtttatggggtgagggtttttttttttgttgttaggttggttattattttgttgttttttttttttgtttagtttttaggtgtttttagggtatttttaattagggtttttataaggtatttatttttagattgtttgtgggtttaggtttttttttaggtttttggttatggttgtttatagagttttttttatttggtttttggttttgattttttaattagagtttggtatgttattttttatttttaggatatattttgggggggtaggggtaaggataggggggagaagttttttagggtgaggaagagaagaggggagtaagggatatagaagttaatagaaatagaggggaaagggggttgggaggaggtggagaaagagagagagagagaaagagggagggggagagagagagagggagagggagaggagattgtgagtaggaggaaaggtagaatgagggggagtgatgagagatgtgtgatagggagaagatgagaaggaaagagaggagaggagatatgggtgagagggagagatgtagagagaggtaggagggaggaaggagaatgagggggtggtagggagagtgatagagagggattgtgttatagatggtgatatggagtttgtgaaggagggagtaagtagggaggggttgagggttggagagtaggtgtggggggtgggggtggggtgtaggttaagggaggaggtttggagagggagtaggaggggtgtagattttgttattggggagattttagttatttatgtttgttggttttggtttttgtagggagttggagagaagaatgtgtttagtgtttaggggagttgaggttgttagttagtagttagagtagtttgtgaggttattgtggtataggttttttggggtagtagttgtgttttaaggtaaggttgggtgtggggttggttagtttgggagtttatagtttagttttgtagttgggtatattggttgtagtatggattattggggaggttgggtgggggttattagttttgggattggttatatttggagagttttaggtagggtgaggagtggaaggatagaatagagaattaatattttaggttttgagggtaaaattattgtgtagtgagaaaatagatttttattattttgtaattgataaaatttaaaatagaataataataattgaggttagtattttgtaatgtaggtttatttatgagaagaatagagttttttttatagatattattttttgtttaattggagtttagagttagtgttttattaaattgattgtaaatgtttatttgtaaaaattatttttagtttttaggttgtataaaaataggtagtgggtgggatttgttttgtgggttatatttattgatttttggtttaagagattttgttgtatagttttgagtataggtttagatgttttgggatgttgtgtttttgtttgtgttgatttttgttttagtataggagtgataaggaaaggaatagttagagatggaagggaaaaggatatatgttttggttgagtatttattatgtgttaggttgtatttaggttgttttttaaattgggttattttttgggattagggttggattttttttgttattaggtatttggtattgtagagaattggaagttgaatgtatttagaggtgttattatgtatgtggtagtatatagtaggatatatttatttttagttggagttggtttggttttttaatgttgtttgtttttttgttttgtgtttgggataaggtttttgttttaggttttagttttttattgtttttgtttgtataagtttatgaggtgtgggtgggtttttgggagtgtgtttttagggttaagggtgggttttttatggtattgattatttatttttatttatggttttttattgtttttagaataaagtttttttgttgtagtttatttggtattgtatttttgatttttgttgtttgtgtgggtttttttttttgttgattttatttgtttttttgtgttttaggtgtatttagttttatgtatttatttatttatttttgtaggt

SEQ ID NO: 3456 - DNA, 2479 bp, Artificial Sequence
  chemically treated genomic DNA (Homo sapiens)
atttgtaggaataagtgaatgaatatatgaggttgggtatgtttggggtatagaggagtgagtgaaattagtagaggaggaggtttgtgtaggtggtaggaattaaggatgtagtgttaggtgggttgtggtgagagagttttattttgagggtagtgagaagttgtgggtaggggtgggtggttagtgttatggaaaatttatttttgattttgaggatatgtttttaggagtttatttatattttatgaatttgtatggataaggataatgggaggttgagatttggagtaagggttttgttttgggtataaggtaaagggatgggtagtgttaagagattaggttggttttggttggaagtgggtgtgttttattgtgtgttgttgtatgtatggtggtatttttggatgtatttaatttttagttttttgtagtgttaggtatttagtgataaaggaggtttagttttggttttagggaatggtttagtttggaaagtagtttaggtatagtttggtatatagtaggtgtttagttaagatgtgtgttttttttttttttgtttttgattgtttttttttttattatttttgtgttgaggtaggaattagtataggtaggggtatggtattttaagatatttgggtttgtgtttaggattgtatggtagagttttttagattaaagattagtaaatatggtttatggggtaaattttatttattgtttgtttttgtatagtttaggagttgagaatggtttttatggatgaatatttgtaattggtttgatgaaatattaattttaaattttaattaagtaaaaggtgatgtttgtaaaaagaattttattttttttatgagtggatttatattataaaatattggttttaattattattattttattttgagttttgttagttataaaatagtaaaaatttgtttttttattgtataatgattttgtttttaaagtttaaaatattggttttttgttttgtttttttattttttattttgtttggggttttttagatgtaattaattttaggattaatgatttttatttggtttttttagtggtttgtgttgtggttggtgtgtttgattgtagggttggattgtggatttttgggttggttagttttatatttagttttgttttgggatatagttgttgttttgggggatttgtgttgtagtggttttatgagttgttttggttattggttggtagttttggtttttttgagtattgagtatatttttttttttaattttttgtaggagttaaggttagtgggtgtgggtggttgaaatttttttggtaatagggtttgtgttttttttgttttttttttgggtttttttttttaatttgtattttgtttttattttttatatttgttttttggtttttagtttttttttgtttatttttttttttatgggttttatgttattatttgtggtatagtttttttttgttattttttttgttatttttttattttttttttttttttttgtttttttttgtattttttttttttatttgtgttttttttttttttttttttttttgttttttttttgttatgtattttttattatttttttttattttgtttttttttttatttatggttttttttttttttttttttttttttttttttttttttttttttttttttttttttttttttatttttttttgatttttttttttttttatttttattggtttttgtgttttttgtttttttttttttttttttattttgggaagttttttttttttatttttgtttttgtttttttaggatgtgttttggagatggggggtgatgtattaggttttggttgggaagttagggttggagattagatgggagaggttttgtggatagttgtggttgagggtttgggagggaatttgagtttgtaagtggtttagaagtgggtgttttgtggggattttagttaggagtgttttgggggtatttggggattgggtagggagaggggatagtagaatgataattagtttggtggtaaggagggaagtttttattttatgggtaggtaaggaggttggggtttggatgatgttttgaagggtggggttttggaagtttattttttgtttaggatgaatttgggaggttggggttggggaggtagagggtggggatttttagggaggtaggagggaggtttttttgtgattttttggttggttgtaggggtaggggtgttagttttagaattttgtgttatgattttaggattttggaattatagaattgtaggttgttagggttggagggagttagatgtattatgttgttggtttttttagtttatgtggtagtttttttgagttttttttttatatttggtattgtgtttggtatgtttttgtttaatttttgtaaataattttgggaggtgggtttgtttgtttttta

SEQ ID NO: 3457 - DNA, 2500 bp, Artificial Sequence
  chemically treated genomic DNA (Homo sapiens)
tttttgggagtttttttggtgtagttattgggatggaatgtatataggtttttggtagaggtttagattagtaagttgggagggtggggagtgttttagtttttgtgtgggagtgaatgtgggtggggtgtaggattaaggatgtggtttagtggggggtttattaggggttttttagtttttttatttggagaggggtggtgttagtagggttggttttaggattgggattaggatataggttttagagtttttttattttttataaaggaaggtaagttgtaatttttgtgggaagggggtttaagggggtttagttatttgggggatttagtattattagatttgtttattttttttggttagttttagttatttgggggtttagtatttttagatttgtttgttttttttgtttattatttttattaaagtttataggtgggtttgttttaggattttttttgaaatagtttgtatttttggggttatttatggatgggattttatgggtatttttgaatttaagtgggagttggaggagggatatagggaggtttatttattgtttgttttaaatttgatattattttttattttttgggttatttttagttgtatataatttgttggttgggtgggtttaggtgtatgtggtttttatggtatagttatatttgatttttgtgtgtgttttttgtagtgatgtattggttttgtggttggtttgtattggggatgagatggatgtgagttttagggttttgtgtttggtttagttttttgaggtggttatgtataggtagttggtttatgttttatgtttttatatttggggaggggttttgggtggtgggtggaggttttgaatatagtatagggttgggttttgaggaagttttgtgggggatgtgttttgatattggggttatattgaaatttttggttgttttttgtattttttttgggagtttttagtttttggtatttgttttttgttatttgtttttggtatttttgggtaataaagtagagtttagggttttttttttttttgttgtttttattgagtttagatggtatatttttattgtggttttaagagggggtgttatgtgagtttggattttagattttgggggttgggttttttagtgagtttttggtgggggaatagagtgggtagtggtttgtgagggttttgtagaatgggggtttattttttatgtggttagttttggaagatagggttaaatatttggtgggttggtgggtggttggttggtggaggaagtaggaagttggaatgaatttgattataaatagtttatattatgtggtttttgtaggtggaggtgtttatggaaagggttttgggtggttgtggggtgggagggtataggtttttgttttttatagttgtgatggtgttatttaagtataggttgtttttatttgtttttgtagtaatggttttgtttttttattttttttgtttatagtttgggtttggtttttatttatgattagattgaggatattagggatgtttttagaagttttatggatggttttattatatttaaggagaatataatgaggttttggagatttttgaattttgggttttgggtaagagttttgagatttttgattttgatttgtgttgtggttagtgggggttgttagagttgttttttggggtgttatagtttttattattttgtattattatttgtgttatttgtgtttatatttgtttgattttatgggtttttgggtttgagatgtttggttttgagtgtataaattagtgtatggttttgggtttttttttggtttgagagtttttatttggtaggtaggatttttgttttttggttagggtaggggtttttttgagtagtttttttggtagtttggttttatggtgtttatttggtattgtttattataagggtagttgattgtttttatttgtgtttattgggtgtttttgtttgtgttttgtagattggtaggtttaggttatgttggtttttttggttatgtttttagggttatttttttttttttttgaattttttttttttttggtttttttgagtttttttttagtttttatttttttgggtttttttttggtattttgttgttatttgtttggttttattgttggggtttgttttgagtttgatttttttgttttgtttttataggtgttttgtgaataggtgttgttggtgttgttgttgttgttggtgttgttgttgttgttgtttagtgggggtttgtatttgttgtttaagtgaggttttggtggtttagggtggggttggttttatttttatgattattgttttggaggtggtggtttgttgttgttatttttttaattgtttttttatgatgtttttttatatttaaattttgagatagtgttggaatattgttgaggttttatatttaggttttttgttttttttttattttagttttt

SEQ ID NO: 3458 - DNA, 2500 bp, Artificial Sequence
  chemically treated genomic DNA (Homo sapiens)
gaaaattggaataaaaaaaaaataaaaaatttgagtataaaattttagtagtgttttagtattattttggggtttaaatataaaaaggtattatgagaaaatagttaaaaagataatagtagtaggttgttatttttagggtagtggttatgggggtggggttagttttgttttgagttgttggggttttatttgagtagtaggtgtaggtttttgttgagtagtggtagtagtagtgttagtagtagtagtagtgttagtagtatttgtttgtaggatatttgtgggagtaaagtagaggagttaggtttggggtaggttttggtaatggggttagatgggtgatagtggagtgttaaggggaagtttaggagggtggggattgggaaggagtttgaggggattagagaaggaaggagtttaggagagggggaaagtggttttgaggatgtggttagagaggttagtgtggtttgggtttgttagtttgtgggatataggtaaagatatttggtgggtataggtgagggtagttagttgtttttgtggtgggtggtgttgagtggatattatgggattaggttattaggaaggttgtttagggaggtttttgttttggttaggagatgggagttttgtttgttaggtgaaggtttttggattagagggagatttaggattatgtattggtttgtgtatttagaattaggtattttaaatttaaaagtttatgggattaggtagatgtggatataggtgatatagatgatgatatggagtggtggggattgtggtgttttaaggagtggttttgatagtttttattggttgtagtgtaagttagggttagggattttaaggtttttatttaggatttggggtttggggatttttagaattttattatgttttttttaagtgtggtgaaattgtttatgaaatttttaagaatatttttgatgtttttagtttggttgtagatgaaagttagatttaggttatagataaagaggatggggggataaagttattattgtaggagtaggtaggggtagtttgtatttagatgatattattatagttgtggggagtaggggtttgtgtttttttattttatagttatttggggttttttttgtgggtgtttttatttgtaggggttgtgtggtatggattgtttgtggttaaatttattttaattttttgttttttttgttagttagttgtttgttagtttattgggtgtttggttttgttttttagagttggttatgtggaaaataaatttttattttatagggtttttataagttattgtttattttatttttttattggagatttgttgagaggtttagtttttaggatttaggatttgagtttatgtagtatttttttttaagattatggtggaaatgtattatttgggtttaatgaggatggtgagagagaaaagggttttgggttttgttttgttgtttaggaatgttagggataggtggtagggggtgagtgttaggagttgggggtttttaggagaggtgtgggaagtagttaagggttttagtatagttttagtgttaaggtatattttttatagagtttttttagggtttagttttgtgttgtgtttagggtttttatttattgtttagggtttttttttaggtgtagaggtatagggtataggttggttatttgtgtatggttattttggagagttgggttaggtgtggggttttgaggtttatgtttattttgtttttgatgtaggttagttgtagggttaatgtgttattgtagggagtatatataggagttgggtgtggttgtgttgtggaggttatatgtatttggatttatttagttaatggattgtgtgtagttgggagtggtttagaggataagagatggtgttagatttggggtaggtagtgagtgggtttttttgtattttttttttggtttttatttggatttagagatatttatgaggttttatttgtgggtggttttagaggtgtaagttattttaaaaagaattttggggtaggtttatttgtgggttttggtggaaatggtggataaggggaataggtaggtttgggggtgttgagtttttggatggttgaggttgattaaggggaatggataggtttggtggtgttgagttttttggatggttgagtttttttgagttttttttttataggggttgtagtttatttttttttgtgggaggtgagggggttttaagatttgtgttttggttttaattttgaaattagttttgttggtattatttttttttaaatggggggattaagaagtttttagtaggttttttattaaattatatttttgattttatattttatttgtatttatttttatataaagattaagatattttttatttttttagtttgttggtttgggtttttattagggatttgtgtgtattttattttagtgattatattgggggaatttttaggga

SEQ ID NO: 3459 - DNA, 2467 bp, Artificial Sequence
  chemically treated genomic DNA (Homo sapiens)
ttttggaggaggtggggtttggttttggttttggattgttgagattggttatgttgtgttgtttggatgttgggtttttttatttatagttttgtgatttttatgagtttgattttttttgtgttttagtttttttatttataaaatggagataatgtttttgtgtgttgagtttgagtgtggttgtgttgttatattattgttgttgttatgttgttaatgatggtatagtttttatggaaggggggttaaggaaggtatggggatttttttgtaggatatggggtgggtattagttttaagttatgtatataatttattttgaggttaggatttgggttttttttgtgtttattgggggttttagttgttgtttttatttttttaggttttagttttttataatgggtgtgtttttttgtttgagagggaggttttagttaagttttagtttttattgtaaaaagttatatagtaaatatttaatggattttaaatttataaaaattattttatagagttttatgaggtagggaatgttattgtatttattttgtagatgaggaaatttggggtattgatattttttagagttaatatgtaaattaggtatttggtttgagtgatagattggtgtaggtggttagtagtttaatttgtattgagtgtttattgggtttttatagtgattttgaattgtgtttttgtttatagtgatttggttggtttgggtatggtagatttagtggtgggtattgtgggtttggtggttaagagtgtgtggttattttgttttagtgaggtttatgtggaggttatgaaggaggatttggttgagtggtttaatgttttgtatggtttgggttttttgggtggtggtgatggttttttgatagggttggttatgggtatgattttgtgttaatatgttaatgttgtgattgaggttgtttgtgtattggtagttgtttgtttggtttgaggtgtggttttttaggtgtatagtgtagtgtttggtttttttatggtgtgtgataatgtggttatttttattggttggtgttgtgtggagttgggtgtgttggaggtgtttatgtttgagattgaggatttggtgttgtgtaagaatgagaagagtgtggtgttgtgtttgttggaggtggtgtggtgtggggtatgtttgggtttgttggttttatgttttgtgtagtttgagtaggagattgagtgggagttgtgtgttgtatttttagtttttaatgtttttgttgttggggaggatattattgaaattgtttttgtattagggatttttgtttgtggtttttgtatgatatttagtgatttgtgtaattttgatgagttggtgagttttttagtattaggtgttagggatttgatagtatagttagtgtttgtaatttgtttttgaattttttagggtttattttgttatttgtagaatagtttgttttataaaaagagtgtatatgttgagtattaaattgaggaatgtatatttgattttaaggaaatgggtagtttatagagagggaggtgttggggagatgatgtagtttagttgggtttgggataggatgtgggtttttggtatgatttttttttattttgtgtgttaattgtgttttaattgagtttgtgtatttttttttttggggggttgtatgattggggtgttttttttgtgttttttttgtagttagttttaggtagatgtatttataattttatggaggtttgaggttgagtgggtgttgtgatgtttggttgagatgaggtatggaaaaatttgggtaaggtgtttggtatatagtaggtgttttagggggttttgtaggtttttttattttttaggtatttttgggaagtttagttgggttgttgttgttgttgggagtagggattttgtttggaattataggatttgttttattttaagtataggtgttgttgggttttgtttttaagtttttttttttttaggatttgggtggtttttgttatttttgagggttggattaagagttttttttttattagaaggttaggattataatgtgtttgtttgggaggtagatagtggatggtagtgggtagagtttggggttttattttttgttttggattagggttatttaaggttttatttgtttattttttttggtggtattattgttgttgtgggtggggaggtgggtagggttgtttatatagttagtttggtagtgttttggttttggtggggggttgtatgtggtgtgtgtttatttggttagtggtttgtgtgtgtatgtgtttgatgtgtttgtggtatgtttttatattagtgtttatttaggggtatggggttttttgtatttgtgttttgtagtttgtttggtttttttgtgggttttagtttttttgtttgagaagtgggtgaagtgggagtgaggatgggttttgg

SEQ ID NO: 3460 - DNA, 2467 bp, Artificial Sequence
  chemically treated genomic DNA (Homo sapiens)
ttagagtttgtttttatttttgttttatttattttttagataagaaggttggggtttataggaaggttaggtaggttataggatataggtgtagggggttttatgtttttgggtgggtattgatgtggaggtgtattatagatatattggatatatgtatatatagattattggttgggtgagtatgtattatatatagttttttattagagttagagtgttgttaagttggttatgtgggtagttttgtttgtttttttgtttatagtggtagtggtgttgttagaggaaataagtaggtggggttttgagtgattttggtttaggatagggggtggggttttaggttttgtttattgttatttgttatttgttttttaggtaggtatattgtagttttgattttttgataagaaggaaatttttggtttagtttttaggggtggtaggggttatttagattttgggagaggagagatttgggggtagggtttagtaatgtttatgtttagagtagaatgaattttgtaattttaaataggatttttgtttttagtaatagtagtaatttagttaggttttttaggggtgtttggggagtggggagatttgtagagttttttggggtatttattgtgtgttaggtattttgtttaggtttttttatgttttgttttaattgagtattatagtatttgtttaattttgagtttttatgaggttgtgggtatatttgtttaagattgattgtagggagggtatagaggaggtgttttgattatgtggttttttagaagaaggaatgtataagtttagttgaggtatagttagtatataaagtgagggaagattgtgttaggagtttgtattttgttttaggtttggttgggttgtgttatttttttggtatttttttttttgtgggttatttatttttttggggttaggtatatattttttggtttggtgtttaatatgtgtattttttttgtggggtagattgttttgtagatagtagggtggattttgggaggtttagggatagattgtaggtattggttgtgttgttgggtttttggtatttggtgttgggggatttattagtttgttgaggttgtgtaggttgttgggtgttatgtgggggttgtgggtaggagtttttggtgtgggggtggttttagtggtgttttttttagtggtaggggtgttgggggttgggggtgtagtatgtagtttttgtttaattttttgtttaaattgtatgaggtgtggggttagtaggtttaggtgtgttttatgttgtgttatttttagtaggtatagtattatgttttttttgtttttgtgtagtattaggtttttagttttaaatatgagtatttttggtatatttagttttatgtggtattagttgatgaaggtggttatgttgttgtgtgttatgaaggagttaggtattatattgtgtgtttggaaggttatattttgggttgggtgggtggttgttaatgtatgggtagttttggttatggtgttggtatgttggtatagggttgtgtttgtggttagttttgttaggaagttattgttattatttgggagatttaggttgtataaggtattgagttatttggttaggtttttttttatggtttttatgtaggttttattggagtgaaatggttgtatgtttttggttgttgagtttgtgatgtttgttattgggtttgttatgtttggattggttgagttattgtgggtaggaatatagtttaggattgttgtggggatttagtaagtgtttagtataaattaagttgttggttatttgtattagtttgttatttaggttaaatgtttggtttatatgttggttttgggaaatgttggtgttttaagtttttttatttgtgaaatgggtatagtaatattttttgttttataggattttatgggataatttttataaatttagggtttattaagtgtttgttgtgtggttttttgtggtggaaattggggtttggttggggttttttttttaggtagggaggtgtgtttattgtgaagggttgggatttagagaagtgaagataatggttaaggtttttagtggatatgaaaggaatttaggttttgattttagagtgggttatgtgtatggtttagggttggtgtttattttatgttttgtgggaaggtttttgtgttttttttggttttttttttataagggttgtgttgttattaatgatatagtagtagtaatagtgtaatagtatgattgtgtttgggtttagtgtgtggaggtattatttttattttatagatgaggaaattgaggtgtagaaagggttgagtttgtgaaggttgtagagttgtgggtggaggagtttggtgtttaggtggtgtagtgtggttggttttggtgatttggggttagggttaggttttgttttttttaaga

SEQ ID NO: 3461 - DNA, 2385 bp, Artificial Sequence
  chemically treated genomic DNA (Homo sapiens)
tgtggttgtgtgggtattatatatgtgataatttattaagttgtgtttatttatggtttgtttttattgtaggtaagttatatttttataagattgtttggaaagagatattatttattaggtaagaaaaattattaaatggttagaaaaatatttaatgaatgatatgttagatttgttagattttttattttgaaaattattgaggaaagttaaagaatttggttaaatgaattagatttggattatggttggaaaattttatttaaaaaaaaagttggttaggtgtggtggtttatgtttgtaattttagtatttagggaggttgaggtgggtggattatttgaggttaggagtttgagattagtttgattaatatgatgaaattttatttttattaaaaatataaaaaaattagttgggtgtggtggtgtgtgtttgtagttttagttatttagggggttgaggtaggagaattgtttgaatttaggaggtggatgttgtagtgagttgagattgtgttattgtattttagtttgggagatagaatgggattttgttttaaaaaaaaaaaaaatttgttgggtgtggtggtttatgtttgtaattttaatattttgggaggttaaggtgtgtggattgtttgagtttaggagtttttaattagtttggttaatatggtgaaattttgtttttattaaaatataaaatattaattgggtatggtggtgggtgtttgtggttttagttatttaggaggttgaggtaggagaattgtttgaatttgggatatggaggttgtagtgagttaagattgagttattgtattttagtttgggtaatagaatgagattttgttttaaaaaaaaaaaaaaaaaaggatgtttgttttttttaagatttgtagatttaaggtgattttagttaaagttttagtagtttgttgtttttaagttaataagttttaagggttagtatgtattttttgttttgttggttggattgggtttggtgattttgttgttgtaggttttttgtagtataggttttgagagtaatggtgtggttgtttgattgttatggaataaatatatattaggtgagtattagtttgaggttgaggggtatatggagttggtttgagtttagttaggagtttggaagtaagtttagttttttttggttgtgtttttgagggtttgattgtgaaatgtttgtatgtatgggttggagttgtttgttatgtgtggtaattgtggtaggaatttgatttatgtatggatgttagtatttataagtgagaggtgttttagatatgtggtgttggttttggaagtagttggtgggtggtgaggaaatgttatagttttggaaagatagaggtttttgtaaggtggtgttaaaatgttaggttgaattaatagttatttgtggggattttgaaggtaggtaatttgtttagtgaattggtagtattgggtaggagggtttggagggagaattttggtggtatggttggtgtgtgaggattaaaggtagaggagattttttttttttagtatggtaatttggtattgggttaagtttttagttgttttttgttggtgatttggtaaaggggaatataaatttttttggttggtaatattgtttatggtaatattgttttgtggtaggtagattatgtggggattggggagttattggtgtttgggaggttatgttattggtttttttgagtgatttttatatttgggaatgtgttttgtgggttatagttgtgggattgttgtaggaggaattttgttttttgtggggtaagaggtatttttgtgagtgggttttagtttttgaattgtagtgggaattagggaggtggtaatatttgtgtgttgttataaagatttttattatgtttttgtaaagatttttattatattgttttgaagatttttatatatttttgtaaagattttattatattattttaaagatttttatatatatttgtaaagattttattatattattttgaagattttatatatttttgtaaagattttattatattgttttaaagatttttatatatttttgtaaagattttattatattgttttgaagattttatatatttttgtaaagatttttattatgttgttttaaagatttttatatatttttgtaaagatttttattatattattttaaagattttatatatttttgtaaagatttttattatattgttttgaagatttttatatatttttgtaaagattttattatattgttttgaagatttttatatatatttgtaaagattttattatattattttgaagattttatatatttttgtaaagattttattatattgttttg

SEQ ID NO: 3462 - DNA, 2385 bp, Artificial Sequence
  chemically treated genomic DNA (Homo sapiens)
taggatggtgtgatggggtttttatgagggtgtgtggggtttttaggatggtgtgatggggtttttatgagtgtgtgtgggggtttttaggatggtgtgatggggtttttatgagggtgtgtgggggtttttaggatggtgtgatgggggtttttatgagggtatgtggggtttttaggatggtgtgatgggggtttttatgagggtatgtgggggtttttaggatagtgtgatgggggtttttatgagggtgtgtggggtttttaggatggtgtgatggggtttttatgagggtatgtgggggtttttaggatggtgtgatggggtttttatgagggtgtgtggggtttttaggatggtgtgatggggtttttatgagtgtgtgtgggggtttttaggatggtgtgatggggtttttatgagggtatgtgggggtttttaggatggtgtgatgggggtttttatgagggtatggtgggggtttttatgatggtatgtaggtgttgttgtttttttgatttttattgtgatttaggggttgggatttatttatggagatgttttttgttttatgggaggtgaagttttttttgtagtaattttgtggttatggtttgtagggtatatttttaggtgtggggattatttaggaaggttagtgatgtggttttttagatattaatgattttttagtttttatgtggtttgtttgttatagggtagtgttgttgtaagtaatgttgttgattaaaggagtttatgtttttttttattaggttattagtgggaggtagttggaggtttagtttagtgttaaattattatgttgaagaggaaagattttttttgtttttgatttttatatattagttatgttattagggttttttttttagatttttttgtttggtgttgttagtttattgggtggattgtttgtttttagagtttttgtagatgattgttgatttaatttggtattttgatattattttatagaggtttttgtttttttagagttgtgatatttttttattatttattagttgtttttaaagttgatattatgtgtttgaggtgttttttatttgtgggtgttggtgtttgtgtgtgagttaggtttttgttgtagttgttatgtgtggtaaataattttaatttgtgtgtatgagtgttttgtggttaggtttttgagggtatggttgggaggagttgggtttgtttttagatttttggttgggtttaggttagttttatgtgttttttggttttaggttagtgtttgtttggtgtgtgtttgttttgtgatagttaggtaattgtattgttgtttttagagtttgtgttgtaaaaggtttgtggtgatagggttattaggtttagtttggttagtaggataggaagtgtgtgttggtttttggagtttgttggtttaagaatagtaaattgttgggattttgattgggattattttgaatttgtagattttggggagaatggatatttttttttttttttttttttgagatggagttttattttgttgtttaggttggagtgtagtggtttgattttggtttattgtaatttttatattttgggtttaagtaatttttttgttttagttttttgagtagttgggattataggtgtttattattatgtttagttaatattttgtattttagtagagatagagttttattatgttggttaggttggttggaaatttttaagtttaggtaatttatgtattttggttttttaaagtgttgggattataggtgtgagttattatgtttagtagattttttttttttttgagatggagttttgttttgttttttaggttggagtgtagtggtataattttagtttattgtaatatttattttttgggtttaagtgatttttttgttttagttttttgagtagttgggattataggtgtgtattattatgtttagttaatttttttgtatttttagtagagatggggttttattatattggttaggttaattttgaatttttgattttaggtgatttatttattttggtttttttaagtgttgggattataggtgtgagttattgtatttggttgattttttttttaaataaagttttttaattatgatttagatttggtttatttaattgggttttttgattttttttagtggtttttaggatagaaggtttggtaagtttggtatgttatttattagatgtttttttagttatttggtggttttttttgtttagtaaatagtatttttttttaaatggttttgtgaaggtatgatttatttatagtgaggatagattgtaagtagatatagtttgatggattgttatatgtgtgatatttatatagttata

SEQ ID NO: 3463 - DNA, 2500 bp, Artificial Sequence
  chemically treated genomic DNA (Homo sapiens)
aattttttggttttttggagatttttttgtattttttattattttaagtttttagatttaatttttatttaattgtggttggtaagggggagggtagtggaagagagttgggtttttttgataaagttttaattttttggaatttagatgttttttatttttgtttttatttttttgtttttttttaattttttgattattttttaaagtgtaggtgatttattattgttattagggttaggggaagttttttggatagagagtatgggagttttgggttttggttttggttttgttattaatttttatgtgatttttgtgatttttttgtttttttgggtttgttttttggttagtttagtgagaattaggtgattgttattggtttatattttttggagtttttggttttttttagagttgttttggtatttttgggtgggagtgggggattgttttgttttatatatttttaggaggtttggttgaattttagatttgagttgagggtgggataattgttttttgtgggggatgttttttttagaggtgtgggttggttttagggaatttgggattttgagggtttttgggtaggaaggaggttaaggtttttttttggttagagtgtttagttttagttttggggtagtggggaagaggttgtttaatgttggggtggggttttggtagggaagatggtgttgaattgggagagggaggaaagagattagtttggtgattttggggtagggtaggagggggagttttttattgtgtgttttttttttaggaggatgaagaagtttttaatttaaaggagggtggtgttagaaagttttagggaagagttttaggataggatgaggttttgtagtagtagatttgttttgtagttttttattttttatttttttaaagatttttatttgaattttgttttttttaaattttttttgagttttttatttgattgttttagtttttttgaatttttagttaattttttggttttttttaagtgttttttttgtatttttttgattatagtagttggtggtatagtgtgtgtatttgtgggtaggagttagtgaaggtttttttttttttttttaaagttttaggttttatggtttgttatttgtaaaattttaattatgagggggtgtttttttgtttgttgttttgtagggagatttggtttaggttgttggagttttgagttttagggtttttgtgatggaagggtgggtgtggtttttatatttggttttttagttttatttaaggaggattgttagatagttttgttttgaggtgtaggaggttgggttgttttggttattttgaatttatttgaagttagagggtttgagtttggggggtggttgggtgtttatttttagagtttgtttagtgttttgttgagtttagtgttgtgtaggtgtgggtattggtttgtgagttttttgtgtgttgtttgagtttatattatgaaggtgtttatgggttgtttgatgtgtggtttgtttttgttggtgttgttgatgtgtatgggtatgggtattagtgtttagttgtagttgttgagtatttggttgatggttttgtggatgtatatggggaatttgttattgtttgttttgttgttttgttgtttttttttgattttgtttagtttgtttggttttgggttggtttgtaggtttgatttgttgttgttgttgttgggttttagtgagggtgtgttttttggggataggtagtggggtttttttgagtttatggggtttagttttatttttgataggttttgtttttttgttatgttgtttttggttgttgttgttgttgttttggttgttttttttgggttagttgttggggtttttgtaaagagtttaatgtttatttggatggaaggagggtgtgatggagtggttgtgtgtgtagttttgagggtggtttgagataggatgtgggtatagttttgaggtggtggttttttttgttttagttaaatttatttggtttttggggtttatgtatatgttagattttaggtgggtgtgttttgtttttgtgtttttttattatttggttttaattgttttttggtgtgggtggttttttttttagtttttttttttgggtggaggtttgttgatgataaggaagaaaaaaatggagtttttattttgttttaattttggtttttggaattttttatttttttttttatttttttttttttttttagtttgttttaatggggtttagaggagagttaggtggggggtaagggtggggtgttgtttttttttattttatagtagggttttaggtttgggtgggttagggaggagtaggttgtgtatttatttttttggattttttttttagtttggggtttgtttttaggaagtggaaaattgtgttttaaggtgtgtggtttagtttggggttgggaggtgatgttggtgggttgggagggaggggt

SEQ ID NO: 3464 - DNA, 2500 bp, Artificial Sequence
  chemically treated genomic DNA (Homo sapiens)
gttttttttttttagtttattagtgttattttttagttttgagttggattgtatattttgggatatggttttttattttttaaggatgagttttagattggaggagaggtttgaggaggtgagtgtgtagtttgtttttttttggtttgtttaggtttgggattttgttgtgaggtggagagaggtgatattttgtttttgttttttatttggtttttttttaaattttgttggggtaggttgagggaagaaggaaaggtgagagaaaaggtgggaaattttaggggttgggattagagtaaaataaaggttttgttttttttttttttattattaataaatttttatttaaaaaaggaggttaaaaaaaaagttatttatattaagagatggttgggattaggtggtgggaagatatagaggtgggatgtatttatttagagtttggtatgtgtgtgggttttaggggttagatgggtttagttggagtaggaagggttgttattttggggttgtgtttatgttttgttttgggttgtttttggggttgtgtgtgtggttgttttattgtgttttttttttatttaggtgggtgttggattttttgtgaggattttggtggttggtttgggggaggtggttgaggtggtggtggtggtggttgggggtgatatggtggaggagtaggatttattggaggtggagttgagttttgtgggtttggaggagttttgttgtttgtttttggggagtgtgtttttgttagggtttgatggtggtggtggtggattgggtttgtgagttagtttggggttaggtgagttgggtaaggttaagaaggagtagtaggatggtgaggtggatgatgataagttttttgtgtgtatttgtgaggttgttagttaggtgtttagtggttatgattggatgttggtgtttatgtttgtgtgtgttaatggtgttagtaaaagtaagttgtatgttaagtggtttatgaatgtttttatggtgtgggtttaggtagtgtgtaggaagtttgtggattagtatttgtatttgtataatgttgagtttagtaagatgttgggtaagttttggaggtgagtatttgattgttttttgggtttgggttttttagttttgggtggatttagggtagttgaggtggtttggttttttgtattttagagtgggattgtttggtagttttttttggatagggttggaagattaggtgtgggggttgtgtttgtttttttattataaggattttggaatttggaattttagtggtttaggttgggtttttttatggggtggtgggtaggaaggtgtttttttgtggttggaattttgtgggtggtagattgtggggtttggggttttggagggagggaaggaggtttttattaatttttgtttatagatatgtatattatgttattagttgttgtggttaggaggatatgagggaaatgtttggaaagaattaaagggttggttggagatttagggaaattgaggtagttagatggagaatttaggggaggtttaaagaaaatggaatttagatgagagtttttggaagagtgagggatgaagaattgtgggataaatttgttgttgtgggattttattttattttagggtttttttttgggattttttgatgttatttttttttgagttgggggtttttttatttttttagggagaggatatatagtaaggggtttttttttttgttttgttttagagttattaagttgatttttttttttttttttttagtttggtgttattttttttgttagggttttattttaatgttgagtaattttttttttattgttttagagttggagttgagtattttggttagaaggaaattttggttttttttttgtttaggggtttttagagttttaggttttttgggattagtttatatttttaggaaaaatattttttgtagggagtaattattttatttttgatttaggtttggggtttagttaggttttttggggatgtgtggaataagatagttttttatttttatttgggagtgttagagtagttttgaaagagattagggattttaggagatgtgagttggtagtagttatttgatttttgttagattgattaagagataggtttagaaaggtaaaggaattataaaggttatatagaagttggtagtagagttagggttagaatttaggatttttatattttttgtttagaggattttttttgattttggtgatagtggtggattatttatattttgaggagtggttaggaggttggggggaagtaagaagatgagaataagagtgaggagtatttgggttttagaaaattagggttttgttagaggagtttggtttttttttgttgtttttttttttgttagttatagttgggtagagattgggtttagaggtttagagtggtagaaggtgtaggaggatttttaagagattaaaagatt

SEQ ID NO: 3465 - DNA, 2402 bp, Artificial Sequence
  chemically treated genomic DNA (Homo sapiens)
ttttgttttttggtttggtttttgaagattttagaagaatttggaatttgtttttatttggaatttagggattattttttgtatttagtaggtttttgtttttttgtgtggaaagtggttgggtgagttttggtattggggttattatatttgagtgttgggggttatggagggaggggtttagatattatttgggaaggattttagagtgtagttttagtttaggttatttggggaagggagttggtaaagtgggattttgagtttttatggtttttttggttgtttttgtttagaggttgtttggtgttttttttttttgttttattgaggagttgttgtttttgaattttagttaatttttttgtttttaggtgaagaaattgaggttttggggttaggaaggggtttgtttaggttgttgatttttttgggtagtattgagtttaggttttttttgtaattatgtattaggattagagagggtagggggtttgtttaatgttatatagtttgagtgaggaggagttggtttgggatttaggttttttgatgtttaggttaggtttttttgttttttttggttatggtttttagtttggatattaaggggttgggagttagttgtgtttttattatttttatgttatagggtaggatggagtttggtattttttgttttaggttggttgttggtgtgatatgggtggttttagttgagtgaatgtttttgttttttatagtttagggggttttttgttttggttattaatttttgttatgtgatttttttattttaatgtttgattgagtttgaaaatattgagaagatttaggggttgaaaagggaggaagagggaggttagaaggtgttagttgagttagtgaagtttttataggagaggaagtgggttaggggaataggaaggagggttgggttggtttttgggtttgtttttgttttgggtatgtggtgagtttagttttttgtttgtaatgaggaggaggaagatgaatagtgtttttgttaattttggtttttttggtttatgggatgggagatgttattattttatgtatttattttagttagttttatataggttgattggggaggttttttttgagtttaatttgataagttttgaggagtgagttgtatttattttgttttgtttgggatagggtggggggtttttgggtagggggttgggggttgtaggagtatggtgggtggttgttttgtatttgtttgaggaaggattattttttttgttaagtttttgtttggttgtgtttgtttttagtttttgtgtttttttttaatttgttattttgtaagggttggtttaagggtttttttttatagggtttgtattttttgtttaggttggtatgttgatgtgtttttagaatttggtttttattttttttttgtgtttttaggtttagagaaaatgaggggtttagtgagtttggggttttttagattgtgatgtttttttttgttttttttgtgtaggtttgggaggtgatggagttggagtttttgtatgatttgttgtagttttttaagggggtggagtttttagtggaggaggagtttttaaaaggtgtgtgtttatgtaggtttgagggtggagggtgaaggtttgtgtggtaagagtgagtttggttatgtttgggatttgtagtatttttttagttgttagttgagtgtttaattttgtttatttttgtttttattttttgttttatgtttgatttaatttttttttttgggattttttatagagttagaattttttttttttagatgagagatggtgtggattatgatggtgaatattgattgtttttattttgtgagttttttgagtgtttttattgtattagtattttttattaatagtaatttatttatttttaagggtgggtattagtgtttgttttatatagatgaggaaattgaggtataaggggtgatgtgttatagtaataggaaatttttagtaagtggtggatttgggttttgagtttaaggagggtggttttagaattgaggttttatatggattatgtagtgatgtttattatggagtgatattttgtagggtgtggggtttttgatgtgttttttttatatgtgtgggttttttttaaaagtggggtgagtataggatggagtaatttaatgattataggttgtttttttagtaaagttttgtgttatgagttttttggggggttggtggttatagtttttgtaattttttttttaggagatggtttaaaagaaggatatgggtaggtatttagagttgttattttttttgtgttttttgaaagaaataaatgaataatagtttgtaaggaagtagtgagatgttttagtggggaag

SEQ ID NO: 3466 - DNA, 2402 bp, Artificial Sequence
  chemically treated genomic DNA (Homo sapiens)
tttttttattgggatattttgttgtttttttgtaagttgttgtttatttgttttttttagagaatatagagagggtgatagttttgggtatttgtttatgttttttttttgagttattttttagaagggaggttgtaggaattgtggttgttaattttttaaagggtttatgatatagagttttattgaaagggtgatttatagttgttgaattgttttattttatgtttattttatttttgaaagggatttatatgtgtgaggggagtatgttaggagttttatattttgtaaagtattattttatggtgggtattgttgtgtggtttgtgtggaattttagttttgggattattttttttgggtttagaatttaggtttattatttgttaagagttttttgttattgtggtatgttattttttgtgttttagtttttttatttgtataaagtaggtattgatgtttgtttttgagaataaatgagttgttattggtaagaggtgttggtgtagtaggggtatttagaaggtttataggatgagagtaattagtatttattattgtaatttatattgttttttatttggagagaagaggttttagttttgtagaaggttttaggaggaggagttaggttaagtataaagtagaaggtggaggtaggggtgagtagaattgggtgtttagttgatagttgggaaggtgttgtaagttttaggtatggttaggtttatttttgttatatagatttttattttttatttttagatttgtgtgggtatatattttttgagagttttttttttgttgggggttttatttttttggggagttgtagtaggttgtataagaattttggttttattgttttttaagtttgtatagaggaggtaggagagggtgttatggtttgagaagttttaaatttattgagttttttattttttttagatttggaggtatagaaggagggtagaagttaggttttggggatatgttagtatgttagtttaggtagggggtatgggttttgtgagaaagagtttttgagttaatttttgtggggtgatgggttagaaaaaggtatagaagttgagggtgggtatagttaagtaaaggtttggtggaggaagtggtttttttttaggtaggtgtagagtggttgtttattgtgtttttgtagtttttagttttttatttagggattttttattttattttagataggataaagtaggtatagtttattttttagagtttgttaggttgagtttaagggaaatttttttggttggtttgtgtggggttggttgaggtggatatgtggaatggtgatattttttattttataaattggaagggttagggttgatagaggtattgtttattttttttttttttattataggtagaaggttgggtttattatatgtttgggataggggtagatttagaggttagtttagtttttttttttgtttttttggtttatttttttttttgtgaaggttttgttggtttggttggtgttttttggtttttttttttttttttttttagtttttgggtttttttagtgtttttaaatttaattagatattgaggtaggggagttatatggtagaagttggtggttagagtagggagttttttgagttgtgggagatggaggtatttatttgattggagttatttatgttatattagtagttagtttggggtgggggatgttagattttattttgttttgtagtatggaggtggtggggatataattgatttttagttttttaatatttaagttgagggttatggttagagaaaatgaaagagtttggtttgggtgttaggaagtttgggttttaggttagtttttttttatttaggttgtgtgatgttgggtaaattttttgttttttttggttttgatgtatggttataaggagggtttggatttgatgttgtttaaagggattagtagtttgggtaagtttttttttggttttagggttttagtttttttatttggagatggaggggttggttgaagtttagaggtggtaattttttagtagaatagggagggaggatgttgagtagtttttgagtaggggtagttggaggggttgtggggatttaaggttttattttattgatttttttttttgggtggtttgggttgggattgtattttgggattttttttaggtggtgtttgggtttttttttttgtgatttttaatatttaagtatggtggttttgatgttagaatttatttaattgttttttatgtaggaaaataaaggtttattgagtgtaaagggtggtttttggattttgaatggaagtaagttttgggtttttttggggtttttggggattaggttgggaggtagga

SEQ ID NO: 3467 - DNA, 2439 bp, Artificial Sequence
  chemically treated genomic DNA (Homo sapiens)
gagatgtagtaggaggtatagttttatttgttgttggagggagttaggtgagatttttttatatagggagtaggtggaatagtagtgtgggaagggggttggtattggagttagttggatttggtttaaatttaggttgtgttgttttttggttttgtgattttgagtaagtttttttattaatttgagttttagagtttgtatttgtaaatgagggtttggtgtatggtgttttggtgaggattagaagatatgatgtttaatttatgtgttttttgataataatattaataatggttattgatgatataagttgtgagtagtgtgttagggattgtatatgtttgaaattgtgttttaaatttattgggttaggtatggtggtttatgtttgtaattttagtattttgggaggttgaggtgggtagattatttgaggttaggagtttgagattagttgggttaatatggtgaaattttatttttattaaaaatataaaaattagttgggtgtggtggtatgagtttgtaattttagttatttgggaagttgaggtaggagaattgttggaatttgggaggtagaggttgtaaggagttgagattatattattgtattttagtttgggtaataagggtgagattttattttaaaaaaaaaaaaaaaaaaaataatttattaaatttttataatttagtgttttttggttttggttttattgatgttttaggttaggtaattttttgttggggattgttttgtgttttgtagggtgtttgatagtatttttggtttttatatattagatgttaataaatttttattaattgtgataattagaaatattttttagatatggttagatgtttttagggggttagaattattttttattgagaattatagttataatttaatgaagtaggtatattgagtattaaaaggatttatttatgttaaagagttagtaatggtggttttgggatataggttggttggttattatattgtaaaagttgtttttttttttgtttttttgatttatttttttagggtttattgttagttgtaggttatggttgtgaagtatagttgagtttttttttttattgagttgtgttaggtgtatggtgattatgtagtttttatttttgagttgtagtagttttaggttgtttgttttttagtttttttgtagttgttgatagtgtttttgagtttgttgttggttttgtagttgttgttttagttttgtttgtttttttttgagtatttggttttgggtttgtagttgttgtttttgttgtagttggtttttgtgagttttttgtagttgttgtatttttgttattaagaattgggttaggtttttaggtttttttttatttgttaggatagaataggggatagaataggtagtttaggtaagtaaaatttaggagataatatattgtgttaaaaaatttaaattataaaaatattagagggaaattttggaatatatttgtagaattgggagtaggggaggtttttttaaataatatataaaatttaggagttataagagaaaaaagatggataaatttatataaaaatgtttaaatttttgaaaaatgaaagatgtaataaagttaataagtaatagagtgggagaaaatataataagaatttagagttgtaatatataaagagtttttataaattaataagattaataattaaataaaaatatggataaaaattattaataggtaagttttaaaataaaaatagttaataaatataggaaaatatgtattaatttattaataataattatagtagttattaatatttgttaattttattttttgtgttagatatattttaatttttatgataatattgtaaggtaggtattattattgtatttattttaaagatagaaaaattgaagtatagagtagttatttatttaaggtttaataattagtaatttgtgaattgtattatttaatgaaatataaatttaaaataataatattattttttatatattagaatggtaaaaatgtttaaatatgatttttaggatttaaatgggtttttatatatttttggtaggaggtatgttgatttaatagttaaaatatatagattttttgagaaattttttttagaatttttttgtttgagatatatttgtataaagatgtatatataaggatgtttttgtattgttgtaataatataaaattggaaatttaggtatttattaattggaaatgggttaaatgaattatgttttaattttattaatgaatagtatgtagttatttaaaataagtgtatgtaatagaggtgaaagaattattaaaattagttgttttaagaaaaagtaaaatatatatgtaggtgtgtgtgtgtgtgtgtatgtgtttgtgttttttatataaaaa

SEQ ID NO: 3468 - DNA, 2439 bp, Artificial Sequence
  chemically treated genomic DNA (Homo sapiens)
tttttatataaaaaatataaatatatatatatatgtatatatgtttatgtgtgtattttgtttttttttagaataattgattttagtgatttttttatttttgttatatatatttgttttaagtgattgtatattgtttattagtgaagttaggatataatttatttaatttatttttagttgatggatatttaggtttttagttttgtattattataatgatatgggaatatttttgtatgtgtgtttttgtgtaaatgtgttttaggtgaagaggttttgagaagaattttttaaagagtttgtgtattttaattgttaaattaatatattttttattaggaatgtgtaagggtttatttgaattttggggattatgtttaaatgtttttattattttgatatgtaaaaaataatgttattgttttaagtttatattttattgagtgatatagtttataggttattagttattaaattttgggtaaataattgttttgtgttttagtttttttgtttttaagatgggtataataatagtatttattttatagtgttgttataaagattaagatatatttagtataaagaatgaagttaataaatattagtagttattgtaattattgttgataggttggtgtatatttttttgtatttattaattatttttattttgggatttgtttattgatagtttttgtttatatttttatttggttgttgattttattgatttgtaggagttttttatatattatggttttgagtttttgttatatttttttttattttgttgtttattaattttgttatattttttattttttaaaggtttaaatatttttatatggatttgtttatttttttttttttataatttttggattttgtgtgttgtttaggaagattttttttgtttttaattttataaatatattttagaatttttttttagtgtttttatggtttgagttttttgatatagtatgttattttttggattttatttgtttgagttgtttattttgttttttgttttgttttggtagatgaggaggggtttgagggtttgatttaatttttgatgatagaggtgtgatggttgtgggaagtttgtaagagttagttgtagtgggagtagtaattgtaggtttggggttgggtgtttgaggaggagtgggtagggttggagtagtggttgtgggattagtagtaggtttaggagtgttgttaatggttgtgggaggattgggaggtgggtagtttggagttgttgtggtttaaggatgagaattatatgattgttatgtgtttggtatagtttagtgaggagaagaatttggttgtattttgtagttgtgatttgtagttggtggtaggttttggggagatgggttggggaggtaagggaaggggtagtttttgtaatgtagtagttagttagtttgtgttttagagttattattgttggttttttgatgtggataagtttttttagtgtttggtgtatttattttattgggttatgattgtggtttttaatggggggtgattttgattttttagaaatatttggttatgtttaggaaatatttttggttgttataattagtggggatttattggtatttggtgtgtagaggttagggatgttgttaaatgttttgtagggtataggatagtttttagtaaagaattatttagtttaaaatattggtagggttggggttaagaaatattgggttatgaggatttgataagttgttttttttttttttttttttgagatggagttttatttttgttgtttaggttggagtgtagtggtgtgattttggttttttgtagtttttgttttttgggttttagtgatttttttgttttagttttttgggtagttgggattataggtttgtgttattatatttagttaatttttgtatttttagtagagatggggttttattatgttgatttggttggttttgaatttttgattttaggtgatttgtttgttttggttttttaaagtgttgggattataggtgtgagttattgtatttggtttggtgagtttaagatatagttttaaatatgtatagtttttagtatattgtttataatttgtgttattagtagttattgttgatattattattaagagatatataggttaaatattatgttttttaatttttattaaagtattatatgttaagtttttatttgtaaatatagattttgagatttagattagtgaaaggatttgtttaaggttatagagttaggaagtggtatagtttggatttgaattgggtttggttggttttagtgttagttttttttttatgttgttgttttgtttattttttgtgtggggaagttttatttgattttttttagtagtaagtgaggttgtgttttttattgtatttt

SEQ ID NO: 3469 - DNA, 2451 bp, Artificial Sequence
  chemically treated genomic DNA (Homo sapiens)
ttgaggttgggagtttgagattagattgattaatgtggagaaattttgtttttattaaaaatataaaattagttgggtgtggtgggatatgtttgtaattttagttatttgggaggttgaagtaggagaatagtttgaatttgggaggtggaggttgtggtgagttgagattgtgttattgtattttagtttgggtaaaaagagtaaaattttgttttaaaaaaaatttagttaggtatggtggtgtgtatttgtaattttagttatttgggaggttgaggtaggagaattgtttgaatttaggaggtgtaggttgtagtgagttatgattgtgttattgtattttagtttgggtgatagagtgagattttattttaaaaaataaaataaaataaaattatattgattttatattggttttttattttatgtttattattttgtaagttttgatataaagataagttttgtttttgttttgttaggatttttatttttgaatgtttaagtatgttttggaagtttttaggggtaggaaagggtttggaaatagatttttttttgtgtaatttttgttttagggtagatagattttttttattagaagttttttttagttttaatttaggtttgtgatgtagtagggtgtgttattatttgttagagttatggtggtttggggtgtttagtttaggtttttttagttattgttttatgtaagttattgttttgtgtttttttagggaggggttggagataggtttgaggaggaggtgttatttatggagaaattaattaaagttttgtttaggaagtttagagattttttgtttttttagtggtgagttttggtttgttgtttttttggttttattttttttggttggtagtagtgatttggtttttagggtggtgtggagtaggtgtagggtttggagtagttttttgtttgtttagtgattttttgtttttttttattgttttgttttgttttatttatttttgatagtgtttgatttttagtgttttttgtgtttgggtgaagggtttgtgtttttgagttgagttgttggtaggtattttggaggtagagtaggttaattttggtatgaatttggtggttttggtatttgtaatttgttttgatattttttttgtgagttaggtggtgagttattttataatgtaattttaaattgaggttttttgtttttttttaggatttttttttttatagtattattatatgtatatagttgtaaaaaggttaagaggaaatatttttgatgggtttaggattttaaaaagtttttaagggttttttgtattagtaaggtttagtgttgttgttttataggtaaagtatggtatagtggggagtgagattgagaatgaagtggtgttttagtttaggttgtggggatttgtttttgtttagtttggttgtttttgtagtttagtttgtatttaggtaatgattgtatagtttaaggttgggaagttaggatttttttggtttggggttagttgtttttgtttggggttagttgtttttgtttggggtttgaatttttgaaggagtaggtagttgagagtaggttttttttaggaagagtttttagagttatgtgggggtatttttttaaatgtgtattttatttggtatttattagatttgtgtgtttgtgatttgtttgtttttgatattatgtataagggtaggtttttggggtggtggaaatggttagggtttatgggtttgtttttagtagttagttttgtggttgtaataaagtatagttttttttgtgttaagattttaattagggttaaggattagtgtgtttgttgttagaatttagagtttatttgttgttttgaaaagtaggtttttgaggttagtgggggagtagtgttttttatgttttttattgaggagtttttgtgtttgttttttgtttttggttttaggagtttttttaattgatattgaagtggtggaagtagttgagtgttaggttattttttattattatattggggtagtgtttttaggtttttagtagtttttaggtgggttttaatgtggaaggattaattaattttttttaaagtagttgtagttgggtttggtggtttatgtttgtaattttagtattttgggaggtttaggtgggtagattatttaaggttgggagtttgagattagtttggttaatatggtgaaattttgtttttattaaaaatgtaaaaattagttaggtgtggtggtatatgtgtgtaattttagttatttgggaggttgaggtggaagaattatttgaattttggaggtggaggttgtagtgagttgagattatgttattgtattttagtttgggtaatgttgtgattttgttttaaaaaaaaattaaaaaataaagtagttgtattttgatttgtataaaagta

SEQ ID NO: 3470 - DNA, 2451 bp, Artificial Sequence
  chemically treated genomic DNA (Homo sapiens)
tatttttgtatgagttaagatgtaattgttttattttttagtttttttttgagataaggttataatgttgtttaggttggagtgtaatggtgtgattttggtttattgtagtttttgtttttagggtttaagtgatttttttattttagttttttaagtagttgggattatatgtgtgtgttattatatttggttaatttttgtatttttagtagagatagggttttattatgttggttaggttggttttgagtttttgattttaagtgatttgtttgtttgggttttttaaagtgttgggattataggtgtgagttattaagtttggttgtaattgttttagaaagaattaattaatttttttatgttgggatttatttgggagttgttggaagtttggggatgttgttttagtgtggtgatgggggatgatttggtatttaattgtttttattattttagtgttagttgaggagatttttggggttgaggataagggataggtatagaggttttttggtgaagggtatggggggtattgtttttttattggttttaggagtttgttttttagagtagtaggtgggttttggattttagtaatggatatattgatttttaattttggttaggattttaatatagggagaattgtattttattgtagttatagggttaattgttggagatagatttatgggttttggttatttttattattttaaaaatttgtttttgtgtgtggtattaaggataaataaattataagtgtataaatttgatgagtgttaggtggggtgtatatttgggaagatgtttttatgtggttttgaaggttttttttgggggaggtttgtttttagttgtttgtttttttgggaatttaaattttaggtaaaggtagttgattttaggtaaaggtagttggttttaggttagagaggttttggttttttaattttgagttgtgtagttattatttaggtgtaggttgggttatagggatagttaagttgagtaaggataggtttttgtagtttagattggggtattgttttgtttttggttttattttttgttgtgttgtgttttgtttgtgagatggtggtgttgggttttgttggtatgaggggtttttgggggttttttggagttttgggtttgttggggatgtttttttttgatttttttgtggttgtgtgtatgtagtgatgttgtgagggaggagattttaggggagggtagaaagttttagtttaagattgtattgtggggtgatttattatttggtttatggaggggatgttaggataggttgtgaatgttaggattgttaagtttatgttagagttggtttgttttatttttagagtgtttgttagtaatttagtttagagatataggttttttatttaggtatgaaaagtattggaggttagatattattaggggtgggtgggataggatggggtaatgaggagaggtagaggattattggataggtagagggttgttttgggttttatatttgttttatattattttaagggttaggttattattgttagttaggaggggtgggattggggaggtagtaggttaagatttattgttgagagagtagggggtttttggattttttgggtaaggttttggttggtttttttgtggatgatgttttttttttagatttgtttttagtttttttttaaagaggtataagataatgatttatatggagtagtagttggggggatttgggttgggtattttgagttattatggttttggtaagtggtggtgtgttttgttgtattataggtttgggttgggattagagaaggtttttgatggaagaagtttatttgttttaaagtaaggattatataggggaaggtttgtttttaaatttttttttgtttttagaagtttttaggatatatttaaatatttaggaatgaaaattttagtaaaatggggataagatttgtttttgtattagaatttgtagaatagtgagtataaaatgaaagattggtgtgagattagtatggttttgttttgttttgttttttgagatggagttttgttttgttatttaggttggagtgtagtggtataattgtggtttattgtaatttgtgttttttgagtttaagtaatttttttgttttagttttttgagtagttgggattataggtgtatgttattatgtttggttaagttttttttgagatggagttttgttttttttgtttaggttggagtgtaatggtatgattttggtttattataatttttattttttaggtttaagttatttttttgttttagttttttgagtagttgggattataggtatgttttattatatttagttaattttgtatttttagtagagatagggtttttttatgttggttagtttggttttgaatttttaattttag

SEQ ID NO: 3471 - DNA, 2384 bp, Artificial Sequence
  chemically treated genomic DNA (Homo sapiens)
ggggtttttggaattatttaattgtagtttttatttttatatttagttttttaggaggttttgttaggtttgtttttaaaaatggttgttttaggtttttatagtttttttgtagtagtgagtaaatagtgaaatagtattttttagtttagaggttattatggttttttttttgttgagtttagagtagtgttttgtggtaatgtattgagggttattttttattttttttgtgataagggttattgttgtgtgtatttttaggttattttgagttaaattagtgatgattaattttttttttattttatttttttttgtggtttatttgtttggatatttttttaaattttattgtttgagtttattgtttttattatgttttgatggtgtgttaggttttttttaatatgtttttatgtttattagggatttatggttatttggaagaaggtgtgtggagagatttggaaggttagttttagtaggtttttgtggatgtattggtttttagttatatgttttaggggtaggtttttttggttaggagtttttttgtgggtgaaggtgtaggttttttagtgttatagtttttgtagggatttgttttgttttatttgggttttttattgttgttttttttttatgaagtagaggtaggttattttattggttttgtttggttttgttgtgaagtgttgtgttagggaggtttttagttttgttagttttttagggtttagtttttggagtaagtggtgaaaagtttttattaggttgtgttgaggtttatttaggttaggtatttttttttagtagggtttttgttgagatttgggggtggaagtaggtaatggttatggtttggtggtggtggttggtgtgtatagttagttgtttttagtggtttgtgtatgtttttgggttgtatgttgagtatggagtggatttgtgggaattatgagttggtttaagtgtttataattgggtaagtagtttttttgtttttttttttggttatatttttttttatttggttgaaatggtaggtattttagaatttttggggtaggattattattttttgtttttatattgtataggattttttgggagttttgttataggtttttattggatgaatttttggaaggtttttattatttgtttggtggttttggggatgtgtatggtgttaaatggggttgttatagtatatgttttgtttttgtatttgttgagttgatagtttatggtgttattttttttatttattttgatgttaattagaaatttatatttattatgatatttagtttgtagggagagagagttgtattttattttggttgtttagtgtttgggtttggaaattttgatttttttataggggttggtagttaaataagaggaatagttgataattatgtgatgttattagaagaaaatataaagtagggagattaataggaagggtgagtaaaagtaaagttttttaaaatttaggataggggtttgtggttattgaagtttagtttgatttgttggggtgatggtttgattttttttagtgggtagtaggttttgttgtgtttgtgtttttgtttgagtagttagggtagtaaggtatggttggtgtttttgatttttttgtaagaggagtagattggtggttggattttatttattgtttttgatttatgttaggttattttttaaatgtttaggtttttgattttttttttgggatgttattgtgtttattgtgatgtgggtgttttgttggttagtttttaaaggggttgttagattttgtgttgggttttttaattggtgtatggataggttgaggaagtataggttgggtagagttttggttaagaggggtgttttgtgtttatatttatttggtaagtttttgtagtatttgtttgtattttagttgtttttgtttaagttgtttagtatagggtattgtttatagaggggttattatgttggttatttgtgttattggtggtttatttttatttttttgttgtttttttttggttatggggttggttttgggttgggttaggtgtatattgagtgggtggtttttttagagggtattatgtaaaatgtgtagggttttgtttttttttgtagtgttgtggaatgttataaaggtgtagggtggttgtttaaagagtttggttttgtggggttgtagattaaagtggtttaggaagtgttggatgttgttgaagttggtgtggtgaggtatgttttgtagttttagtttaaagattttagaggtaaataagttatttttgatgtagttgtagagtttgggttgaggttttggttttgtagttgttttagtgttttttttttttatt

SEQ ID NO: 3472 - DNA, 2384 bp, Artificial Sequence
  chemically treated genomic DNA (Homo sapiens)
ggtggagaaagagggtgttggggtggttatagggttggggttttagtttgggttttatagttatattagggatgatttgtttatttttgagatttttaaattggagttgtagaatgtgttttgttatgttagttttagtgatgtttggtgttttttgggttgttttggtttgtagttttataaaattaaattttttgggtaattattttgtgtttttgtgatattttgtagtgttgtagagagggataaggttttgtgtgttttgtatggtgttttttggaaaggttgtttatttagtgtgtgtttggtttggtttaaggttgattttatggttaggaggaggtgataggagggtgagagtgagttattagtaatatgagtggttgatgtggtgatttttttatggatagtgttttatgttgagtagtttgagtggaagtagttggagtgtgagtaggtgttgtagaaatttgttaagtgagtgtgggtgtaagatgttttttttggttagggttttgtttggtttgtgtttttttagtttgtttatgtattagttgggaggtttagtataggatttggtggtttttttgggagttagttagtaagatatttatgttatagtgggtataatgatattttaaaggaggggttaggagtttggatatttggggagtggtttggtatgggttgggggtagtaggtggagtttaattattgatttgttttttttatagggaaattgggagtattaattgtgttttgttgttttggttgtttgagtagaggtataagtataataaggtttgttgtttgttggagggggttaggttattattttagtaggttagattagattttggtggttataaatttttattttgggttttgaaaaattttgtttttgtttattttttttgttgatttttttgttttgtgtttttttttggtaatattatatagttgttagttgttttttttgtttgattgttagtttttgtggggaaattagggtttttaggtttaagtgttgggtagttagggtaaggtgtagttttttttttttgtagattgagtattgtaataagtgtgagtttttggttggtgttggggtggatggggaggataatattgtgggttgttggtttggtaagtataagggtgggatgtgtgttgtggtagttttgtttgatattgtgtatatttttgaagttattaagtaggtggtgaaggttttttaggagtttatttggtgaggatttgtgatggggtttttgggaagttttatgtggtgtgggagtagagggtggtgattttgttttgggaattttggagtgtttgttattttagttagatgaaggaaggtgtggttagaggagagagtagggggattgtttgtttagttgtgggtatttgggttagtttgtgatttttataggtttattttatatttggtatatgatttagagatgtatataggttattggaagtagttgattgtgtgtattagttgttgttattaggttatggttattgtttatttttatttttaggttttaatgggggttttgttgggggagggtgtttagtttaggtgggttttagtatagtttgatgggaattttttattatttattttagaagttgagttttgaggagttggtagagttgaagatttttttagtgtagtattttatagtagggttaggtagggttagtggagtgatttgtttttattttgtggaggagggatagtggtaaggagtttgagtggggtggggtaggtttttgtagggattgtgatattgaaggatttgtatttttgtttatagaaagatttttagttaggagggtttgtttttggagtatgtggttggggattggtgtatttatgaggatttgttagggttgattttttggatttttttatatgtttttttttaggtagttatgagtttttggtgggtatggggatatgttgagggaggtttgatgtattattaggatgtgatgggaatagtgggtttaggtggtgagatttgggggagtatttaggtaggtgagttataggggagggtgaagtaagaaagaggttggttattattgatttgatttgggataatttagaggtatatatggtagtggtttttgttatagggaggatgaggagtggtttttagtgtattattatagggtattgttttgggtttggtaggagggaggttatggtggtttttgggttgggaaatattgttttattgtttgtttattgttgtaggaaggttgtggggatttggagtggttgtttttggagataggtttggtaggattttttggagggttaggtgtgggggtgggagttgtagttgggtgattttaggggtttt

SEQ ID NO: 3473 - DNA, 2499 bp, Artificial Sequence
  chemically treated genomic DNA (Homo sapiens)
gatttttagtttatttttagagtatggatgtttttggttttgttattaaggttttttttttttttaagaggttgtttttttattattttaaattttttttaagataattgtgagatatagagggtttagaaattaggtaagttttaaatataagtttgtataatattaatattaaatatatattataaataaggtttataaatataaaattgataaaaattgataaaaattgataaattagttatgtttttttaaggaattggttttgtagtttttgagattttttttaggagagtaatggtttttgtgtgagaaaattttaggatttattattagggggagtagttagtagtgaggatttaagatgggttttttggtgttgggaggtgggtttgtttttatagagatttttgtgtatattttttagtgttatttgtattatttgttttgatttatagatttttaatatttattttatgttagggaatttaagtaattgataggtagtgggggttttgtatagtttttaattttttagttttataaagagaaaataggtttatagaggtaaagtgatttgttttaggttatgtggtgattttggggttggtttgggatttgagttttattttttggatttttggattagggtttttgggatattttgttgttgttatagttgtttaaagtgaggttatttagatatttaggtgtttggtttgggatatgatgaggtataggaggttagtttaggttgtgattttttttttagaaatatggaaaggaggaagtttgggggtaatggttttgtaagttatgagagggaaggattggtaggttttggggagtaaggtaggggggtagttagtttggttatgagttagtttgtgttattagatttttgaattaatggaaagttggttttgtgtggtttgtttggttattttattgggtttggggaatttggggttgaggtgggagtgtaatagtttgattttgttttttagtttggaggaggtagaggggtttgtttagtttttattttttaaagtgtattttttagtggttagtagtagaggggaataggtttggggatttgggagttgttattttgtgatggttttttttatttatagagtatttgttgtattttttattggtaaggggtgtttttgaggttattggggtagttgttttttggttatgagttttttgttttttttggagggtttggttttgtgtatttttttttttagggtttggtgggggttgtgtttttggttttggtttgggttttttttttatttgttgaagatttgttttattgagtgtatgaagtgatggtagttatgtaggaatttgtagttttttagtttgtgttgaaaagtatttgaggtaggggtgggggtgggtggttgagaggttttttggttagtttttgtgggtttagttgtgtttgagttgtttagtagttgggttatgtagtagatgttgtttttgagtttgaggatgtttggttttgttatttgtagtttttttaagtttttgatgtttagtttagatttttttaaattttgggttttggggaggtgttgttttaagttggttagtttgtgtaggatgtagtttagtgtggtattgagggtttgtaggaagttttgtttgtttagtttttttagggtttttttattggggaaggttttggggtgttttttgtagtgtttttttagtttaggaatatttaggttttggatatgtatttggtgggaataggaggattatagggtgaatgttgaggatttggattatatttatagataagtaagttttgaaatgttagattttatgtattttaatttaattttttattggatagatttggaaattgaggtttgagagggaagaggattttaagattattgtaggtaaggttggagtgatgttggggggttggtgggatgtttgtggggaatgaagagttttaagagggttggattttgttttgtttattgttatgttttagtgtttagattagagtttggtaggtgtgtaggaaatatattgagtaagtaggtgagtatggtgatggtgtttggagttttgttttgggattatagagttaggaaagttggagggttagttttagttttttagggttaaggttggaataatatagtgatttagttttttgatttggttatatggagtggggttaggtttgttttttttgttttttattttttttttaattttatagttttttgagatttagatgttataagggtttaggtgtttatataggggtttaggagtttgttggtgttttgtatgagatttgtttgtttttggagttggttaaggagtatgtggtatttttttgagtagttgtttatagttgttatgtttgttatgtttggaaataggagtgtaaggattagatttaaggtagagaagaggggtgttatttgatttggtgaggaaagttatagatgggagttt

SEQ ID NO: 3474 - DNA, 2499 bp, Artificial Sequence
  chemically treated genomic DNA (Homo sapiens)
aggtttttatttgtggttttttttattaagttaggtgatattttttttttttgttttaggtttggtttttgtatttttgtttttaagtatggtgagtatggtggttataggtagttgtttgaaagagtattgtgtgttttttggttagttttagaagtagatagattttatgtaggatattagtagatttttggatttttatgtaagtatttgggtttttgtggtatttgagttttagagaattatggggttaggaagggagtgagaagtagggaggataggtttagttttattttatatggttaggttggggaattgagttgttatgttattttagttttaattttgaggagttaaggttggttttttagtttttttagttttgtggttttggggtgggattttggatattattattatgtttatttgtttatttagtgtgttttttgtatatttgttaggttttggtttaggtattgggatgtagtagtgagtaagatagagtttagtttttttgaagttttttattttttatgggtattttattagttttttaatattattttgattttgtttgtagtgattttggggttttttttttttttgggttttagtttttggatttgtttagtgggagattggattggggtgtatgaggtttagtattttaaggtttatttgtttgtgagtgtggtttggatttttagtatttattttgtgatttttttgtttttgttagatatgtatttaaggtttggatgtttttaaattgagagagtattgtagggagtgttttggggttttttttagtgaggagattttgagggggttgggtaggtggggttttttgtagatttttaatgttatattgggttgtgttttgtatagattggttgatttagagtagtgtttttttaaggtttaggatttggagaggtttgggttgaatattgaggatttggagaagttgtagatggtgaggttgaatatttttgggtttaggaataatatttattgtatggtttagttgttggataatttagatatggttgagtttatgaaggttggttggggggttttttagttgtttatttttatttttgttttggatgttttttagtgtaagttggagggttgtaggtttttgtatggttattattgttttatgtatttagtggggtgggtttttagtaagtggggggagagtttgaattggagttggagatatagtttttattaggttttgaggaagggggtgtgtaggattagattttttaggaaaggtaagagatttatgattaggggatagttgttttggtagttttgagagtattttttgttggtgaaggatgtggtaggtgttttgtggatgagaggaattattgtaggatgatagtttttgggtttttaaatttgtttttttttgttattagttattgagaagtgtattttaagaggtgggagttgggtagatttttttattttttttaggttgggagatagagttaggttgttgtgtttttattttagttttaagttttttaggtttagtggggtggttgggtgggttatgtgggattgattttttattgatttaggggtttgatgatataggttgatttatggttgggttgattgtttttttgttttgttttttgaggtttgttggttttttttttttatgatttgtagggttgttgtttttagatttttttttttttgtgtttttgaaggggaggttatagtttgagttggttttttatgttttattatgttttaaattagatatttggatgtttgggtgattttattttaggtagttgtaatagtggtagggtgttttaggagttttgatttgggggtttagggaatggagtttaggttttaggttagttttgaagttgttatgtggtttggggtaggttattttatttttgtggatttgttttttttttgtgaagttagggagttagaggttgtataaggtttttattgtttgttggttgtttggattttttgatgtaaggtggatattaaaaatttgtaaattaggataggtggtgtaaatggtgttgggaggtgtatatggaggtttttgtaaaagtagatttattttttagtgttgggaagtttgttttgggtttttgttgttggttgttttttttggtggtggattttggaatttttttatgtaggagttattgtttttttagagggggttttagaaattgtgaggttagttttttggagggatatgattaatttattgatttttattaatttttattagttttatatttataagttttatttatgatgtatatttaatgttaatattgtgtaaatttatatttaaaatttgtttggtttttaaattttttgtgttttatggttgttttggaaaggatttggggtggtggaagggtagttttttagagagaggagggattttggtggtaaggttaaaagtgtttatgttttggggatgggttggaggtt

SEQ ID NO: 3475 - DNA, 2455 bp, Artificial Sequence
  chemically treated genomic DNA (Homo sapiens)
gttgtttttgtaatgatattatatgaaataatttgaaatatgattttaattgtatttggtgggttttgttaattttgtaagttatggatagaatatttatttaaattgtagttaagtttaggtttatgggaatatgtgattaatttaggtgaatgaaagggattttaaaatattaatttttagtttaggtttttttaagattgtttgtatgttttttaatattattttagtttgagtgttatgtggattttgaatgtggatttgtgtgtatattgttgaaaaataagtaattgaaaattttaggtagtggggtggagtgatgatgaaagatattgagatttattgggaagttggaaatttttttttagttttggtgtttgggttgtattttgtttttttatttttttaaattatttttgtggtgtgagtgtgtttgtagtagatgttttttaattgttttttgtatttgtagtaggatgagtagtaaataaaattttttagatattgagttaaagaaggaaggggtttatttagttgggggtattggtaagatttttgttttaagagttgagttttttgagtgagtaatttttgtgtttttaattttaagtgggtgtgtgtgagagggttgtgattgattgagtaagttgggggtaagtgattgggagttgtatgtattgttaagtagattggaataaaataggatagggattttataatgtttttttatataatgtttgtaatttttagataatataattgattaggttaggggttgatttttaattattaggtttagggtgtggtgttgggttgttggtttgtggattttatttttgttttttagtttttattttttttttttttggttgtagaaattaggtataagataatatgagaggtggtttttttttttatattgatagtaaaattttaagggtaggaatatttttattttttaatattattttaataattaaattaaaattttttatttgagtgtaagggagtggtgatttttttaagttgggagtttttttattagggggttttttaagggtatttttgtttttagtgggggagttgttattttattttgttttgtttagtttgagatatgtaattttttttagtttttattttttgttgaatttttaaggtggggttggggggatgtttaggtttaggaaggaggttgggggtttggttgttggatgttgtttattggtagtttggattagagtaggagttttattattatttgtggggataggtgggatatatgtatttttggggttattttagattttttggaggatgttgattgatattgtttagtttgagaattattgtgtttttggagtagaggtttttttattgtttttgggtagtgggtgttgggtatagggtttttttggatgagtggggtgggtatgagagtatatggaattgggggtgggaggttggggtagttaaggaggagaaggaggaggtggagggggagggaggggaggaagaagaggaggaggagttttttgtggttatttggaggggagagatttggttgggaggtgttaattgagttggttgttgggattttgtatttaggtgtgttaatttttgggtgtatgttttttgtagatttttgttgaaggagtggtgggtggtgtgttgtgattttggtgggttatagattatattgtttgtagggtgttgttggggtgtgtagagtggggttgttttagggtggtttttttaggttggggtgtggtgggtggtggttgtgggtgtgtgttttatttgggttttgagtaattgttattgttgttgttaaagtttgttaatatggtggatttggaggttgtggtggttgatgttagttatttgatggttatggagaagagtaaggtgattttggttgattatgtttgtaagaggattgttttgtttgaatttatgtattatttgttttggtttgtgttggtttttgatgttgttgttttttgtggttgttagtgattttttgtgtttgggagaattgggagttgagttgttgttgttttggagtgggtgatatagtggagtgggtgatgtggggttggttttttggttttagtttttgaaatggggtattggagggtgggtggggggtattttgggagagagtgttttaaagtgtttggtgttgtgttttgtgtgtagttagtattttagtaaggggttggttatgatttggttggattagttttatttttgttgtttttttttttagttttgtttttttttgttttatttttgtggttttatttgttgtattggtgtggtttttttgggttttttgtttgttatttgtttgtgttttattttggttgttttttttttttgggttttgtggtttttttttttaattttatttttttagttttttttgggttgattatttggggattgtagg

SEQ ID NO: 3476 - DNA, 2455 bp, Artificial Sequence
  chemically treated genomic DNA (Homo sapiens)
tttgtagtttttagataattggtttagagggagttgaaaggatggagttggaaaggggaattatagagtttgggaagaaggagtgattaggatggagtgtaaatgagtgataggtaaggagtttaaagggattatattaatgtaataggtagaattatggggatgggataggagaggatagggttgggggagggggtgatagggatggaattggtttagttaagttataattagttttttgttggggtgttagttgtgtgtagggtgtggtgttaggtattttggagtgtttttttttggagtgttttttatttgttttttgatgttttattttagagattggagttaggaggttggttttgtattgtttgttttgttgtgttatttgttttgggatagtgatggtttagtttttgatttttttggatgtagggggttgttggtggttgtagggggtggtggtgttggggattggtgtgggttggggtaggtggtatgtgggtttgggtaggatggtttttttgtaggtgtggttggttggggttgttttgtttttttttatggttattaggtaattgatattggttattatggtttttaggtttattatgttggtgagttttggtagtggtggtggtggttatttgggatttggatgggatgtgtgtttgtggttgttgtttgttgtgttttaatttgggggagttattttggggtagttttgttttgtgtgttttagtagtgttttgtaagtggtgtaatttgtagtttgttagggttgtggtgtgttgtttattgtttttttagtgagggtttgtggggagtgtgtgtttaagggttggtgtatttgggtgtagagttttagtggttagtttggttggtgttttttaattaagttttttttttttgggtggttataaaggatttttttttttttttttttttttttttttttttttttgtttttttttttttttttttggttgttttgattttttgtttttagttttatgtgtttttatgtttgttttgtttatttggagaagttttgtgtttgatgtttgttatttaagggtaatggggaggtttttgttttggggatatagtagtttttaaattggatagtgttaattagtattttttaggaggtttaggatggttttggaaatgtatgtgttttatttgtttttgtaggtggtgatgaaatttttgttttggtttgggttattggtgaatagtgtttagtggttgggtttttaattttttttttgagtttgaatatttttttaattttgttttgagaatttagtgaagagtaaaagttggagaaaattgtgtgttttaggttaagtagagtaaagtggggtgatggtttttttgttaggaatagagatgtttttagggaattttttgatggaagagtttttggtttaagaaggttattatttttttatatttaggtgagaggttttagtttggttgttgaaatggtgttgagaaataagagtatttttgtttttggggttttattgttaatataagggaggagattattttttatattgttttatatttagtttttgtgattaaagaaagaaaaagtaaaaattaaaaggtagaaatgaaatttataagttgatagtttagtgttatattttgggtttggtagttaaagattgatttttgatttaattggttatgttatttagagattataaatattgtatagaaaagtattgtgaaatttttattttgttttgttttgatttatttagtagtgtgtgtagtttttagttatttatttttagtttgtttaattaattatgatttttttatatgtatttatttagagttgaaggtataggaattgtttatttggggagtttggtttttgagatgggagttttgttgatgtttttggttgaataaattttttttttttttaatttggtgtttgaggagttttgtttgttgtttattttgttataaatataagagataattagggagtatttgttgtgagtatatttgtattatgggggtgatttagggaagtggaaaagtgagatatagtttaaatattgaagttgggggggaatttttagttttttgataggttttggtgttttttattattattttattttgttgtttggggtttttagttgtttattttttagtagtgtgtatataagtttgtatttaggatttatgtgatatttaggttggagtggtgttaaggaatatgtaggtagttttaggaagatttaagttggaaattaatgttttaaagttttttttatttatttgaattggttatgtgtttttatgagtttagatttggttataatttgagtaaatgttttgtttataatttatagggttaatgggatttattagatatagttaagattgtattttagattattttatgtaatgttattgtagaagtagt

SEQ ID NO: 3477 - DNA, 2471 bp, Artificial Sequence
  chemically treated genomic DNA (Homo sapiens)
ggttttatgggtgggttttgagatgtggtatatggtatttagggtagggttgggaagggtggggtgtaggggtttttttggttgtagggtttatttattaggtgtttgggtttgttgtattgagtaggtatgggttttggttttttttattgttttttttaggtttagtttgtgtttagggtttaggatagggtttggttagtaggttttaggtttttaagatgtttttagtttttggagtgtgtgtgatgatgagtatttatggagttttttgtatgttgggttttgggtttttgagagggttattgggtggtgattgagttatgaggtggagggttagttttagggattttaggtgattttgtgttggtattatgttttttttttatgggtagttttgggtgtttttttttggttttgggtttagtggtttgtggtttgattttgtttatttttgtttggttgttttagtagtagtaggagtttatgttggagaaggtgttatggggtaggtggagggtttggttgatttagatgattttttaagtttttttttaatgaatatttgtttagtgtagttttttttttttaaattttttttatataggtagatatttttttggtttagggtaatttgttgagtttttgtttaaatatagtagttttgttgttttttaaatataattaatttaatttgggatttggggatttgaggtgggtagtattgggttttagatgagtttttattattttagatttatgtaggaagagttaggtagggtggggttttggggttatttggtgggtttagggttagggtattgtgatgtttttattttttatattatggggttttttggttgtagagttggggatttagttgggaatgttggttatagaggtagagagtttttattttgttgggttagttttgatttggtttttttagggtggtttagtgtttttttttgttttttttttggtttttattgtttatatttttttatttgtttattttggataataattagtatagtgtagtgtggttttgtagtgatattatttgtagagaggttaggtttagttttttttgttttttaaaaggttagtaggttttaggagttgggggtggggtttggttgtggggtttttatgttttaggggttagggtagattttttttagttggtaattattgtagattttttttttggttagtatttggggatttttttgtttttgttttgtttttttattttgtttgttgagatatagggttttatgggttttttttttggggttgggttgattgtggtttgtgaggggtagttattgtgttgggtttttttgttagaggtagaaattataaaattatttggaatatatatgttttaagtgatagatttaatttaattttataaatattgattttgtgtttaatttatttgttttttagtgttagtttatttttgagaagtttagtttggtagttgtagattttatttaattttagttttataatgttattagtttgtagtttgggagttgggtttatttaggttttggtaggtggggttagagttgggttttgatttttgtatttatatttattattatgtaaagtgttgggaagaggggtggggagttatggtaagttgagggtttaggtttgttttagtttgttagatgtttgttttggttgttttgatttagtagttaatttttgtggggtattgtggttatatggtgattttagtatggggatatttattagaaatggaattgatggattaaagtggaattaagtgaattgatttttttttttgggtattgaaatgttgtgtttaattaagtgattaattttgtgggtagggtggttgtggggatggaggtgggggataaggggatggtggttatggtggggattgaaaggtggttatggggatagatgaggtgagttaggtggttttggggttgagttttagtttagtttttggtaaagaggttttgtgtgtagaagtttgggtgtgatgttttttttttattgattgtgtgatattggttagttttgttttggttgagttttggtggttttgatgtaattttgtggggtttggtggtagggattgatttatttatttgtttatttatttatgtgtttgatatatattgtagtaaaggaaaggtgagagtagttataggttggttagggatgatttagattttagagtgtagtgtgtttgtttttttttttgtgaggtttagttttggtgtgtgtggatttttaggtattttttaggtttattttttattttgtagtgttttgtttatttgtttatatattttgttttgtggtttgattgttatttttttgttttgtggttaattggatggtttaagtggattgagttgggtagggtggttatatttgtggagtttgtggttgtggttggaggttttgtgggtagttga

SEQ ID NO: 3478 - DNA, 2471 bp, Artificial Sequence
  chemically treated genomic DNA (Homo sapiens)
ttagttgtttatggggtttttaattatagttataggttttataggtatgattattttgtttaatttagtttgtttgggttatttagttggttgtagagtagaaggatggtgattaaattatagaatagagtatgtggataggtgggtggggtattgtagagtggagggtggatttggagggtgtttgggaatttatatatattaaggttggattttataagaggaggggtgggtatgttatattttgaagtttgaattgtttttggttagtttgtggttgtttttattttttttttgttgtagtgtgtgttaaatatatgaatgaatgagtaaatgagtgaattagtttttgttattagattttatagggttatattaaggttattgaggtttagttgggataggattggttggtattatataattggtggggggagggtattatatttggatttttgtatatagggtttttttgttagaggttgggttggagtttgattttagggttatttggtttattttatttgtttttatagttattttttagtttttattatggttattatttttttgttttttatttttgtttttatagttattttgtttatggagttgattgtttgattaagtgtagtattttagtgtttagggagaaaaattaatttgtttggttttattttaatttattagttttatttttgataaatgtttttgtgttggagttattatgtagttgtagtgttttgtagagattagttgttaggttagggtagttagggtgagtatttggtgagttggggtaagtttggatttttaatttgttgtgattttttatttttttttttagtattttatatggtggtaagtgtgggtatagaggttagagtttagttttggttttatttgttagggtttggatgagtttagtttttaagttgtgagttggtgatattgtggggttgggattaaatgggatttgtggttgttaggttgggttttttaggaatgagttggtattggaggatgagtggattagatgtgaggttaatatttgtggaattgaattgaatttgttatttggggtgtgtatgttttaggtaattttgtggtttttgtttttggtaggaaaatttaatatgatgattgttttttgtaggttatagttagtttggttttaggagagagatttgtggagttttatgttttagtaggtaaggtagggggatggggtaggggtagggaggtttttgagtgttggttaggggaggaatttgtagtggttgttggttaaggagggtttgttttggtttttggggtatggaggttttatagttaggttttatttttagtttttgggatttgttggttttttaggagatgggggaggttgggtttgatttttttgtaggtggtgttattgtagggttatattgtattgtgttggttgttgtttagggtgggtagatagagggatgtggatggtgggagttaggggaagggtagaaggggatattgggttattttggagaagttaggttagggttggtttagtaggatgggggttttttgtttttatggttagtatttttagttgagtttttaattttgtagttaggaagttttgtagtgtgaaggatggggatattgtgatgttttggttttgagtttattaggtggttttagggttttattttgtttggttttttttgtatgggtttggggtgatgggggtttatttgaggtttagtgttgtttattttgaatttttaaattttaaattggattagttgtgtttagaaagtagtaaagttgttatatttgagtaaaggtttagtagattattttgggttaagagggtgtttgtttgtgtgagggggatttgaggaggaaaaattgtattaaataagtgtttattgaaaagaaatttgggggattatttgagttagttgggttttttatttgttttataatattttttttagtatgggtttttgttgttgttgggataattaagtaggagtggatggggttaggttataggttattgggtttaaggttaggaaggggtgtttaggattgtttatgggagaagggtgtggtgttgatatgaggttatttggagtttttgggattggttttttattttgtgatttagttgttatttggtggtttttttagaagtttagggtttagtatataggaagttttatgagtgtttattattatatatattttagaggttgagaatattttggaggtttggggtttgttggttagattttgttttgggttttgaatataggttgggtttggaagggatagtgaggggggttagagtttatgtttgtttagtgtagtaagtttaggtatttggtgggtgggttttgtagttagggaggtttttgtattttattttttttagttttgttttgggtattgtgtgttatattttagagtttatttatggggtt

SEQ ID NO: 3479 - DNA, 2371 bp, Artificial Sequence
  chemically treated genomic DNA (Homo sapiens)
tttttttagtttggagttatttttgaggtttttgttgttttttgaggaggaagaaaatggatttttttttttaggtttttaggttttatgttttaggtttttttatttttttttttttttttttttttttttttttttttttttgagatggagttttgttttgttatttaggttggagtgtagtggtgtgattttggtttattggaatttttgttttttgtgtttaagtagtttttttattttagttttttaagtagttggggttataggtgtgtattattatttttggttaattttttgtatttttagtagagatggggttttgttatgttggttaggttggttttgaatttttgattttaggtgatttgtttttttggttttttaaattgttgggattataggtatgagttattgtgtttagttttaggtttttttatttttgttttttttttgattttttttttttaaagaggttttttattttaagaagtgtttggtttattggttttggttttgttttgttgatagttagttattttttgagtttagttaggagattgaaaagttttattgtatttttttaagggttttatagttaggaaaattagtaaaggggaatatagtgtttgtagattggtgaggtttagggttgttttataaaaatggatttttggaaaaatataaattagtaatttattttgtgaattttattggtttaaaaaaaaaaaaaaggttattttatttgaataatgaagagagataaattatttttagttttttttttattagtgaataaggatataaatatttaatagaaatggaatatttatataaagttttaggtttgatttattagttattttagttttataaaatttagtatttttattaaaataaaatgatgtttaaaaggtttgtttgtttttaagaaaattgtatttaatatagggtaagattttgttatggtttatttatttatttatttattttttaaataaagtttaaatttttttgattttatgtttgttattatagttggagggaaattgattttagaatttatttgatatgttggatttttttgtggtatttattttattgtttagtagttagttatgatgttataagtttattagatttttggtagggggaaaatgttggggaattggaaagaatggatgttttttatttgttaggaaggtaggggaaggagttgggtatgtttgggaggagaagttgtgtggttggtgggggataggagtaggtttaatgtttgtgatattaaatgttaggtagaaatttgaaaattttagttatttagatgtttttttaatatttagatgtttggtattgagtagattatgtttttgttttttaggaggtgtttagtatttgggttttgattttaggtttttgggtgagtgtatattgttaggagttgtatatttttgtggttgtttatttttgggtttgggattttttttttaaatttttatatatagatgataggagtaattaggtttagatttttaaaagttgttgaagtagtgatttgagaagtttagtttttggaatgttatgtaagttaaaaaggaggaaaaaaaaaaaaaaatttttagttaatatatatataaatatatgtgatttttaagttataggatttaagaatttaaaataaaattagtaagtttgagaattagggttggagattgatattgagaagtgttgagtttttttttaggagtatgtttttttttaaattagaaaaatattgtatagttttgttttttttgataaagttttttgtttttagggagttgatagttgttaataaaagtatagggtggaatttatttatatgtaggttgggttttaaggagttattaagtgtagaaatggaaatggttttgtttaggagttttgtttttttgtgattggtaatggggatttttggagtttgggggagttttgtaggttatagatggagtagggttttggttttttggtgtttggttaagtatttgttttatggaagttattatttaggtttgtgatattatagttaattgtttttgataatgagttaggaattgtaggttttttagggttgtaagtttgagattttatagggagttgggaggagaggtagttggggaggggttattgttaattaaaatttagtgtttagataataagaaagaagtggttgagggggatagtattgtttttggtggggagagggtaggaggaagtgggtgtgtggaaggggttgagggtggggtatttgtgtttttattttttattataatttttatttttagtttttatagatgaggatattgaggttaggggtggttgagtggtttgt

SEQ ID NO: 3480 - DNA, 2371 bp, Artificial Sequence
  chemically treated genomic DNA (Homo sapiens)
gtaggttatttagttatttttggttttaatgtttttatttgtaaaggttgggggtggggattgtggtaggagatgagggtataaatattttatttttagttttttttgtatatttatttttttttgttttttttttattagagatgatattgttttttttaattattttttttttgttatttgagtattgggttttaattggtgatggtttttttttagttgtttttttttttggttttttgtgaagttttaggtttgtagttttgaggggtttgtagtttttggtttattgttaggggtaattagttgtgatgttataagtttaggtggtgatttttgtggggtagatgtttagttaggtattaggaggttaggattttgttttatttgtgatttgtggggtttttttaggttttaggggtttttattattagttgtagggaggtagggtttttaggtaaagttatttttatttttgtatttgatggttttttgaagtttagtttgtgtgtaaatgagttttattttgtgtttttgttggtaattgttggttttttggaagtaaggggttttgttaggaagaataaagttgtgtggtgtttttttgatttgggggaaagtgtgtttttgggggagggtttagtgttttttagtgttggtttttagttttggtttttagatttgttggttttgttttgggtttttaagttttatggtttaagagttatatatgtttgtgtgtgtgttggttgagggtttttttttttttttttttttttttggtttatatagtgttttagagattgaattttttaaattattgttttaatagtttttaaaaatttggatttagttatttttgttatttatgtgtaaagatttagaaaaaaaattttaaatttaagggtgggtagttgtgaggatgtatagtttttggtagtgtgtgtttatttggagatttgaggttaaagtttaaatgttgagtattttttgggaggtgggagtatggtttgtttagtgttagatatttggatattgagaaaatatttgggtagttggggtttttaggtttttgtttgatatttaatattataaatattgagtttgtttttgttttttattagttatgtggtttttttttttaaatatatttagtttttttttttgtttttttgatgggtaagaaatatttattttttttaattttttagtgttttttttttattggaaatttgatgggtttatgatattatggttggttgttgagtgatgaagtggatgttataaagaaatttgatatattagatagattttgaaattggtttttttttagttgtagtaataggtgtgaagttaggagaatttgagttttgtttaaaaaataaataaataaataaataaattataataaagttttgttttgtattaaatgtaatttttttaaaaataagtaaattttttggatattattttattttaatagaaatgttgagttttatgaaattaaagtggttaataaattagatttgaagttttgtgtgagtgttttatttttgttgagtgtttgtgtttttatttattaataaaagaggagttaggaatggtttatttttttttattatttaaatgagatagttttttttttttttttaggttaataaaatttatagggtaaattgttggtttatgtttttttaggaatttatttttatggagtgattttggattttattggtttgtagatattatatttttttttgttggtttttttggttgtgaagtttttaagagaatgtagtaaagttttttagttttttggttgggtttaggggataattggttgttagtagggtgggattaagattagtgggttaggtgttttttggaatgagaagtttttttgaaaggagagagttaagagaggaatagaagtaaagggatttggggttgggtgtggtggtttatgtttatagttttagtaatttgggaggttaagagggtagattatttgaggttaggagtttaagattagtttggttaatatggtgaaattttatttttattaaaaatataaaaaattagttaggagtggtggtgtatgtttgtaattttagttatttgggaggttgagataggagaattgtttgaatatgggaggtagaggttttagtgagttgagattgtgttattgtattttagtttgggtgatagagtaagattttattttaaaaaaaaaaaaaaaaagaagaagaagaagaagaaaaagtaaagggatttgggatatgaagtttaggggtttgggagggggaatttattttttttttttttaaaagatagtaaggattttagaaataattttaggttgaggggg

SEQ ID NO: 3481 - DNA, 2467 bp, Artificial Sequence
  chemically treated genomic DNA (Homo sapiens)
aggttttgtttgttattttggttgttttttgtttaaggttttgtttgttattttggttgttttttgtttaggtatgtttgttttttattttagtttttttggtaggttgtggatgtttttatatttttttgttttggtatttgtgtttttatttgaatgttttttttttttgtttgaatgttgttaatttattttttaggttttagtttaaataatttttttttggaagttttttttgattttagttgggtaggagttttttttgtgtttttattgtttttgtatttttttatttatgttagtttttattattgtttgttttttttgagaatgttttttttttatttttatgtattttttttttaattttatgtttggtatgtatttggtgtttagaaagtgttattgagtgattgaatgagtgaaggaatagtgaatgaattagtttttgttttgttatgattattgttatttttttgggtaagttattgtttttttgagttttagtttttttatttttaaaatatttttgtggttttgtttgtttttagattgtaagttattgtatatatttttgaagttattaatattaatgttgtagggtatgtttgtaggtttgttagttgggtttgtgtttttaaaattgtgtggtggttgttagggattttggttagtgaatgtagaaaggggagagattttgtttttgagagtagtagtaggaagagtaggggttttggaggtagttagttttgggttttaatttttgttttagttttttttggttgtgtgatttatagtaatatgtttttgagttttggtttttttatttataaaatagggttatagtatttgtttgtagggttgttgggtggattatatgaagttaagtttttttaaaatttagtttggatgtggaaagtgttagtaattaagagttttttatttttgtagtttaaggaatagtaggtggagtttgtatgtgggtagtggtgttttagatttgtttttttgttttatatataatgtttttttagaaggaagggaagagttaggaggggaggggtaggggtttataggttgtattaaatggtggttttttattgtaaaatttagtttaatttgaattttagtattagagggtttatggggtggagttttgggatttttagttttgtttttttttaggttaggtgttatggtgtagatttgtatggtttttttttgttttttgttgtaagtttttgttgtttattgtttttgtgtaaggtgttttagtttgtaatttagtagtgtaggttgggtttgaagaagtgggagtgtgtgggtaggtagatggggtgtatggtggttgagtgtattattgggtggttgagttgtagtagtgttatgttgtagttatggttgttttttttgtggtatgggtgtaggagtaggtggtttattttgaaggatatttttttaggttagtgtgagttttgttatattttgtttaggaatatggtttatagtattgtggaggttatgttggggtggggtggggtggggtggggtggggtgaggtgaggtgggaggaagttgtttttttttatttagggatttttaagatagttagatttttgtttgggatagtgttttttatatttagtttttttttttttttttgaaggttgtttagttggtggtatagtgtttagtttttatttatttggtttgtttgggttttatgttttagttttatttttttttagatatgggtgtgtttttttaagtttttgttattttatttgtaaatgggaatggtattttttatttgaatgtttttgagagaatttaataagattgtgtatttaaaaaatgtagtatagtgttaggtttttgatatagatttttttttttttgtgtgttttatagatttaggttgttttgaattttttgaggttggtgggttttagtggggagtgggtgggagttgagtgtggaggaattggattgtggtagttagttgtttgggtggtagatgggtagtttttgggtttttattttttatttgagggtagtggggagtttgagatggggttaaagagagttaggtggttagagtgttttgtgttttagagaggatataaaaggggatttttgtgtagggtttgggggtgggatttggagtttagatttgtttgggggtggattgggggaggttttagtttattaagtagatgggaaagatggttatgaggtttgatgagatgttttttgggggttttttagttttatttgttattttgtgttatattttggggagtgttatagtttatgattaggttgggtagttttgttttttattgaatttttagtatttagtatagttttggtatatagtaggagtataagtgttgttgaatgagtgaatgagatgaatgaatgaattattggtttaatttaaagtaagatattaaaagtagatggt

SEQ ID NO: 3482 - DNA, 2467 bp, Artificial Sequence
  chemically treated genomic DNA (Homo sapiens)
gttatttatttttggtattttgttttaagttgggttagtaatttatttatttattttatttatttatttagtaatatttgtgtttttattatgtgttagggttgtgttagatgttggggatttagtaaaggatagaattgtttaatttggttataagttatgatattttttgaggtgtgatatgaggtagtaggtggggttggggagtttttaggggatattttattaggttttatggttattttttttatttgtttggtgggttgaaattttttttaatttatttttagatagatttgggttttagattttgtttttaggttttgtatagggatttttttttgtattttttttgggatgtagggtgttttgattatttagttttttttaattttattttaggttttttattgtttttaggtagagggtagagatttgaaggttgtttatttgttatttaggtagttgattgttgtagtttaatttttttatgtttaatttttatttgttttttattaggatttattagttttagggaatttagagtagtttgggtttgtaaagtatataggaaaaaagaaatttgtgttgggggtttggtattgtgttatattttttagatatatggttttattggatttttttaagaatatttgagtagaaaatgttatttttatttgtagatgaggtggtagaggtttagagaggtatatttatgtttagggagggatgaagttggggtgtggaatttaggtaggttgagtgggtgaaggttgaatgttgtattattagttaggtgatttttagggagggaagggagggttgggtgtggagggtattgttttgggtggggatttggttattttgagggtttttggatggggagaggtagtttttttttattttattttattttattttattttattttattttattttagtatggtttttatggtgttgtggattgtgtttttgggtaaggtgtggtagaatttgtgttggtttggagaggtgttttttaaggtgagttgtttgtttttgtatttgtattatgaagaggatagttatgattatgatgtggtgttgttgtagtttgattatttggtggtgtgtttggttgttgtgtgttttgtttgtttgtttgtgtgtttttatttttttgagtttggtttgtattgttggattatgggttggggtgttttgtgtgagggtggtgagtagtggggatttgtggtgggaggtggagggagattgtgtggatttgtgttgtaatatttggtttggagaagggtggggttgggggttttggggttttattttataggttttttagtgttgggatttaaattgggttgaattttatggtagaaaattattatttaatgtggtttgtaggtttttgtttttttttttttagttttttttttttttttggaagggtgttatgtgtggggtaaaggggtaggtttgggatgttattgtttatgtgtaagttttatttgttgttttttgggttgtaagggtggaaggtttttaattattagtattttttatatttaggttggattttaggggaatttgattttatataatttatttaatagttttatgggtggatgttgtggttttattttatggatggagaaattaaggtttagagatatgttgttgtaagttatatagttagagaggattggagtaaagattagaatttagggttggttgtttttagagtttttgttttttttgttattgtttttagaaatagggttttttttttttttatgtttattgattagagtttttggtggttattgtatagttttggggatatagatttagttggtaaatttatagatatgttttgtagtgttagtgttggtggttttaaaaatgtgtatagtgatttataatttggaagtaggtggggttgtagagatattttaaggatggggaaattgaggtttagaggaatagtgatttatttaaggggatggtagtggttatggtaaagtaaaggttggtttatttattatttttttatttatttagttatttaatgatattttttgagtattaagtatgtattaggtgtggggttaggggaagggtatataaggatgaagagagaatatttttgggggagatagatagtggtaagagttgatatggatggggagatgtaggaatagtggagatatagaggaggtttttgtttagttagggttaggggaggtttttaggggagggttgtttaagttgaggtttggaagatgagttggtaatatttagataaaggggaaagatatttaggtgaagatataggtgttaagataggaagatgtgagaatatttgtagtttgttagaggggttgaggtggggggtaggtgtgtttgggtgaggagtaattagaatggtagatagggttttgggtgaggagtaattagaatggtagatagggttt

SEQ ID NO: 3483 - DNA, 2340 bp, Artificial Sequence
  chemically treated genomic DNA (Homo sapiens)
gatggtggtgattggtggtgttgaggtgggatttgggtgagttgagtgaaggtagtggtgagtggagattttaggagattgggttgggtttttattttgaggtggtagtagttttgttttgttgttatttgttgttttgggtttgtgatattatttttggggtgttttaggttttttgtggtttagtttaggggttgagttggggattggagtagtggttgtagttgtttttaggaaggggttggagtgggtagaaggaggagggtgggtgggagttgtttaaatggggaaggtgggaaagttgtggggttgggagggggtgtgtggttgttttgggggtttgtggatttgggttgtttttttttttgtttgggttgtttttgtttttgggggtgttgtgaggttgttggagatgtgggaatttgggtttaggttgagttgtgtggtttggaatttgtgatgtgggggttttttgggttgttagggggaaagggtttgtggttgtggttatgggagggttggggttgtggttggtaggagaaagtatgaggagtttttttttttttttttttatagagttttgttgagttagttgttgttgtaaaattgttgggagaattttattggtttgttttggggattataaaaatggtggttttgggggttgtttgtgtaaattatttggtattttgtgtgttttttgtgtgtaatttggtttggttgtgtttttgtggtgggtgttttttttatgtaggtttattttttttttattaattattatttgtagatttattttatagtgtgtaaaagtggagaaatatttttgtttttttttttggagggttaagttggtggttgattatatttttttttaatagaataaagtaaaaaattgaattttaaataaagtttgttgattggataaggttttttaaaatttgattgttggttttatggaatgtgtgttgttagttaatttgtgtggtggttgtggttttgtttaattgtattgtaatgagaggatttaatttttatttttgattgttgggatttttgtagtttttagagttggtaggggttgggagtgttgtttaggtaggtttttggagaagggagtggtaagaggatttggagttattgtgtttggagattggaagaaatttggatgaagttgagaaggtattatttgtttgtattgtagaagtaataagaaaattttagaaattggtaattggtggatgtgtatttttttttatttgtattgattggtattttgagtttttgaaaggagtggttggaagaagagaatgtagaattttggatatggtttttattttggaatagatttggagtttagaattttttttattgtttgtgtgatggggtttattttgtttttttttttttgatatttatttatattatggggtgaagaaggttgttgattgtaggagtttaagttattttaaaaaaagtttgaaatttgttttttaattgtaatttgaagttttaaaatgataaagtgttatatttgaggattttttttttttgattattttggttattttaaaggtttatgtttgaatataatttgtatgtttatttattagggaaagagtaattttgttttttttttttttatattttgaagaaaagtttttgaagagttatttaataatttgtgtattttataagtatatatttttatggtattagttttttatttgtattaatagtatgaaatagtgaatttttatttatgttgttatattttagtatattgagataaataaaattatttttgttttttggagttgataatattgaattttataaatttttaaattattgaattgagattgggttttaatatttgttttatatttgttaatatttaatgtaattatgattttttttttttaatgtgaaaattaaatttaatatttatttttattaatttttataatttattttttatttttgaattttgaatttttatagattgtatttaagatttggaaggaatattaggggtttatttgattttatataaatgttgtttgaattttgttttttttttatattgttgtttgagatttatttggtatttttttaaaattaaattttgagttgtaataatattttgattttaaagaatgtagaaatttagggtttattggtttgtttaagttgtggttgatatagtttgttgtgtttaattttagttttttaagtttttggttgttttagttttttagtgaattggatgtgtttttaggttttatttttttttttttttttaggttatttaatttagtaatttataaaatgttttttagt

SEQ ID NO: 3484 - DNA, 2340 bp, Artificial Sequence
  chemically treated genomic DNA (Homo sapiens)
attgaagagtattttataaattattggattaaataatttgaagaaaaaagaaggaatgaggtttgaagatatgtttaatttattgaagaattggggtagttaagagtttgaaaaattaaaattaaatataatggattgtattagttatagtttgggtagattgatgggttttgaatttttatgttttttaaaattaggatattattgtagtttagggtttagttttggaaagatattagataaattttaagtaatagtgtgaaagaaaggtagagtttaggtaatatttatataagattagatgaatttttgatattttttttaggttttgaatataatttgtgaaaatttagagtttaggggtagagagtagattgtgaggattaatgaaaatgaatattaggtttgatttttatattagaaaagggaggttataattatattaaatgttggtaaatgtgaaataggtgttaaaatttagttttaatttaataatttgggagtttataaaatttaatgttgttaattttaagaggtaagaataattttgtttgttttagtgtgttaagatatgataatataagtaaaagtttattattttatattgttgatataagtaaaaaattggtattataaaaatgtatatttatgaaatgtataaattgttaaatagttttttggggatttttttttaggatatgaaaaaggagggggtagagttgttttttttttggtagataagtatataagttatgtttaggtataggtttttgggatgattaaagtaattaggaggaaaaagtttttagatatagtattttgttattttgaaattttaaattatagttaaaaaataggttttagattttttttgaggtaatttgagtttttgtaattaataattttttttattttataatgtaaatgagtattgaaaaaaaggaaataaagtaagttttgttatatggatagtaagagaaattttgaattttaggtttgttttaggatgagagttatgtttaagattttgtattttttttttttaattattttttttaagaatttaaaatgttagttagtgtaggtaaaggaagatgtatatttgttggttgttaatttttgaaatttttttgttatttttatgatatagataagtgatgtttttttaattttgtttaggttttttttaatttttgaatatggtgattttgaatttttttgttatttttttttttagggatttatttaggtagtatttttagtttttgttagttttggaagttgtagagattttgatagttggggatggggattgaatttttttattgtagtgtaattaagtggaattatgattattgtatagattggttgataatatatattttataagattagtaattgaattttgagaagttttgtttaattaataggttttatttgggatttagttttttattttgttttattaggaggaaatataattagttattagtttagttttttaaaagaggggatagagatgtttttttgtttttgtatgttataaagtgaatttataagtagtagttggtggagggaaaatgggtttgtatggagaaggtgtttattatgaaggtatggttaagttgggttgtatgtaagaaatatataaaatattaggtgatttatataaatagtttttaggattattatttttgtggtttttaaggtaaattagtgggatttttttggtagttttgtggtaatagttagtttaataaagttttgtgaagaggaaaagaagaaagttttttgtatttttttttgttagttgtagttttagtttttttgtggttgtggttatgagttttttttttttgatagtttgagggatttttgtattgtgggttttgagttgtatagtttgatttgaatttgggtttttgtgtttttggtggttttatggtgtttttgagggtggagatggtttgggtagggggaggggtggtttgggtttgtaggtttttggggtggttgtatgtttttttttggttttgtagtttttttgttttttttgtttgaatagtttttgtttgtttttttttttttgtttgttttagtttttttttgggggtggttgtggttgttattttagtttttggtttggtttttgggttaggttgtgaagggtttggggtattttagaggtgatgttgtgggtttagggtggtgggtggtgatggggtggggttgttgttgttttagggtgggggtttagtttggttttttggggtttttgtttgttgttatttttatttggtttgtttggattttgttttaatgttgttgattgttgttatt

SEQ ID NO: 3485 - DNA, 2468 bp, Artificial Sequence
  chemically treated genomic DNA (Homo sapiens)
atgtttattttgtagaatggtttatatttaaatagatgatttttgtttttgagatggaattttgtttgttatttaggttggagtgtaggggtgtgattttggtttattataatttttgttttttgggtttaagtgatttttttgttttagtttttttagtagttgggattatagatatgtattattaatgtttagttaattttgtatttttagtagagatggggtttttttatgttggttagattggttttgtatttttgattttaggtgatttgtttgttttggttttttaaagtgttgggattataggtgtgagttattatatttagtttataggtgattttttaaattaatattgagattatagtattatgttttttttaaagtagtttggtgaggataattttttatttttattttaaaaaggaataaagaaaattgtagtatgaataaaattagaatggagaatgggttattttttggagtggtttgagttaagagggagttgttttttgtttgtgtttgtttttttgagggttttttgggtatagttgataaattatttaagtttgaaagatatatgttattttattaatatagttatttttttttattgttttagtggtgaaggtgtttgtattgtaatatggaggggtattaaatgttttgtgggttttagtttgttgttataggttaggtttgtttgtagttaagaaggttgtttaaattttagatgttatttggaggtatgaggatttgagtttagaggtggtagtgttttatttagggaagttaatagattgtgttttaggttttagttttgggttgggttaggattaaattttggttttttttttttggtattaaggggattagtgtttggttgtttgtagggggttagagtagggagggttttaggaagggttttagagtgggtttataggggatttttttttttggttttttggagtttaggttgttgagggtgtaaagttgtatgttattttgggtaagttgggtttgtagtgtgggtgtggtgaggatgtgtagtttatgtagttgtttttaagagtaagagaaagtgttggggtttttattgtagttgttggtgggaggtatattggggtagttggggtgtgttattagtttggttgttagggtgtggtttgttagggtattttttaggatttgtgttagggttttggatatgtggtgagtggatatgtgttggttgtaagtgtttaggtttatgaaggtgtttgtttatttgtggggggtgggatattagaggtgggattaggttgggttatggttaagggttaggtaggttagggaagggatggtggggtgggagggggtaattggggtggtggtagtggttgatgttagatttgtttttgggttgagaaatggatatagttagttaggtgaatagttagtgtggagggatagaggtagttatggtaggagatggggtggggagttttattgtaggttgtggtgggagaaggggtttatggtggtttgggtgttgtgttttatggtgtaggtgaaggtatgtgtgggggtttttagttaagtgtagttatttatattgtgttttagtggtagttgtgtaaagtgtattttataggtttgtagtgttttggtgaatatttggtatatgtttgtgggtggagtgggttagggaggagtatgtttttttatttgggggtattgaattttttttatttttttagttttgtttgggagtaatgttttttaaattgggattattaattatgtatttgggagtatgtgtatgtgttggtgtttgtttgtgtgtgtgggggttttgtttagtagtttttggaagtagtttagttgggttttgagttttttttgtatttagagggtgagtgagagatattttgagtgattgggagtagttgttgaggatattttttttgtgtttttgtgtgatggttttagtgtttgaatgtggaagttatttattgttagtttttaatggttttatagtattttttgggtggagttttgggggtttttgtgagtatttttttgtagttgtggttttgtatttgaggtaaatttatgtttttggttgttattgttttttggaattttattttgttaaggaagaagttttttgggttgagtagtgatgaggtgttatggtgggttggatttatggggtggtttttggataggttggtgtggaggtttgtggggatgttgtgtttgagggtggagtgtgagttggagtattagtggttgtggagttgtgtgttttaagttgattgttgttttgttagaggttttttttttatttgtgggttagttttgttgtgttttttgtggttgtattgttgattagtagggatatgttggttatagttttggttagaaaggtttttatgatatttttattgtgttgtgggtagtaattaaagttgtttgtggtgatt

SEQ ID NO: 3486 - DNA, 2468 bp, Artificial Sequence
  chemically treated genomic DNA (Homo sapiens)
ggttattgtggatgattttggttattgtttgtgatgtgatgagggtattgtggaggtttttttggttggggttgtgattagtgtgtttttgttggttaatggtgtggttatggagagtgtggtggagttggtttgtaggtgaggggagggtttttagtagggtggtgattggtttggggtgtgtggttttgtggttgttagtgttttagtttgtgttttgtttttaggtatagtatttttatgggtttttatgttaatttgtttgagggttgttttgtgggtttggtttgttgtggtgttttattgttgtttggtttggaaggttttttttttggtaagatgggattttgggaggtggtggtggttggagatgtggatttgttttaggtgtggagttgtagttataggaggatgtttgtgaggatttttagagttttgtttggagggtattgtgaggttgttaggagttggtggtggatgatttttgtatttaaatattggagttattatatggaagtatgaggagggtatttttggtagttatttttggttgtttaaggtgttttttgtttgttttttaggtgtgggaggagtttgaggtttaattaagttgtttttgggagttgttgggtagggtttttatgtatgtggatgggtattagtatgtgtatgtgtttttaggtgtgtggttagtgattttagtttggagggtgttatttttaggtggggttgggggagtaggggaagtttgatgtttttaggtgaaaggatgtgtttttttttgatttgttttgtttgtaggtgtgtgttaggtgtttgttgaggtgttgtaggtttatggggtgtgttttatgtgattgttgttggagtgtggtgtgggtggttgtatttggttggaggtttttgtgtgtgtttttgtttgtgttgtggagtgtgatgtttgggttgttgtgggtttttttttttgttatggtttgtggtgaggttttttgttttgttttttattatagttgtttttgtttttttgtattggttgtttatttggttagttgtgtttgttttttaatttggaagtgagtttggtgttgattgttgttgttattttagttatttttttttattttgttgttttttttttagtttatttagtttttggttatggtttggtttggttttatttttgatgttttgttttttataggtggatagatgtttttgtgggtttgagtatttgtggttggtatatgtttgtttattgtgtgtttggggttttggtgtgggttttggaaggtattttagtgggttatattttgatagttgagttgatggtgtattttggttattttagtgtgttttttattggtggttgtggtgaaggttttgatgtttttttttgtttttgggagtggttgtatgagttgtgtgtttttattgtgtttatgttgtgggtttagtttgtttaggatggtgtgtagttttgtgtttttgatgatttggattttaagaggttaggggaggaggttttttgtgagtttattttggaattttttttggaattttttttattttgattttttatagataattaagtattaatttttttagtattaagaaaggggagttaggatttagttttggtttagtttagagttgggatttggagtatgatttgttgatttttttgggtaggatattgttatttttgggtttaggtttttatgtttttaaatggtatttagagtttgagtagtttttttggttgtaggtaggtttagtttgtggtagtgggttagggtttgtagagtatttggtgtttttttatgttgtaatgtaaatatttttattattggggtagtggggagagatggttatattaataaaataatgtgtgttttttaaatttgggtggtttattagttgtgtttaggagatttttagagaaataagtatggataaagagtagtttttttttggtttaaattattttaggaaatggtttattttttattttggttttgtttatgttgtaattttttttatttttttttagggtgggagtgggagattgtttttattaggttgttttggaagaggtataatattataattttagtattgatttaagaagttatttgtaggttgagtgtggtggtttatatttgtaattttagtattttgggaggttgaggtgggtagattatttgaggttaggagtgtgagattagtttgattaatatggagaaattttatttttattaaaaatataaaattagttgggtattggtggtgtatgtttgtaattttagttattggagaggttgaggtaggagaattgtttgaatttgggaggtggaggttgtggtgagttgaggttgtgtttttgtattttagtttgggtaatgagtgaaattttattttaaaaataaaagttatttgtttagatgtaagttattttatgggataggtgt

SEQ ID NO: 3487 - DNA, 2782 bp, Artificial Sequence
  chemically treated genomic DNA (Homo sapiens)
tttttttttttttttaggtggtagaaatttagttttagttaaagatatatagaatttttgtagtttgattttttttttgtttttttttttttgttttgtttaattttggtagtttaagttttaagatagaggagagatagatatgttttttttttaagatggggggttttgaaagattgatgtttattagagggttgaaaaggggggttgtttttggagtagagtaaagtgaggatttagtggggttatggagtaatagggggttaggttttgttttttttattaatttagtattaattgttttttgtattaatagttattgattgtttatagggttttgggtattgttttaaaagtggggattaggaggaaagttttttaatggggttgatattttagtagagaaagtaggtaataaataatgaaataaattagaatataggaagagttgttatagaagaggttttttaatgtggggaggggaagataagatgtggagaggtatttatgaggtttatgataaatattttattatttttgtttagttagttttttttttttttttttttagatgtgtatatatatatatatatatattttttttttttttttttttttggtttttgtattagattttttaaattttgtttgatttgtttttgtatatttttagggttttgggattttagtagttggttttttgttttttagggttattagtaaagttagaggaagttggatggtaaagggtagtggggttttttatttttttttggaagaagtgtgttgaggttagatgtgttatgtgatagtgggatttgtttttttggaagttagtttagttggtggagatggtattttagaggttttggtaggttttttatttagttttgttttatggttgtttgttgtttgttgaaagattagtttgagtatgattaggatgtggatagttttaaggttatttttattagtaggtttgttttgatttttttagtattggttattatagtttttttttggattgatttttgtgtggttttatttttatgtaggtttttttttttagggttagtttgaggtttatttaggtttagtagtaaagtgttttataaattgtaaagtgttatatatattgtgtttgtggttatgtgtttaagaatgttgtgattaaagtgaggagaaaggtagtttttgtgttatagtttttattttagatatatgagtttgtggagttgtgggaaagaaggaggaggtgttggatgaagttggaaatggtaaggggaggttggggaaatatttagttgttagtggtttttttggggtatgttgggattagttaagagaatgtaatagttaggggtgggagttttttttgtggttgtatatgttaggtttttttagttttgtaggtttaaatgaaggtttatgtgaagggggaattgttttggatagtttagtgttttttagagttatattattattattttttattatgtggaggtggttgaaaaaaaggagttatagatgggtaaggtttgaggggtgttgggttgatgaggtaaaaaaaaaagtaggtgttgtggtgttgatgggaggtttttttttttttataggatgttaggaaggaaatggggttgttatagaggtggtgaggtgttagggtttatggagggtttatttgttgtgtgggggtgagtattaggtgttgggtgtatgggggtttgtgtgtgtttgtgtatgtgtgtgggtgtgtgtgtatgtgtgtttaggttgtgtgtgtaggggttgtgtgtgtgtttgtgtgtggtgtgtgtgtgtgtgttttgtgtgtgtatgggtgtggtagaggtgggtgtgtgatttggttgtggtagtgtgtgtttgttgttttgtgtgtttgtttgttggagtgtagtattgtttttggttaggagtgtgtatgtgtggggtgagtgagtgagttgggggtttgggtggggtgggttgtggagagtagttatggggtgttgttgtttttaggatgttttggtattgggtttagtttttaggttttatggtgaggtgaggtggtagttggggttggttggttattttttttttaatagttggttgtggtttggggggttgtgggagaggtggagagggggtgttgggaggggtttgaaggtggtttggttgagttttgtgtttttttttttgggtgtgggttgtggggggtggttgtggaagggtggggtttttgggtgggtggtttgtggtttttgaggagttttgagaataaaaggagatggtgatggtttttttgtggttaaaataatttgtgttggtggtagtttaaggttgggttgtggtttttgagttttttgttttaatttttttgttgttgttgttttttttttgtgtttggttggaggttgtaggggttgattttttttgggagttggtgaggtgtgggtgaggtgtggatttttggttgtagttgggtggaggtgggatggtatttagttatgttgtgtttttggttgttttttttttttttttattgtgtgtgttgttttgttttgtttttttttttatttggattttgggtagatttgttaatttatggttatgtgaggttgggaggggtggggatggttttgattttagtgtttttttagatgtttttatattttattttttgtgtagttaggtttttgtaggtggtgtgttttgtattttgtatgtgggggagagaggtgtttttttttgtagggtgtgggtataggtatggtaaggt

SEQ ID NO: 3488 - DNA, 2782 bp, Artificial Sequence
  chemically treated genomic DNA (Homo sapiens)
gttttgttgtatttgtgtttgtgttttgtaggaggaagtattttttttttttgtatgtagggtgtggagtgtgttgtttgtaaaagtttagttgtatgggagatggggtataaaaatatttgagggagtgttggggttggagttgtttttattttttttagttttatgtagttgtgagttggtaagtttatttggaatttaggtgggaaagggggtggggtaggatgatgtgtgtggtggaggggaggagagggtagttgggagtgtggtgtgattgggtattgttttatttttgtttggttgtggttgggagtttgtattttgtttgtattttgttggtttttggggagggttggtttttgtggtttttagttaggtgtaggaaggaggtagtggtggtgaaggggttaaggtggagggtttggaggttgtggtttggttttgggttgttgttagtgtaggttgttttgattatggaggagttgttgttgtttttttttgtttttggggttttttgagggttgtaggttgtttgtttgggggttttgtttttttgtggttgttttttgtggtttgtatttgggagggaggatgtggggtttggttgggttgtttttaggttttttttgatgttttttttttgttttttttgtagttttttgggttgtggttagttgttggggagggggtggttggttggttttagttgttgttttgttttgttgtgggatttgggggttgggtttggtgttagggtgttttgggaatggtggtgttttgtggttgttttttgtagtttattttgtttgggtttttgatttgtttatttattttatgtatgtatatttttggttggaggtgatgttgtgttttggtgggtgggtgtgtagagtgatgggtatgtattattgtggttaggttgtgtgtttgtttttgttatgtttgtgtatatgtgggatatatgtgtgtgtattgtatataaatgtatgtatggtttttgtatgtgtggtttgagtatatgtgtgtgtatatttatgtatgtatataggtatgtatgggtttttgtgtatttagtgtttggtgtttgtttttgtgtaataggtgggttttttgtgggttttggtattttattatttttgtagtggttttattttttttttggtgttttgtgagggagggagaattttttattagtattatagtatttatttttttttttgttttgttagtttgatgttttttaaattttatttatttgtgattttttttttttaattatttttgtgtggtggaaaatggtggtgatgtgattttgaggggtattgagttgtttagagtgattttttttttatataagtttttatttgaatttgtaagattggagggatttggtgtgtgtaattgtggagggggtttttatttttggttgttgtatttttttggttgattttagtgtgttttggggaggttgttgatagttggatgtttttttagtttttttttattatttttagttttgtttagtatttttttttttttttttatagttttatgggtttgtgtatttggggtggaggttgtggtatagaaattgtttttttttttattttagttatagtatttttgaatatatggttataggtgtgatgtatgtggtattttgtagtttatgaagtattttgttgttaagtttgagtgagttttaggttggttttgggggaggggatttgtatggggatggaattatgtaggggttagtttaggaaggagttgtaatggttagtgttgggagagttagggtaggtttgttggtggaggtggttttggagttgtttatgttttggttgtgtttggattaattttttagtagatggtaggtagttgtgaggtagggttgggtggagggtttgttgaggtttttgaggtgttatttttattagttgagttggtttttaggagggtgagttttattgttatgtgatgtgtttggttttagtatattttttttgggaaagagtgaagggttttattgttttttgttatttagttttttttggttttgttaatggttttagggggtaggagattaattgttggaattttagagttttggaggtgtgtaagggtaggttaaatagaatttggaggatttggtgtaagagttaggaagagagagagagagagagtgtgtgtgtgtgtgtgtgtgtgtatttgagagagagagagagagagattgattgagtaggaatggtgagatgtttattatgggttttgtaagtatttttttatgttttgtttttttttttttatattgaggagttttttttgtgataattttttttatgttttggtttattttattgtttattatttgttttttttattggagtgttaattttattagagagttttttttttggtttttatttttagaatagtgtttagagttttgtggataattagtaattattagtgtaaagaatagttagtgttgggttggtggggagggtaggatttggttttttgttgttttatggttttattgagtttttgttttgttttgttttgagggtagtttttttttttagttttttggtaggtattagttttttaaagttttttattttgagagagaagtatgtttgttttttttttgttttgggatttgggttattaggattagataggatagaggagaagaaatagaaagaaaattagattgtaaaggttttgtgtatttttagttggggttaagtttttgttatttaaaaaaaaaaagaga

SEQ ID NO: 3489 - DNA, 2377 bp, Artificial Sequence
  chemically treated genomic DNA (Homo sapiens)
tattttagggaggttagttgggggtaggttttggatttgttttaggtatttgaagtttaaagaataggatatattggttttgttatttttttttattttttgtttatttattttttaggttagattattgtatttttgtttttattattgtgtgatttgtttggtaattattttttttttttttttgaaatggagttttgttttgttatttaggttggagtgtagtggtgtgattttggtttattgtaatttttgttttttgggtttaagtaatttttttgttttagttttttgagtagttgggattataggtgtatgttgttatgtttggttaatttttttgtattttaatagagatagggttttattgtgttgtttaggttggttttgaatttttgagtttaggtaatttgtttattttagttttttgaagtgttaggattataggtatgagttattgtgtttggttttggtaattattttttttttttttttttgtttggtgttttgagatagagttttgtttttatttaggttgaagtgtaatggtatgagtttagtttattgtaatttttgttttttgggtttaagtgatttttttattttatttattttggtttttaaagttttgggattataggtatgaggtattgtatgtggtttttggtaagtatttaaaagtttgttttgtgatagtttatgatattagatttatttaagtggagggttggatagagtttttgatatatttgttggtatggaggtttagtttaggagtataggagttttgaggaggtttttgatttattgttttatggttttaaatagttagtggggttttttggtgaaaggtatttttatgttatgaaattgtgttatttttgtggtaatggttgttgataatattggtttttgaagtttttgagtttttaatggttgattttgtatttaggaagttattagggtggtgatggggttggggtaggagtgggaagggttggggtaatgaggggaagttagggttttgggggaaattttttatttggggtgagggatgtggaggtagatattgggtattggggtagggttagggggtggaggtgttttggggaggagagggtaggattgggtttgtattgggatgtattgttttagttggttttttgggaagattttgtatagttggggttttagtgattgttttgtaagtatggtgaatattatgttttttagtattagggagtttatgttttgaaaaaggatggatagtaaaggggttaaggtaaagtggtatagggatatatatgagggtttgttttttttttattagagttgtgatttttgatttaattgtttggaggttttggagtataggttttagtgttggtttatttttatttagagatgggggttttattatgttgtttaggttggttttgaatttttgtgtttaagtgatttttttgttttagttttttaaagttttgggaatataggtttaggttttggtgtaatgaggtgttatttagattgtgaattttggtgtttttaattgtgtaatgggaataatattatttgtattgtgtaagtgataggttttaaagttattggtgttgtggtgtttatattttttttatttgtaagatggttttgtatagttgtagaagtattttttggggttttttgttaatgttgggtaggtggtttgggagtgagtagtggaagagtaggttgttgaggtttttgttgtagatttatattaggtgtgtttagtttgtggttggttttatttgttgtggttttggtttttttttggttaggttggttttgttttgttttaggtgtgggtgtaagaggggggtgaaaatatggagtattttgagggttttgtggttgatttttgattttgatttgtgtattggagaggttgatttttgattttttattttatggggtaaatttttagttttttgggttgtatttggtgttaggttttgtttaagtatttttggtattattggtaggtttggtgtttggtgttatgtgatagtgatgaggtgtgttgttgttttggggtagtgtttgggtatttagattgttgtaagttgtttttggttaggtagttgttaatagttttgtttttggttatagttgttgttttggttgttatggtgtgggtttgattgggttttaggttaggttgtgttttgttttttttggatgggtttggttttttttggttgtgtttggttttttttttggttggtttgggtttttttggttatatttgggtttttttggttttatttggtttatggttgtggtgtttggttttttttgtgttttggtttgggggttttttttgaaggttgaattt

SEQ ID NO: 3490 - DNA, 2377 bp, Artificial Sequence
  chemically treated genomic DNA (Homo sapiens)
gaatttggtttttggaaagagtttttgggttggggtatggagagagttgagtgttgtagttgtgagttgaatagagttggagagatttgagtatgattggagaagtttaggttggttggaagaggagttgagtgtggttggaaggaattgagtttgtttgaagggagtggagtgtagtttggtttggggtttggttgagtttgtgttatggtggttgaggtgatagttgtggttggaagtggggttgttggtggttgtttggttaaagatggtttgtagtagtttaagtgtttggatattattttaaaatggtggtgtgttttgttgttgttgtgtgatgttgagtgttgagtttattaatggtgttgggagtatttgggtggggtttggtgttgagtgtagtttgaggagttgagggtttattttgtgaggtgggaggttaggggttagtttttttggtgtgtggattggggttaggggttagttgtggggtttttaggatgttttatgtttttgttttttttttgtgtttgtgtttggggtggggtggggttggtttggttgggagggggttggggttgtggtaggtagggttggttgtgggttgagtgtgtttggtgtgggtttgtagtggaggttttagtaatttgtttttttgttgtttgtttttggattatttgtttagtgttggtgaggagttttgggaggtgtttttgtggttgtatggagttattttgtaggtgaggggggtgtgagtgttgtagtattagtggttttagggtttgttgtttatgtgatgtgggtagtattgtttttgttgtgtagttgaggatattgaggtttatggtttgagtaatattttattatattgaagtttgggtttgtatttttagagttttgggaggttgaggtgagaggattatttgagtataggagtttgagattagtttggataatatagtgagatttttatttttaaataaaaatagattaatgttaaagtttgtgttttagagtttttaggtaattggattagaagttgtagttttggtgggaggaaggtgagtttttatgtgtgtttttgtgttattttgttttggtttttttgttgtttatttttttttagggtgtggattttttggtgttagaaagtgtgatgtttgttatatttgtggagtggttgttggggttttagttgtatggagtttttttagagggttggttggaatagtatattttagtatgggtttagttttatttttttttttttaaggtatttttattttttaattttattttagtgtttaatgtttgtttttatattttttattttaagtagggaattttttttaaaattttgatttttttttattgttttagttttttttatttttgttttagttttattattattttgatagttttttgggtgtagagttggttattgaaaatttaagagttttgagagttagtgttgttagtagttattgttatgaagatggtgtaattttatggtatggagatgttttttattaaggagttttattggttgtttgggattatggagtggtgagttaggagtttttttagggtttttgtatttttgagttgaatttttatgttagtggatgtgttgggggttttatttagttttttatttgagtggatttgatgttatgggttgttatagaataggtttttaaatgtttgttagaggttatatgtagtgttttatgtttgtaattttagaattttgggagttgaggtgggtgaggtgggaggattatttgagtttaggaggtggaggttgtagtgagttgagtttatgttattgtattttagtttgggtgagagtaagattttgttttaaaatattaaataaaaaaagaaaaaagaaatgattgttaaggttaggtatggtggtttatgtttgtaattttagtattttgggaggttgaggtgagtagattgtttgagtttaggagtttaaaattagtttggataatatagtgaaattttgtttttattaaaatataaaaaaattagttaggtatggtagtatgtatttgtagttttagttatttgggaggttgaggtaggagaattgtttgaatttgggaggtagaggttgtagtgagttaagattgtgttattgtattttagtttgggtgatagagtaagattttattttaaaagaaaaaaagaaatgattgttggataagttatatagtgataggagtaggggtgtagtagtttggtttgaggggtagataggtgaggggtgggaaagaatagtagagttagtgtattttattttttgggttttaggtatttaaaatagatttaggatttgtttttaattggtttttttgagatg

SEQ ID NO: 3491 - DNA, 3534 bp, Artificial Sequence
  chemically treated genomic DNA (Homo sapiens)
agtaaatggttatattatgagttatgaatatagagtgatttatttataatagttatgtaatatgtgggatttaaaaggaattggtatatttatttttattgatattaaaattttttaaatttattattgattgaggaaaataatttggttagatttagtgtttaatatggtagtatttatgaaaaatattaaattaagaatagaaaaattgtatataaagttagagatagattttaaatttttttttttttttttttagatggagttttgtttttgttatttaggttttggagtgtaatggtgtgattatggtttattgtaatttttgttttttgggtttaagtaatttttttgttttagttggtatagttgggattataggtatgtgttattatatttagttaatttttgtatttttagtagagatagggttttattatgttggttaggttggttttgaatttttgattttgtgatttgtttattttggttttttaaagtgttgggattataggtgtgagttattgtattggttgattttaaatttttatgtttggagattagtaaagggtatggaataatgaaggggaatttttattttattttgtttttgagatagggttttagtttgttgtttaggttggggtgtagtggtgtaattatggtttattgtagttttaattttgaggttttaagtgatttttttattttagttttttaagtagttgggattataagtatatggtattatatttggttaatttttaaattttttgtagagatggggttttattatgttgtttaagttggttttaaatttttgggtttaagtgatttttttgttttagtttttgaaggtgttgggattataggtgtgagttattatgtttggtttaattttatttattaaatatgttagaattaagtgtttttttttgagatttgtgagtttttttagtgaaaaaatatttaaaaggtttgttagtatgtttataaaaaagaagataggaggggagggataggatttaggagggtagtttatagtttgttttttttgttttgttttggggtggagtttgtattgtgagttgagttttttttaaggtgtatgttatttttggagttaagtttagtagtgtagttgtatagttagggtggggtgggttaggtggagaagtaggttgtagagggggtagggtggtggtttggggattttagggaagggttatgggagtatggtggtgtttttagtgttggggtttttaggggttttggtattgtgagttgatttttgggggtaggaggttattttatgtaggggtagtaggtgttggttattatattgtttagtaaggtggtagtagaggttttttaggttttttttttaggaaaggagtttgggttgttttgatgagttttttgttttttttttttttgtaggatgaagatgagatgttataagtttttttttatgttttgtatggttggtttgtgttttattttttttttgtatttttttaagattttgttttatgttatttttttttgagaattggttttttttagttttaatttggtgtttagttttttttggaataatgttttggttatgttttaggttagttttgagttaggaggttttgatttgttgtgtattttattttatttttatttgtttttgttgtagttgttgttgtttagtaaggtggttgaggagttttattgggtggatttggtgttgtttgaggatattattgagtattttgtgtgtattaaggttggtggtgtttgttttaaatttggtattaagatgttggagaggttgtttttgggatggttggaggagaagtttgagggggttaatggttttttggtttggtggttattttggtattttttgagtgtttgggagtgtatggggggttgaggtgtttggtgtaagtgggtggagtgtgtgtgtttgtttggttggtatggatttagttgtggtgtgtttattgtggtgtagtattttaatttgtttattaaggagtggttggtgtttagggaggtgttgtgttgtgttattaatgttattaatgttaattatgagtttgatttgttggatgtgtgtttttatgagttgggtgatgtggtggatgtttttgtggtgtgtgagtttaattttatggtttatggggagttgtggttgtttaagttttgggagatgttgattaatggtatttttgagtatatttgttataaggtgttttatgtttttttggattattttttgtttggtggttggtaggatggttggattgttgatgattatttgtgtattttttttatttaggatggtgttttgtggttgtgtaatttgtggtttgatgatgtttttattattgatgatgtggatgagattttggtttgtgatggtgtttttttttttaagttttatgatggttggattgagttttttgttttttatatgtgtaagttgttttatggttttttttggaagtagttgggtattttggaggtggtgttaggttgtatggtggatatgttgtaggtagtgtatgggttggatggtatttgtttgtgttgttgttagtattatattatgtttaattttagatagtatgagaattgtattggttatattttggtgtagtggttgttgggtagttttttgtattttgttggttggtattgtttttggtgttttatgtttgagggtatttattttaagtttgtgtttgtttagaatggtgattttttatgttggggtgattatgaggataagtgggatttgaattatatttgtggtttgatttgtattgggggttggtttgatggtatgtagtaggagtatttgtttgtagattttagtgagtatatgtatgtgtttaagtatttgttgaagaattatgattggttttattatttgttggataatttttattaggagtttaggagtatggtggtgggtgggtggtgttataggggttttgagggaaggttgtttgtttggggtaaattggatgaggtggaagtttagagttgtatgatttgatagggtttgtgatagggtgggggtggtggtggtttttagtgttatttttttgttttttgttggttttttggtttttgaggggattaggagtgggtggggagtgggggtgggggtagggtttttttattgaagtttttgtgaattaagggttaggtttttgagtttagaaaatattttttttgttgggagagggtgtaggttgtgatgtttgggtggtttttatgattgttaagattgttgtggttaggaggtgttattggagtgtgtgtggtggtttttgggtagtgggggagggtaggtaggattggggaagagagtttgtaggattttattaggtagtttttggggggtggttaggttgggaaaaagtttattatttggtatttttgggttttgggttttgtgtgggagattggtttgttaggaggatttagggttttgtaagtagatgtatttgggtttaggaggaagtgtgg

SEQ ID NO: 3492 - DNA, 3534 bp, Artificial Sequence
  chemically treated genomic DNA (Homo sapiens)
ttatgtttttttttggatttaaatgtatttatttatagagttttgggtttttttggtaggttggttttttatatggagtttaaggtttagggatgttaaatggtgggtttttttttggtttggttattttttagaggttgtttggtgagattttgtaggtttttttttttaattttgtttatttttttttgttatttagggattattatgtatattttagtggtattttttggttatagtagttttggtagttataagggttatttagatgttatggtttgtgtttttttttaataggagggatattttttgagtttaaaggtttgatttttgatttataagggttttagtagggaaattttatttttatttttattttttatttatttttggtttttttaagaattaaggagttggtaggaggtagggagatagtgttaggggttgttgttatttttgttttgttataaattttattagattatgtagttttagatttttgttttgtttagtttgttttgggtgggtggtttttttttgggatttttgtggtgttatttgtttgttgttgtgtttttgggtttttggtaggggttgtttagtaggtagtggaattggttgtagttttttagtaggtatttgggtgtatatatgtgtttgttggggtttgtaggtgggtatttttgttgtgtgttgttgaattagtttttggtgtggattaggttgtggatgtagtttaggttttgtttgtttttgtagttattttagtgtgggaagttgttattttgggtggatatgagtttgaagtagatgtttttgggtgtgaagtattaggagtagtgttagttggtgaagtgtagggggttgtttagtgattattgtattaggatgtggttggtgtggtttttatattgtttgaagttgggtatggtgtagtattggtggtggtgtaggtggatgttgtttagtttatatattgtttgtagtatgtttattgtgtagtttgatattatttttagggtgtttggttgtttttagaagaagttgtagagtgatttgtgtatgtggaaggtgaagggtttggtttagttattgtagagtttgaggaaaaggatgttgttatgggttgggattttgtttgtattgttaatgatgaagatgttgttgggttgtaggttgtgtagttgtgagatgttgttttgggtgaggaaggtgtgtaggtagttgttggtgatttagttgttttgttggttgttgggtgggaagtggtttaggaagatatagagtattttgtggtggatgtatttgaaggtgttattggttagtattttttggaatttgagtggttgtggttttttataagttgtgaagttggatttgtatattataaaggtgtttattatgttgtttagtttgtggaagtgtatgtttagtaggttgaatttgtggttgatgttgatggtgttgatgatgtggtgtggtatttttttgggtattagttgttttttggtgggtaggttggagtattgtattatagtgggtatgttgtagttgggtttgtgttagttgggtaggtatatgtattttatttatttgtgttgggtgttttggttttttgtgtgtttttgggtgtttaggaggtattggggtggttgttgggttgaggagttgttggtttttttaggttttttttttggttgttttgggggtggtttttttagtattttggtgttgggtttgaagtagatgttgttggttttggtgtgtatgaaatatttggtggtgtttttgggtagtattaagtttatttggtggagttttttggttgttttgttgggtggtagtggttgtagtaggggtgagtgggagtagagtggggtatgtagtaggttagggttttttggtttggggttggtttggggtgtgattggggtattgttttagaaaaagttggatattaggttagggttgagggaggttagtttttgggggaaggtgatataggatagggttttgaagaagtgtaggaaggagatgaggtataggttggttatatagaatatgagaaagagtttgtagtgttttatttttattttgtgggagagagagagataggagatttattagggtagtttaggttttttttttaggaaggggatttaggaggtttttgttgttattttgttggataatgtggtggttagtatttgttgtttttgtatggagtgattttttgtttttaagagttaatttgtggtattaaggtttttgaaagttttagtattgaggatattgttgtgtttttatagtttttttttgagatttttaggttattattttgttttttttgtagtttgtttttttgtttggtttattttattttgattgtgtggttgtattgttaggtttggttttaggagtaatatgtgttttgggaaaagtttaatttgtagtatagattttgttttaggatagaatggggagagtaggttgtaggttgtttttttgggttttgtttttttttttttatttttttttttatggatatattgataaattttttgaatatttttttattgaaaaaatttataggttttaagggaaaatatttaattttaatatatttaatgaataaaattaggttaggtgtggtggtttatgtttgtaattttaatatttttagaggttgaggtaggaggattatttgagtttaggagtttgagattagtttggataatatagtgagattttatttttatagaaaatttaaaaattagttaggtgtggtgttatgtgtttgtggttttagttatttaggaggttgaggtgggaggattatttgagattttgaggttgaggttgtagtgagttatgattgtattattgtgttttagtttggataatagattgagattttattttaaaaataaaataaaataaaagtttttttttattattttatgttttttattaatttttaggtataaaaatttgaggttggttagtgtagtggtttatgtttataattttagtattttgggaggttgaggtgggtagattataaggttaggagtttgagattagtttggttaatatggtgaaattttgtttttattaaaaatataaaagttagttgagtgtagtggtgtatgtttataattttagttatattggttgaggtaggagaattatttgaatttagggggtggaagttgtagtgagttatgattatgttattgtattttagaatttgggtgataagagtaagattttatttaaaaaaaaaaaaaaaaaaatttgaggtttatttttggttttatatgtaatttttttatttttgatttaatattttttataaatattattatattggatattaagtttaattaagttgttttttttaattaatgatagatttaaaagattttggtattagtagaaataaatgtattagttttttttaaattttatatattatatggttattgtgaataaattattttgtatttatgatttatgatgtaattatttgtt

SEQ ID NO: 3493 - DNA, 2484 bp, Artificial Sequence
  chemically treated genomic DNA (Homo sapiens)
tttagtagttgagattataggtgtgtgttaataagattggttaagttgtgtatttttagtagagatgaggttttattatgttgggtaggttgattttaaatttttgattttaggtgatttatttgttttggttttttaaagtgttgggattataggtgtgagttattgtgtttagttgggaaatatttattagggataataaaggtttagaagaattttttggggaaattttgtgaggagtataattttagagggtttatagtagttatagttttttggtgtgatattaggtatattgttggttgtataggttgttgggtataggtaggtatagttagtttggaagagtagtttgttttaaatttttggtttttttttaattaggagtaaatattggtagaaagagttagggtatatttattttttatatttagaatttttatttattattgaattatttggtttgtatagtgttttttgataatgtggtttataaaaattattattaaagttgtttttttatttgatttgggtggggttaaatgaggaaatgagaagttttttgtatgttttaaaatataaattaatgttaggaaattttgaaaatggatgttgtttgttaaatatgaaattattaagggagtttttgtaaaatttatttggtagtatgaggaatggtgtttatagtgtgttttaaatggttatggttttgttttttatagattaaagtttaagttgtatatttttatattttaaataaaattatgttatagatattatttatgtgggtatggatatatattaaataaggatgtagtatataattgaggggtgttttggggagtgtggtaggaatgttttttgggaagaattttttggttgttggagtttttgtgttgtagaggaaattagtgatttattgtggttttgaggtaaaagatagatatttgagatgtagtttatattattttggtttaaaaggataagatgtttaataaatatagagaatttagtgtgaagaaaagataaggataaatttggattatgtgtatagattttaggttttgttttagaggagttttgtgggagtttaggattggttttttttttatggatggttagtttttttttgattgtttttaagtttggttgtgttaagtattttgtgttgatataaagtattggtatttgatattttaatagtaataaatttgttagtgttttatatattgttagtttttagagtttattatttgtgtttttagaatagatgttaaggttatgtttttagttggattgttgtagttttgttgttgtgatgaggtaggtgtggaggttttagtagtttttttggtgttggtgtggaggttttttttgtggattatttgaagtagggttatgttgtattgtagttgtatagtattgtaaggattaagtagtgatgttttaattgtaaatgaagaggaaggtgaaatgaaggtaaagagaattaattattttttaaaatttggttataaattgttatagaataagttttgtaaagtggattaaagtgatttattgttattttaggtttagatggtgtgatttgtgtggaaattatataatgtttttaatattattgtaatagagttattaatgggttattttttaaattatattgttgatattgttaaaatttaagaggttagtgtttttaagtgagtagttgtatttgttgagagtaagtggtgtgggttgtaatttgtagatgtgtatagaattgaaaatgttaaatatgtatataaaattgttgataaaagggtttttttttaaaattaagatttaattattaaaaataaatttttatatttaaatgtatatattaatataattggtttgtaataattattttaaatagtttttatatttttttagtttgtgagtaggatgttggttttttagttgtgtgagtttggttttggattttttttaattttttgtgtaaagagttgaattagttggtagtggattttgtagagataagtggttatgtgtaaattttatgtgttttttatttaaagttggtttgagttttatttttggataggggttgtagtaaattttatgtgttttttatttaaagttggttttgagtattgtttttggataggggttgaagtgggggtttattttttatggaatggttagatgttattgtgggttgtaggagtttagtttataatgatgggttttgggtgtggaataatttatttagatttttgggatgttgagtttgtaaaggggttgttaatggttaggtgggaaatttgggtattggtagatttgatttgaattttagtatttttatggaaagtagagtgtttgttttagtgtttgtttattttatttatttatttatttttatttttttagtagtattgagtgtgtaaggtttgtgaggagtttgtgtggggtgatttaatgtgtgtaagagatgtgtga

SEQ ID NO: 3494 - DNA, 2484 bp, Artificial Sequence
  chemically treated genomic DNA (Homo sapiens)
ttatatattttttatatgtattgagttgttttgtatagattttttgtaggttttgtgtgtttagtattgttgagaaaatggaggtgggtgggtgggtggagtgggtagatattggagtggatgttttgttttttatgggggtgttggagtttgagttaggtttattgatgtttagattttttatttggttattggtaatttttttataaatttggtattttgggagtttaagtgaattattttatgtttagggtttgttattgtgggttggatttttatagtttatggtgatgtttgattgttttatgggggatggatttttattttagtttttgtttaagagtggtgtttagggttagttttgagtgagggatatgtggggtttattgtagtttttgtttaggagtggggtttaggttagttttgagtgagggatatgtggggtttatatgtggttgtttgtttttgtagagtttattgttagttggtttgattttttgtatgaggaattgaagagaatttgaagttagatttatatagttgagaagttggtgttttgtttataaattgggaaagtgtgaaaattatttaagataattattatagattaattatgttgatatatatatttaaatgtagaaatttatttttgatagttaaattttgattttagaagaaaatttttttgttaataattttgtgtatatatttggtatttttagttttgtatgtatttgtgggttgtagtttatgttgtttatttttagtggatgtagttgtttatttgggggtattggttttttaggttttaatgatgttaatagtgtagtttagaaaatggtttgttagtggttttattgtaataatgttagggatattatatgatttttatgtaggttatattatttgggtttgaggtagtagtgggttattttgatttattttgtaggatttattttgtaatggtttgtggttaagttttgggaagtggttgattttttttgtttttattttatttttttttttgtttatggttaggatattgttgtttgatttttataatattgtgtaattgtaatgtaatgtggttttgttttaggtgatttgtgggaggggtttttatgttagtgttgggaaggttgttggggtttttatatttgttttattatggtggtgaggttatgataatttggttgggagtatgattttggtgtttgttttgggagtatggatgataagttttggaagttggtagtgtgtaaagtattggtaagtttgttattgttaaaatgttaaatattaatgttttatattgatgtgaagtgtttaatatagttgggtttgggggtagttaggaggaagttggttatttgtggaggaggggttggttttggatttttgtaggatttttttgaggtagggtttgaagtttgtatatgtggtttagatttgtttttgttttttttttatattgagttttttatatttattgaatattttgtttttttaagttagagtagtgtaaattgtgttttggatgtttgttttttgttttgaagttatgatggattgttggttttttttgtagtgtgagggttttggtgattagaggattttttttggaaggtatttttgttgtgttttttggggtattttttaattgtgtattatgtttttgtttagtgtgtatttgtgtttatgtagatgatgtttgtaatgtagttttgtttgaaatatgagaatatgtggtttaaattttgatttgtaaggagtggggttgtggttgtttggagtatgttgtagatattgttttttatgttgttgggtgggttttgtagaagtttttttagtgattttatgtttaataggtagtatttatttttagaattttttggtattgatttatattttgaagtatataggaaattttttgtttttttgtttagttttatttagattaggtgaaagggtagttttaatggtggtttttatggattatattattagagagtattgtgtaagttaaatggtttaataatgaatgaaaattttgggtgtaaagagtaaatatgttttggttttttttattaatgtttgtttttggttggaaagaaattaaagatttaagatgggttgtttttttagattggttgtgtttgtttgtgtttagtaatttgtgtagttggtagtgtgtttggtgttatgttaggaggttgtggttgttgtgggttttttggaattgtgttttttataaagtttttttaaaaggtttttttaagtttttattgtttttggtaaatgttttttggttgggtgtggtggtttatgtttgtaattttagtattttgggaggttgaggtgggtggattatttaaggttaggagtttgagattagtttgtttaatatggtgaaattttgtttttattaaaaatatataatttagttagttttgttggtgtatgtttgtaattttagttattagg

SEQ ID NO: 3495 - DNA, 2482 bp, Artificial Sequence
  chemically treated genomic DNA (Homo sapiens)
gtggggggtttgagagtaattgtttttataggggttgttatgtttagatttatggatttggtatgtgttttattagttaggtttaatgatgttagttattaagtatgttttatttgtgtggttggggggttaggggtatttgatattggagttgtttttggttaaggttgttttatttgtggtgttaggtaattttttttttttgggggttttgtgatgggggagaggttgtttgtttagtatttatttttgttttttattgtttatagtattttagtttgagaggttatagtttaagaaaagagttttttattttatgttgtttgatatttttatataagtaaaataaaatgtatatttttatatattgtgatttgggtgggaggtggtgttttggaataaatgttgttgttgaattttgtaaatatgatggggtggagatgggggtggtgggtggtaggtgtttattagggaggatttggtttggtttgttttatgggttggttgtttggttggtttggtggtgtggagagagattttgtatgtatatatatttggttgttgagtatgtttttgtgtttgttgggggttagtagggtttaagtattgtttatagtattagtgttaggtttaggggggtgaggttgtaggtgaggttgggtagggtatttgagttttttgagttattagttttgttatttttgttgtttgtttggtttagatggtagtggttgtgggtgtggtttttgtgtgaatagtttggtttttggtgagggtttgaggtggggaattttggtggtttggagtttttgggttgtattgtagtgagtgggggtttagtagagttaggtagagttttaaagggtgagttattgatgtgttgtgggttagagttgttgtttggtgggttgttattgggtggtatgtgtttttttagtgtattgtttgttgaagttggttttttaggttttagtattgaggttttgttagtggtatttggttggtagtatttgggaagttttagtggttttttattggtggttttgttggtttagatgggatggtaagggttggtggttatagtgtagttttgtaggttattggtagttaggtgtttgaggttatggttagttaggtgttgtgggaggttgtagggtattttggaggaggagttgtggaatttttgtagttaggtttagagtgggtgtgtttggtagttatatatttaggggttgttgttgagttttaggtattgtagggtatgtaggggggttagggttttagtgggtagtgttgatagattgttggtaaatagatagagtgttatgaggtggttaaggttatggaaggtatgtgggtgtatatgggttatgtggttttggtgtagtaggagatggttgaggttgtgtagtttatggaaggtgtgtttgggtatgttggagatgtggttgttgtgtaggaagaggtgtgtgaggttgtttaggttgtggaaggtgttattaggtagtgtttgtagtgtgttgttttgtaggtagaggtattgtagggtagttaggttgtggaatagttttgggtttagtttttgtaggttgtagtggtttaggtgtagtgtgtgtaggtggtttaggttgtggaatgtggtagggtttatagattggagttgtgtattattgttgaggtttagttgttttaggagggttaggttagtgaaggtagttgtattaatttgggttagtatatttgagtgtagttataggatggtgaggttgtggtaggtatggaagttggtagttggtatatgtgagatgtggttgttgtgtaggaagatgtgttggttggtagtagggatgtttatgggtatagtttgtaggttttgttgggggtagtttgttgttattttgggtttattgtagtatatgtaggtatttgggtatggggttgttatttgttaggtttgtagttatagtatttatgttagtagttggttttttgtgggtagaagatagagtggttagtaggaagggtaggggtattggagaagttggaggttttgttagagttaggtgggttttggagattgggttttaggaggatttggggttgggtttaagatgtggttattatttttgggaattgtagtgttgggatttttgttttataggttttatggatgatgttgggttagaatatgttttggagttatgtattttattttggaagttatatttgtagattttttatattatatttaggagtagtttattgggttattaggggtatttatttgaaggttttttggaatggatattggtgattgtaggtatttttttaggattttagtgaatatagagtttgtattgtaggagtttttggggggttttagtgggggttttatttatagggtttaggaaatattgtaatggggttggggtttttttgggtatgtttattttaaaaatgggtgtttggatgtttgagggtg

SEQ ID NO: 3496 - DNA, 2482 bp, Artificial Sequence
  chemically treated genomic DNA (Homo sapiens)
tgtttttgggtatttaggtgtttgtttttgagatagatgtgtttagagggattttagttttattgtagtgttttttaggttttgtgggtggaatttttattgggattttttggggatttttgtaatgtgggttttgtgtttattggagttttgaggaggtatttgtagttattagtgtttattttaggaggtttttaagtgagtgtttttggtgatttagtgggttgtttttgggtgtggtatggggagtttgtagatgtggtttttagggtggagtgtatggttttaaggtatgttttagtttagtattgtttatgaggtttgtgaagtagggattttaatattgtgatttttgggggtggtggttatattttggatttagttttaggtttttttgagatttaatttttggggtttatttggttttagtaaaatttttagtttttttagtatttttgttttttttgttaattattttgttttttgtttatagggagttggttgttggtatgggtgttgtggttgtaggtttggtaggtggtagttttatgtttaggtgtttgtgtatgttataatgagtttaaggtgatgataagttgtttttagtagggtttgtaggttgtgtttgtgggtatttttgttgttagttagtgtatttttttgtatggtaattgtattttgtatgtgttagttgttagtttttgtgtttgttgtaattttattattttgtggttgtatttgaatgtgttggtttgaattgatgtggttgtttttattggtttggtttttttggagtagttggattttagtgataatgtatagttttggtttgtggattttgttatattttatggtttgggttgtttatatatgttgtatttggattgttgtggtttgtaggagttgggtttggggttgttttgtggtttggttgttttgtagtatttttatttgtaggataatgtgttgtaggtattgtttgatgatattttttgtgatttgggtaattttatatatttttttttgtatggtaattgtatttttagtgtgtttgagtgtgttttttgtgggttgtatagttttgattgttttttattgtattagaattgtgtggtttatgtgtatttgtatgttttttgtgattttggttgttttatgatattttatttgtttgttaataatttattagtgttgtttattgaggttttggtttttttgtgtgttttgtagtatttgaggtttaatgataatttttgggtgtgtgattgttgggtatgtttattttgggtttggttgtagaagttttgtggttttttttttgaggtgttttgtagttttttgtaatgtttggttggttgtgattttaaatgtttagttgttaatgatttgtagggttgtgttgtggttattggtttttattattttatttggattggtagggttattgatgaggagttgttggggttttttaagtgttgttagttagatgttgttgataaggttttagtattggagtttggaagattagttttggtaggtaatgtgttgaagggatgtgtgttgtttggtgatagtttgttgggtaatggttttggtttatggtatattaatgatttattttttgggattttgtttggttttgttgagtttttgtttattgtagtgtggtttgagggttttgagttattagggttttttattttgggtttttgttggaggttaggttgtttatgtaagaattgtatttgtagttattgttgtttgggttaggtaggtagtgggggtggtgggattggtgatttagaaggtttaggtgttttatttagttttatttgtagttttatttttttgggtttggtgttggtgttgtggatagtgtttgggttttgttgatttttagtggatataagagtgtgtttagtagttaggtgtgtgtatatatggggtttttttttatgttgttaagttagttgggtggttgatttgtggggtaggttaggttaggttttttttgatggatgtttgttgtttgttatttttatttttattttattatgtttatagggtttggtggtagtgtttgttttagaatgttgttttttatttagattgtggtatatagagatatgtattttattttatttgtgtaaaaatattggatgatgtggaataaagagttttttttttaagttgtggttttttaggttagggtgttgtgggtggtgagaagtaggggtgggtgttggatgggtagttttttttttattataaggtttttagaggaagggagttgtttggtattataggtgggatagttttggttaagggtagttttaatgttaggtgtttttggttttttagttgtatagatggagtatgtttggtggttgatgttgttgagtttggttgatggagtatatgttaggtttatgggtttggatatagtagtttttgtggggatagttgtttttgggttttttat

SEQ ID NO: 3497 - DNA, 2395 bp, Artificial Sequence
  chemically treated genomic DNA (Homo sapiens)
tataggttgatatattttatttgtttttttattttagggttttgtgatttattggtaagggtggagttttgtttatttggttaaaatgaagatgttaaggagggaggtagttgtggttaggtggtattaggtggtgttagtttattagtagagaagtttgaagagttggtttggaagaatgattattaagttgaaggttttatatggtgtttgggggtattgtttttttgttttgtttgttgttttttttgtttttattttatttttatttgttagtatgtttttgttttgttttattgggatttaggtttttggattttatttgtttatattttttgttttgttttgtagttatttttttttttttatgtaagggggtttttatagttttgggtttttagtgattattttagaatgatttttttttaatggttttatagtttttttgtatgggtaggatgtttaattgtagagagatgggtaagaaagtattattattaagaatggaagtaattgggtatgggttgtagtttatttggtgaagtggttattatttagagtaaggagtttgtttgtgagatggtgttttggagttgtgagttggaattttgttggtttatatttgagtagtttgtggggaatgaggatattggtttagtttttgttatttttgagtttttttttttattgttttttgtgagttaagattataagttatttatttttttttatatttttatagttttatataggtttggtgtgtagtaaggaatgaaatgggagttttttgatattttgttttttttgatagttttttgtttgtatttttttttttattagttattttttaagttgttgtttagaattaggtgttggggtttgatatgtatattatttagaatgattgagtatttattatgtgtgagttttataggaaagtgttggaatgggtttgaatgtaaggatgttggttttaggttgttatagatttgtggggtggggaggatagataagtgaagggtagttatagtttagggtattaggggttattgtaggttaggttggggtgtatttagggttgggtatgggaggggtgttgtgtttgttatatgttgttttttttttagttttttggggttttttgtttagtttttttgaggttttttagtagttttggatttgtttaggagggaggaagtattgtttatttatgtagttgtttttagaggagtagtttgaggaagagtttaggaagtttttggtggttttgtgttttataagtttgttggttttgttgttttttgagttatttgtgtttttttttttttgtatttgtaggtttttatttgtgtagggaagaattaggggtttttttgggtttttaagagtttttgaaaagtggggtttgggtagagaggtgttttgaggagggaattttggggattgtaggggatattgtgaggagtattttgtgggaggttgaggaagtaaagttttgggatggagggttttatatttattttagttggtgttattatgtagtttttttagggagtttttgggtgggaattaggatttgtggattagtgatttattgtagtaggaggtgtgtgtattagaggatgggtttagttgtggtgttggggataggtgttttatgttgttggattttttttttaaggttttgtgggataattatgagggtagaggtagggagtagggaggtgagtttagttaggagtatgaaggaaagttatagtttgtggttttgtttagtgtagggtgtgggtttttttgttgttaggtaatttgtagttgttatttttttgatttttttaatgttggtatgtttttttttgttttttttgaattttattagtagatgggtaagatgggtagtggtagttagggatggagttatatttaaattttataatttattgaaattagatagatttgatttggttttagagttagttaaagttttagggtttgttttttgggttttatgtttgtgagttgggtaggatgattaggtagttgttgttatagtttattttttagtggtttgaggattgtgtttgtttttagttatgttgttggttagttgttgaggttggataggtggtgagatatgtaggtgtggggttaggaaggatggtaaggttgatatgtttgtttagagtagggggggtttttgtgagtttagtttgtagttttggggtttttggtttggtttatggttgaagttgtttttttttattttttgtttttttttttttttttttttttttttgagattgagatggagttttatttttgttaatttaggttggagtgtaatgttatgattttgtttattgtaatttttgtttgttaggtttaagtgattttt

SEQ ID NO: 3498 - DNA, 2395 bp, Artificial Sequence
  chemically treated genomic DNA (Homo sapiens)
gagaattgtttgaatttggtaggtagaggttgtagtgagtgagattatggtattgtattttagtttgggttgataagagtgaaattttattttaattttaaaaagaaaaaaaggaaagaaagaaaataggaagtggagagaggtagttttaattataagttaggttggaaattttaaaattgtaggttgggtttataggaattttttttgttttggatgggtgtgttagttttattattttttttggttttatgtttgtatgttttattatttgtttggttttagtagttggttagtgatatggttgagaataggtgtagtttttaggttattgggaaatgggttgtggtagtagttgtttggttgttttgtttggtttataggtatggggtttagaagataggttttgaggttttggttagttttgaggttaggttaggtttgtttggttttagtgggttgtaaagtttgaatgtggttttatttttagttgttgttgtttgttttgtttatttgttggtgagatttagagagaataggagaggatgtgttagtattgggagagttaggggaatggtagttgtgagttgtttagtaataagggaatttatattttgtattaggtagggttgtaggttgtggtttttttttatgtttttggttgggtttatttttttgttttttatttttgtttttatggttgttttataggattttgaagaggaaatttagtaatatgaagtgtttgtttttagtgttatagttgggtttgttttttgatgtatatattttttattatagtgagttgttggtttatgagttttggtttttatttaggagttttttggaggaattgtatggtgatgttaattggggtgagtgtggagttttttgttttggggttttgtttttttggttttttgtgagatattttttatagtgttttttgtagtttttgggattttttttttagagtatttttttgtttagattttattttttagaagtttttggaggtttagaagagtttttggtttttttttgtataggtgaggatttgtgggtgtggaggaggagaggtatgggtggtttagagagtagtagggttagtgggtttgtggggtgtaaggttattgaggattttttgggtttttttttgggttatttttttgaggatgattatgtgggtaggtgatgtttttttttttttgagtagatttgaggttgttgggaggttttaggaaggttgggtagggagttttggggagttggagagagggtagtatgtggtaggtatagtgttttttttatgtttggttttgggtgtgttttagtttggtttgtggtggtttttggtgttttgggttgtgattgttttttatttgtttgttttttttattttatgagtttatggtaatttaaggttaatatttttgtatttaggtttattttagtatttttttgtggggtttatatatggtgggtgtttagttattttgagtggtgtgtatgttagattttagtatttagttttgaatagtagtttgaggggtggttggtgaggagagggatgtaaataggaagttgttagaagaaatagaatgttaaagagtttttattttattttttattgtatattgggtttgtgtggggttgtggggatgtgaaggagggtgggtgatttgtggttttggtttatagaagatagtgaaggaagaggtttgaaagtgatagagattgagttagtgtttttgttttttgtaggttatttggatgtggattagtagagttttagtttgtggttttgaagtgttgttttatgggtgggttttttattttggatggtggttattttgttaggtgggttgtaatttgtgtttagttatttttatttttggtgatagtgtttttttatttatttttttgtagttgggtattttgtttatgtagagagattgtaggattattggggaaaggttattttagaataattattgggagtttagagttgtggggatttttttgtgtggaagggaaggagtagttgtagagtaggatagagggtgtgggtaggtgggatttaaggatttgggttttggtagggtaggatagaggtatattggtaggtgggggtggggtaggggtagggaggatggtagatgggataaaggagtggtgtttttaaatattatatggagtttttggtttgatggttatttttttaggttggttttttagatttttttattggtgggttggtattatttggtattgtttgattatagttgtttttttttttgatgtttttgttttaattaggtgagtgagattttatttttgttaataaattgtaaggttttggggtgaagggatgggtaaagtgtgttaatttgta

SEQ ID NO: 3499 - DNA, 2390 bp, Artificial Sequence
  chemically treated genomic DNA (Homo sapiens)
ttagtgggggttaagtggagttagtttggtgttgttttaagggggtttggttgggattgtttttaggagggtgatgggttttaataagaatgaatagttaggaattggggttgtaggaggagtgaggggggattatttgtgagaagtagtttgtaggtgagatagtgttattgatggggtggggaggggtattttagaggtgtttatggggtattagttggatttatttagtaggtgtggagtgggttatgatagattttagtaaatatgttgtatttttggttttggttttttttttttgaagattgtgagaggaggtgttattttaaattaagtttagaattttgataattatttagggttgggtattttaatatttgaaattgtgaatatttttgtgattaaaggagtttaaaagaatttttgttatttgagagagaaaagagaagtttaggaatttgttttagattttatttaagtggtggaaaaaatgggtttttttagggtgtatagggataggttggagggtaaaggaaatggtgtttttttttttaatagttatttttattttgttgggtgtatgtgtgtatttaaaaatttttttagaaaaaagttggtagaaaaaggaatgtattatttttaagatagtagtttaagttatgaatgtattaagaatttgttttgagatgatttttggtagttggtaaaagtgtaattttgagaagaggttgtgaaatatttttaatgaaatagaaggatttttaaattgaagaatgttgtagaaggtattaagtgtggtgtttttgttttatagatgagtagtttggggtttagtgggtgaagtggtttagttggttggtgtagagtttagtttagtatttagattttttgatttgggaagagttatttttttttgaggttagttgggatgtgtgaaggaaattaggttttgtggagaaagttatttggattttttagtaagggaaagtttaagtaaagaaaatagttggttaagaggaaagatagtggtggtaatgttgagagagtgttgaggaaagagtggagagtttgtagttaagatgaatatttatagtaagtttttaatagttaaggatttgaaagttattattgtttagttggatatgagagtaagaatttagtatattttgttgggttttgttagttgtgtagagtataaggttttaggtaagttagtgttggggtaaaatattgtttttgttgaaagtagagttaagaatggaatggaaaaagattgaggtttgtatagtgtatgtatggggattttaaaatggatttgaaaatattttataatgtaattttgggagattgtaatataaaaaggaaggaatttaatgtaggtgagttttaatagatattatggtgtgtttttgaaatagatgaaaattgaattgttttttaaatattttgagagggttattaatgataggaatttttttgtttgattattaattattattttgtttatatagttaggatagttgtggagtaggttggtttagagggatttttagggtaggtttaggttagtgtttagtttggttttgaattgtgttttgtagagttttatagtaggttttgtaggaggttagggtattttttttagaaaatttaagttttttagttggataggtttgatttttagttttgtttttagtttttgtttaattatgtaattagggtaagttatataatttttttgagtttgttatttatataatataggagtgttattttgtagggttgttatgaagtttaaataaataatgtgtgtaaaatatttagtatatagtaggtttttattaaatgttatttttttattttttgtttgtttgggagggtagtgattagtgtggattgtttttgtatttgtttgtagggattttttttgggtaggtaggatggttattgtggtgtttaggtagaagagaggaggagatgagtttggtgttagtttttggttgtgttttaagttgtgtttgtttatattttttttttaattatagtttttttaattgagttgttagtggtgtttttgtgagttttaatttaggggggattagttaatttgtatagataatagtaagtgtttattgtagtttttttaagagtagtttatatttatttatttattttaatattttaatagagtttaatttgtagtttattggtttttggtgatttttgttttggaggttggggtgggttttaatttttgagttttattaagtgttttagggaatatggaatattggggtgtagggataattttataaatgaatggaggaagggagaatattgaaattttgtttgttagggtattattgtttattgttttgtataaaggtgtg

SEQ ID NO: 3500 - DNA, 2390 bp, Artificial Sequence
  chemically treated genomic DNA (Homo sapiens)
tatatttttgtgtaaagtagtaggtggtagtgttttagtaaataggattttagtattttttttttttttatttatttgtgaaattgtttttgtattttaatattttatattttttagaatgtttgatagaatttagaaattaaaatttattttaatttttaaaataggagttattaaaggttagtgggttatgggttaaattttgttgaggtgttgaagtgggtgggtgggtgtgaattatttttgaagaggttgtagtaagtatttgttattatttgtgtaagttaattagttttttttgagttgaggtttatagaagtattgttggtagtttggttaagaaagttgtaattaaaaaggaaatataagtaaatgtagtttgagatgtagttaagggttggtgttaagtttattttttttttttttttgtttaaatattgtagtgattattttgtttatttaaaggaggtttttataaataagtgtaagaataatttgtgttgattattgtttttttaggtaagtgaggagtggggaagtaatgtttgatgagggtttattgtgtgttaggtgttttgtatatattatttgtttaggttttataatagttttataaggtaatatttttgtgttgtatagatgatagatttagaaaggttgtgtagtttgttttggttgtatagttaaatgagggttagaaataggattaggagttaggtttgtttagttggaaaatttgggttttttagaaggggtattttggttttttgtggagtttgttgtgggattttgtagaatataatttaaggttagattgaatattagtttgaatttgttttgagaatttttttaagttgatttattttatagttgttttgattgtgtaagtgagatgatgattagtgattagatgaaaggatttttgttattggtaatttttttaaagtatttggaaaatagtttaatttttatttattttagaagtatgttgtggtgtttattgaggtttatttgtattgaatttttttttttttatgttgtgattttttaagattgtattgtggagtgtttttgaatttattttgaaatttttgtgtgtgtgttatgtaggttttagtttttttttattttatttttaattttatttttgatggaagtagtgttttattttgatattggtttgtttaggattttgtgttttgtataattagtagggtttggtaggatgtattgaatttttgtttttgtgtttagttggatggtgatggtttttaagtttttggttgttgggagtttattataaatgtttgttttggttataaattttttattttttttttggtatttttttagtattgttattattgtttttttttttggttaattgttttttttatttaggtttttttttgttagaaagtttaggtaattttttttatgggatttggttttttttgtatattttagttggttttgaggaaaggtagttttttttaaattagagaatttggatgttgggttgggttttgtattaattagttgggttgttttatttgttgggttttaaattatttatttgtgaagtgaaggtattgtgtttgatgttttttgtaatgttttttagtttggaaatttttttgttttgttggggatattttatggtttttttttaaggttgtatttttgttagttgttagggattgttttaaaataggtttttagtgtatttatagtttgagttgttgttttgaaagtagtatatttttttttttgttaatttttttttgagaaagtttttgaatgtatatgtgtatttaatagagtgagagtggttgttaagagagagggtgttattttttttgttttttagtttgtttttgtgtattttggaggggtttgttttttttattgtttagataaaatttagggtaagtttttgaatttttttttttttttttaggtaataaaaatttttttgggtttttttagttataaagatatttatgattttaggtattaaagtgtttagttttgggtgattgttaaaattttgaatttgatttaaagtggtatttttttttatagtttttgggagggagagattggagttaggagtgtagtgtgtttgttggggtttgttgtggtttattttatatttgttgggtggatttggttggtgttttatgggtgtttttgagatgtttttttttattttattagtggtgttgttttatttgtaggttgttttttataggtggtttttttttattttttttgtagttttagtttttggttgtttatttttattgggatttgttatttttttggaggtggttttagttgagtttttttaagatagtattaggttggttttatttggtttttgttgg

SEQ ID NO: 3501 - DNA, 2444 bp, Artificial Sequence
  chemically treated genomic DNA (Homo sapiens)
tgaggttatgaatataaatttagttttatatgttttggaattgtatttgaagatgtggttttaaggtagttttatatttagtgttttgggtggggtgggggggtagttttatatttagtgtttggggttgggggggtagttttatatttagtgttttggggtggggggggtagttttatgtttagtgttttgggaggggtagttttgtgtttagtgttttgggagaggttgttttagttagtgtttttaaagttgttgttagttgggagaggatggtaggtttttttttgggttttgggaggttgaattagttaaatgggagaatggggagatgggggagaagggggagatgggggagatgggggagaagggggagatgggggagatgggggagatgggagtaatgggagtaataggagtaatgggagggttttattattttgattttatttttaattggtttgttttggatatattgtttaatttttagtagttattttattagtttattttattagggggttttagggagatattttttaatagatatagaagtgtaggaggagaatgagggtttttgttttaattttaggtttaaggttattttgtttaggtattgggttatggtattttaagggtgtttttgttgatatattagttttgaagggttagttattttttagaaataatgtttttgaggtggggagggttttaagttagtattgtatttgttagatatggaatagagtaggaattgaagtagggaatgtaggtttaagttatgttagagataggttttttgttttagattgtggttttggttaggaaaggaggtgtgagtgtgtggttggagaattttatattaaatattttggttttttgagtggaaattatattggtttaggaaaaggaagggggtgagaaggttggttggttggatggttgttttaagtaatgtgaaaagtaaatttatgaaattattttttgaaaataaagtgtgagggttgtgttattttggttgtagtagggttgtatttgtttttttaattaatgtattattttttttagaaatagaataaagataaaagtggatgtataataaattattttagtttgttagtgttttgagagatgaaaaattttgtttagagataggattgtgggtttataaaaaaattataaagtttaggtattttgttaagtttttagaatgttgttgggttgttttttttttttttatgtttagttgtgtgtggttgttgggatagtgtttattttggtaggtgatgagttagtgtgggaatttaggggttgttttagttttgttggggtgttgagttgtagggagtggtttgtattgattttttttttttttatttatgttatttaaaagtatattagaggggttttgagatgaaatttgtatattttttagagtttttttagattaatgtgtggatgagaatgtgtttattgtggggatgtgtttggttgtggatgtgaagaaatttttttgtaggagtagtgattttgttatatgggttttgtatatggagtttttgttagtttggggttttggttttgggaagtatttgggaggtggtggggaaggttggttttggttggtttgatatatgttttggggtttgttttttatgggttaggtttggtgttttatttattattgttgggaagttatggaggttttttaagggtgatttgtgaggtgggggtgtttgtttttttttttgaggtaagaggggtttggttttattgtttgttgtaaaaaaggaggagtagtttaggtttgtatgtggttttgagtagtttgttggaaggttttagtttggtttttttattttgtttttttttttagggttggtttagttttatagatattgtttttatttatgagttggaggtggtttttttggtttatgtgttatattttttttggtttttgtaggtgttttattttatttagattttgttttttaatgggtggtatttttaattatttatttttttttttggagatgttaaatttttttgattttttttttttgtttgttttataattggttggttttgttttttttttttttttgtgtttagtgttttggttttagttttgggtttttattttattttttaggtttgtgtattattagattgttttgattttttgtttgttgtttatttgttgttaggtttttttttttttttttttttttttgagatagggttttattttattgtttaggttagagtgtagtggtattattttagtttattgtaatttttgttttttgggtttaagtgatttttatgttttagttttttaagtagttgggattataggtgtgtattattatgtttagttaatttttgtatttttagtaaagatagggttttattatgttggttaggttggttttgaattt

SEQ ID NO: 3502 - DNA, 2444 bp, Artificial Sequence
  chemically treated genomic DNA (Homo sapiens)
gagtttgaggttaatttggttaatatggtgaaattttgtttttattaaaaatataaagattagttgggtatagtggtatgtatttgtaattttagttatttgggaggttgaaatatgagaattgtttgaatttgggaggtagaggttgtagtgagttgagatggtgttattgtattttggtttggataatagagtgagattttgttttaaaaaaaaaaaaaaaaaaaaaagagtttggtagtaggtggatgatgggtagaagattagagtagtttgataatgtgtaggtttgggaggtggggtggagatttagaattgaagttagggtattgggtatggggagaaaggagggataggattaattggttatggagtaggtaggaaggaggagttaggggagtttgatgtttttagaagggagaatgagtagttgaaggtattatttattgagaggtagggtttgggtgagatgggatatttgtagaggttaaggaaggtgtggtgtatgagttagggaggttgtttttaatttgtgggtggagatggtgtttgtggggttggattggttttgggaagggaaatggaataaaaagattaggttggaattttttggtgagttgtttagggttatgtgtagatttgagttgtttttttttttttatggtaagtggtgggattagattttttttattttaagagggaaggtaggtatttttattttgtaggttatttttgagaagtttttatggttttttagtagtggtaggtggagtattaggtttggtttatgaaggatgagttttgaggtgtgtgttagattagttagggttaattttttttgttgttttttaggtgttttttgaggttgaggttttgggttggtgggggttttgtgtgtggggtttatatggtagggttgttgtttttgtggaggggtttttttatatttgtagttgggtgtatttttgtaatgggtatgtttttatttgtgtattggtttgggaaggttttgagaagtgtgtggattttattttaaaatttttttagtgtgtttttgagtggtgtgaatgggggagaggggagttggtgtaggttattttttgtaatttaatattttagtgaaattgaggtggtttttgggtttttatattgatttgttgtttgttggagtgagtgttgttttggtagttatgtatggttgagtatggagaaggaaagggtgatttggtagtgttttaggggtttggtagagtgtttgggttttatggtttttttgtaaatttataattttatttttgggtgaggttttttattttttagagtgttggtaggttgaaatgatttattatgtatttgtttttgtttttgttttatttttggaaaaggtggtatattggttagggaagtaggtatgattttgttgtagttaggatggtatagtttttgtattttgtttttaaaaggtggttttgtgggtttattttttgtattatttgaagtagttatttagttaattaatttttttattttttttttttttttgagttagtgtgatttttatttaggaaattagggtgtttggtgtagagttttttagttatatgtttgtgtttttttttttgattgaggttatagtttgaggtaaagggtttgtttttggtataatttgagtttgtgttttttgttttggtttttgttttgttttgtatttgatagatgtgatgttgatttggggttttttttattttgggggtgttgtttttggagggtggttggttttttgaggttgatgtgttagtaggggtatttttagggtgttgtgatttagtgtttgagtaaagtggttttaagtttggggttgaggtgggggtttttgttttttttttatgtttttgtgtttgttaaagggtatttttttgggattttttggtagggtggattgatgggatggttgttgaggattagatagtgtgtttagagtaggttggttgggggtggggttagggtggtgggatttttttattgtttttattgtttttattgtttttattttttttattttttttatttttttttttttttttattttttttatttttttttttttttttatttttttatttttttatttggttggtttagttttttgggatttagaggggagtttgttatttttttttagttggtggtagttttgggagtattggttggggtagttttttttagagtattgggtatgaagttgttttttttagagtgttgggtgtgaagttgttttttttattttagagtattgggtgtgaagttgtttttttaattttgagtattgggtgtgaagttgtttttttgttttgtttagagtattgggtgtgaagttgttttggggttatatttttaagtgtagttttggggtatgtgggattgggtttgtgtttatggtttta

SEQ ID NO: 3503 - DNA, 2346 bp, Artificial Sequence
  chemically treated genomic DNA (Homo sapiens)
tttttttttttatagtaggatttgagttatatgtgagttgggaagaggattgttttgttagtggtatggaagtgagaggggttaattttttagattattagttttattattataggttttattggttttagtatttagttttattatttaatttgttagttttaaaattaatttttttagtattttttgagtatttatttgttttaatgttaagttaaggatagatttggtttttggttttttaggattttgtttttattgggaaggttggatagtggggagttggtagtttttagtaggtggggtttggaattttttttgtaattttaaaggaggtttaagagaggttgtttttgggaaatttgaaatttagttatatggggttaagttattaggttgtttttttttattgtggttttttgatttatttgttagagtttggatttttttttagggttaaagttttttttttagtttttttttttattgttttttagggggttttattttgagttagaaaaggtgtttgagatagaggttattttttttttatttgtttttgagtatggttttttttgagaggttttgggtttgtgtgatatttttatggatatattgggaaagttagttgtttttttgtttttatttaggaggttggggttatagtagttggggttttagttttttggttttttggttttttttttatttgtttttttggtaggatttagtatgttttgggatagagtttatttgatatgggatagtaggaggttgtttttgttaaaattgggtgaaagtggtgtttttggtatggtttttttagttagaggggttatggtggtttttgtttttggtggagtttttggagtttgaaagagatggaagtttgggggtaaggatggagtttagagagaggtaggtaaatatattatttagaaaaggtaaagtttattttagtgttgatagagagagggtgagttttgtatagtaattttaaaaatatgttattttttttatttaagaggtaagaattggttgtaagttatggggttattaaattggttgtagttatagtaagtagaagaggttatggtttaggtttttttagattttttttgggatatatggttttttgggggggtttggtgaaattatttggattaggagttattgtatatggttatattaggtttgttgtagaggtaggtagttaaggttatgtggtaggtggtgatttttttgtggtatgtggtaatgagaggttgtgagagatttatttttttggtttggaatagagtatggagtttttttgggttttttttgaagttatttttagttaggaagtttatgaaaggtatgttgatggtattatggatatggtttgagtttagttttgggtagggtagaggatatagtttaggggatgtatgaggggtggggattaatggggtttggaggattttattagttatagttggaaggatagatagttttgtaaataaaaataatatttttgttttgtttggagtttaatttatttttagttttatttattattattttttatgatttaagatgtttgtaattttttttttaatatttgttttgaagtagagatgtttaaaattatatttgtttgagaagatagtggtatgagttttagttttattaatttttattttgggtaaattattttatttttttgaattttagtttttttatttgtaaaatgggtttagtggtatatatttattttatagttatgttgagaagagtaaatgggataatttattgtaaatgttatgtgttgagaatatagtggtgaaaggtagagatatagttaggttttttgggagattttagtttaataagaaaggtagatgttaaatagataattatataattaattagatatgtttttattttatagatgaatttgttgagttttggtaaaataatatggtttatttaaggttatatagaaagatgaaggtagatttaggattatattggggtttttggttttttgttaagtatatagttgtagaaagagtaagtgatttggtgttagatgtgaggttaaattttattggagtaagttatgttagttttttgagttttagtttttttataggaaaaatggaaatgagagtatttattgtgtattggttgttgtatgaagtgggtggtataaggaaagtgttggttttggaggttggtttatttattttgttatgttgtgtttttagttattttattatttatggagggggtagggggagaatagggatagtgtgggtttttttggttttttttaagaatttggatggaagtagagtggag

SEQ ID NO: 3504 - DNA, 2346 bp, Artificial Sequence
  chemically treated genomic DNA (Homo sapiens)
ttttattttgtttttatttaagtttttggaggggattaaaaaggtttatattgtttttattttttttttattttttttatgggtggtgaagtggttgggggtgtagtatggtagggtgggtgggttagtttttaaagttagtgttttttttgtgttatttgttttgtgtagtagttaatatatagtggatatttttatttttattttttttatggagaaattgaggtttagagagttgatataatttgttttagtgggatttgattttatatttgatattaggttatttgttttttttgtaattgtgtgtttaatagaaaattagaggttttgatgtaattttgggtttgtttttatttttttgtgtggttttaggtgagttgtgttgttttgttaagatttagtggatttatttgtaaaatggggatatatttgattagttatgtggttatttgtttagtatttgttttttttgttagattggaattttttagagggtttggttgtgtttttgttttttattgttgtgtttttagtatatagtatttgtaataagttgttttatttgttttttttaatatggttgtgagataggtatgtattattgagtttattttatagatgagaaaattgaggtttagagaagtgaaatgatttgtttaaggtaaaggttagtggagttgagatttatgttgttgtttttttaagtaggtgtgattttgggtatttttattttaagataggtgttaggagaggagttgtaggtattttaagttatgagaaatgataataggtggggttgggaataaattgagttttaagtagagtaaagatgttatttttatttgtaaagttatttatttttttagttatagttgatggaattttttaggttttattagtttttattttttatatattttttaagttgtgttttttgttttgtttaggattggatttgggttatatttgtggtgttgttaatatgttttttatggattttttgattgaggatggttttgagaagggtttagaagagttttgtgttttgttttagattaagaaggtggattttttgtagttttttattgttatgtgttgtaagggagttattgtttgttatgtggttttggttgtttatttttgtggtaagtttgatgtggttgtgtatgatggtttttggtttgagtggttttgttgggtttttttagagagttgtgtgttttagggaaagtttgagaaggtttgagttgtgattttttttgtttattgtaattgtggttggtttagtgattttatgatttatagttggtttttattttttaggtgaaggagatgatatgtttttagaattgttgtgtaaggtttattttttttttgttaatattggaataaattttgttttttttgagtagtgtgtttgtttgtttttttttgggttttatttttgtttttaaatttttattttttttaaattttggagattttattaaggatagagattattatagtttttttggttggggaagttatattgaggatattatttttatttagttttggtagaaatagttttttgttgttttatgttaggtggattttgttttagagtatgttgggttttattaggaagataggtgggaagggaattagaaagttagagagttgaagttttagttgttgtagttttagttttttgggtaggggtggagggatagttggtttttttaatatgtttatagaggtgttatatagatttagggttttttagaagaggttatgtttaggagtaggtgaaaggaaggtggtttttgttttgagtattttttttggtttagagtaagattttttggggagtagtggagggaggggttggagaaagagttttggttttgggagaaggtttaggttttggtaggtgaattaggaagttatagtagaagaaagtaatttgatagtttggttttatgtggttggattttaagttttttagaaatagttttttttagattttttttggggttgtaagaagaattttgggttttatttattggggattattggttttttattatttagtttttttagtgaagataggattttggagggttggagattaagtttgtttttggtttggtattggggtaaataggtgtttaggagatgttgaggaggttggttttggggttggtaggttgggtgatggggttgaatgttgaggttggtgggatttgtagtggtgggattggtagtttggagggttgattttttttatttttatgttattaataaaatagttttttttttagtttatatgtggtttagattttattgtgggaagaagaa

SEQ ID NO: 3505 - DNA, 2400 bp, Artificial Sequence
  chemically treated genomic DNA (Homo sapiens)
ttattttaaatttatgttttagttgttttttatttaaaatggaaataataatatttattaaataataatatgtataaaatatttagtagatagaagatatttaataaatagtaggtttgtttttattattttttgtaagagttttttgttaattatttggtttatttgtatgtgtaggttaaattttttatgataaattggattgtgttttgtttttattgttattgttttatatagttttattttgtttgatattatttggggtttagaaattttttttggttgggtgtgatggtttatgtttgtaatgttaatgttttgggaggttgaggtgggtggattatttgaggttaggagtttgagattagtttggttaatatggtgaaattttgtttttattaaaaatataaaaaaaaaattagttgggtgtggtggtgtgtgtttgtaattttagttatttaggaggttgaggtagtagaattgtttgaatttaggaggtggaggttgtagtgagttgagattgtgttattgtattttagtttgggtaataagagtaaaattttattttaaaaagaaaaaaaaaaaaaaaggttaggtatggtggtttatgtttgtaattttagtatttttggaggttgaggtaggtggattataaggttaggagtttgagattagtttgattaatatggtgaaattttgtttttattaaaaatataaaaattagttaggtttggtggtgtatatttgtaattttagttatttaggaggttgaggtaggagaattgtttgaatttgggaagtggaggttgtagtgagttgagattgtgttattgtattttagtttgggtaatagagtgagattatattttaaaaaaaaaaaaaagaaatttttttgtgtgtaggattttgatgttgtaaagagataaagattgatgttgttaatttttggtttgagtgggtagtgtgtatagttgtagtgttttaatagtttgtttttttttttttgtttttttagttgtttttgggatattttagtatgtggatgagtagtttttgttatgtttttttttatttgtggttttggtgattatgttttggtttttgattgtttaatgttgggtttttgtttatatttgtggtagggttttggattggtgatgtgttattttaatttttggtgtttggttttttggttaattttgatttttggaattagtgggattagtaatatattaaggagttttgtttttttattagagttttggaatttgagattagttggtgatgatttttgaatattgttattgttgtaaatattttataattttaggttttggtattgagttattttttatgggtgatattatgaaattttgttttagttagttttgtaggttttgattttgtagagggaagaggtagaaagagagaaattgttagagtataattttatttgagtttaatattatagaaataaagggatgtattaaatggtatttttggaaatttttatgtttttaaatattttttggtaagttgtttttgaagttagtgggggttttttagatagagaggttttttttttaaattttagtgttgttttgttttttttttttttttttttatttttttttttttttttttgtagagatgtaagaaattgttgttttataaaaattataattgtagtagttaaagttggggttattttgtgaatttattagagatttaaagattttttattggttttgggttgtgtttagtgtttttggttttagagaataatttgaatgattttttggttttttggtataaattatttttggtgagatatgtggtttaatttataggttttttattagttttttttttaaaattatgtttatttgtttttttttgttagagaatatatagttgagaatattgttgaagttgagattgattattgtgtattaggaaagatttggagttaggattttggtgggatttggagttttgaggtagtaataattgaataagtagttttgttttttaggttgtagaagtttgaatgtatttttttttagaatttgttataggaaattgggggttttgttaggttagtttaattgtatgtaaaagattattatttttagaagttaagttgttttttatgaagaggtaaggaaaggggaaatttatatgtgattttgattttggtatggtttgatagagttttttgaaaattttttgtatgtgtgttaaaattagggaagtatgtgattgttaagtaggtaatttttgatgatttgtaaagttaggtggtagggttttggggagttttagtataatgatattgtgtggtttttttttttgtggaattgaggggaaattattttttttaatattttgatttgattt

SEQ ID NO: 3506 - DNA, 2400 bp, Artificial Sequence
  chemically treated genomic DNA (Homo sapiens)
aaattaaattaaggtattgggaagaataatttttttttgattttataggagggaagattatataatattattgtgttggggttttttaaggttttgttatttggttttataaattattaggggttgtttgtttggtagttatatgtttttttggttttagtatatatataaggagtttttagggaattttattaagttatattaaaattagggttatatgtgggttttttttttttttgtttttttataaaagataatttggtttttgaggatggtggttttttgtatgtagttgggttgatttgataaagtttttagttttttgtggtaggttttgggagaggatgtatttaagtttttgtagtttaggggatagggttgtttgtttagttattattgttttggagttttaaattttattaaagttttgattttaggttttttttaatgtatagtagttagttttagttttggtagtatttttggttgtatgttttttggtagagagaggtagatgaatatagttttagggagaaagttgatgggaaatttgtgagttaagttatatgttttattaggaataatttatgttaggaaattaggaagttatttaagttgttttttgaggttaaagatattgagtatagtttagagttaataaaagatttttgagtttttggtgaatttatgaagtgattttagttttagttattgtaattatgatttttatgggatagtaattttttgtatttttatagaggaagaagagggggagtgggaggggaaggaaagagaatagagtggtattgggatttgaaaggggaatttttttatttgaggagtttttattggttttagaagtaatttattaaggggtatttaaagatatgaaaatttttagaaatattatttggtgtatttttttgtttttgtaatattaaatttaggtgaaattatattttgatagtttttttttttttgttttttttttttgtagagttaggatttgtagaattggttgaaataagattttatggtgttatttatgagagatgatttaatgttaaggtttgaagttatagagtgtttatagtggtggtgatatttaggggttattgttaattggttttgagttttaaagttttgatgaagaaataagattttttgatgtgttattgattttattgattttaggagttaagattagttaggaagttaaatattaggagttggggtggtatgttattagtttagagttttgttatggatgtaggtaggagtttagtattaggtaattaggagttagaatatgattattagggttataaataggaagaggtgtgataggaattgtttgtttatatattggggtgttttagggatagttggagagatagaaaggagaaaataggttattagaatattgtagttatgtatattgtttatttaggttagaagttgatagtattaatttttatttttttataatattagaattttatatataaaaagattttttttttttttttttgaaatgtagttttgttttgttgtttaggttagagtgtagtggtatgattttagtttattgtaatttttgttttttaggtttaagtgatttttttgttttagttttttaagtagttgggattataggtgtgtgttattaagtttggttaatttttgtatttttagtagagatggggttttattatgttggttaggttggttttgaatttttgattttgtgatttgtttgttttagtttttaaaagtgttgggattataggtatgagttattatgtttggtttttttttttttttttttttttgaggtggagttttgtttttgttgtttaggttggagtgtaatggtatgattttggtttattgtaatttttattttttaggtttaagtgattttgttgttttagttttttgagtagttgggattataggtatgtattattatatttggttaattttttttttgtatttttagtaggaatagggttttattatgttagttaggttggttttaaatttttgattttagatgatttgtttattttagttttttaaagtgttggtattataggtatgagttattgtgtttagttaaaaaaaatttttaaattttaaataatattaggtaaaatgaaattatgtggaataataataataaggataagatatggtttaatttattataaaaggtttggtttgtatatgtaaataaattaggtgattaataggaaatttttgtaggaaataatgaaagtaagtttattatttgttaagtattttttatttgttaagtgttttgtatatgttattatttggtggatattattatttttattttgagtaggaagtagttgaaatataggtttgaggtga

SEQ ID NO: 3507 - DNA, 2500 bp, Artificial Sequence
  chemically treated genomic DNA (Homo sapiens)
aataggggtttttgggttttttaataggaagtattagattaggtagttagtagataattattggtggattatagggttattagagtgagatttatttatagataaagattggttagtgatgaagtttatttgggtgtaaaggttgagttgagaggtttttattaattggagtgtgttagtgagggtgagtagaaggtggtttttagggagaatatgggtagggtttggagttagtatttttttagggttggaggaagtagatttaggatttgtttgattgggatggggtttttttttgttatttttgtttttatttgtttagttttgtttttttgttttgagagatgtttttaggtttgggtagatgaagttaggggttttttgtttttttggaaggtttttttttgtttggagtttatgaaagattagtaggtaatgtggtaataaaaaagattttggggtagaggggtgttatgagaggtgggtttggtgttgatatttaattttgtgttttttttttgtaggatgttggtggattgtgtgtttttggtggaggtggatgatatgatgattatgggtaagaagtttgattttaagtgtgtttttatttatgtgtagttgttttataattatttgtgatgttatgaattgtgtttgtgtggtaagaatgtttagtttgtttgtttgtatggttagttagtggtaagttgttgtttttattttttgggtattgttttttgtttgtgtgtttgtttattgttgttttgtttgttgtgatatttttttttttatatatatatgtagtgttttgataaattattggtttttaatgattttgatttttttttgtgttttttgggggtggggagggggtttgaattgaaggtagttttgtaaggtttttaattttagtagggatttttagaggttttttttttgattttttattttatttgtttgtagtaatgaaggagttgagttttagttaaggtaggagggaatttagtggagttggggaaggaagaaagtggggttgggagaatttttttaattttatttttgttggtttggggatgggtattggtttttagtaagagaagtatttttgggatgttgagtgttttattttgtttttaggatttaggtaggtaggttttagttttgttgtgtttttggatttataggttagtgtggtttgaagttttttttgggggttttgtgggtgtttatatgtatttggggggtatttgtgtgttgggtgttgttttgtggtagaagttgagtttttgtattagtgtattgatttttttgtgggttattttattgagtgggatgtgttgaggtggaggaggggtggggttagtaggttgggttttgtttttggttttgtttttagtttattttttatggttttatttttagttttttgtagtggtggtttagtagtatgagtttagggttggttttagggaggtgttttattattaggttgtgattggaggtggtgttaaggagtggggtggtgggtagagggaggtggtggtttttgtagttttattgatgggaatagtattgttttttttgtttagagtttattttgtgtttgggaggggttagggtttttgtttatatgtgagaaaattagggtttaaagaagtaaagggtttttttttttattttgtggtagttattattagttaattttttttgtttatttaatatggagattattttagaattttttgggagttattattaattaatttaatttgttagttgaaaattatttgttatttttttttgaagttatgtggagatttttttaggtgtttattttatttttttttttttagaatagaaggatattagaatggaatgttttgtgtgatgaaagtttttatttggggaggaattagagtattagagattatgattttagtttatttgaggtatagatgagatattgaagtttagtgaggttataaagtaagttaggtgtaggttagatttttagtttaggttagatttttagtttagggattttttttttttttttgttttagttattgggattatgttgtttattttttaagaggtttagggggaatagagttagggatttttttttttaaatttattttttttaggtggtttagttgttattttttgtaggtttggagggggataaaatgggataggttaggagttttttatgtttattttagttatatttttaaagttatatttttttatttttgagttgggttgggttgtgagttatttttggattagtagtttttaaggtttgaaggaaatgttggatttttgtgggtagaagggggaattgtgtatataggtggggagatttaggtttagagatattaggggaaaagagtaaggttagagatttatagtgtgtttgttagttttggggtttgtatattttattggttgtggattgatttttaatgtttaggggaaatgattattttgttttttt

SEQ ID NO: 3508 - DNA, 2500 bp, Artificial Sequence
  chemically treated genomic DNA (Homo sapiens)
agaggagtagggtgattattttttttgggtattgggagttagtttatagttagtaggatgtataggttttaaggttggtaggtatattgtgggtttttggttttgttttttttttttggtgtttttaggtttgagtttttttatttgtatatatagtttttttttttgtttataagggtttagtattttttttagattttgggaattgttgatttggggataatttatagtttgatttaatttagggataaggaagtatggttttggggatgtgattggaataaatgtgaaggatttttgatttattttattttatttttttttagatttgtgggggatgatagttgaattgtttaaaggaggtgagtttgaaggaagaggtttttagttttgttttttttgagttttttggggagtgggtaatatggttttaatgattggggtggggaggggggaaggatttttaggttgagagtttagtttaggttgagagtttagtttgtatttgatttgttttatgattttattgggttttagtgttttgtttgtattttgagtagattgaggttatggtttttgatgttttggtttttttttaggtgaaggtttttgttatgtaggatattttattttagtatttttttgttttgggggaggggaaatgggatgggtatttgggagaatttttatgtaattttagaaaggggtggtagatggtttttaattgataagttgaattgattggtagtggtttttagaggattttgaggtggtttttatgttgggtgggtaagagagattgattagtgatgattgttatagaatggagaggagggttttttatttttttgaattttaatttttttatgtataagtggagattttggttttttttgggtatagagtaagttttgagtaaaggaggtaatgttgtttttattagtaaggttgtggaaattattatttttttttgtttattattttgttttttaatattatttttagttataatttggtgatgaaatatttttttggggttgattttgagtttgtgttgttgggttgttgttatgaggaattagaggtgaggttgtgggaggtgggttgggggtgaggttagaggtgaggtttagtttgttgattttgttttttttttgttttagtgtattttatttagtgaaatgatttgtgaagagattaatgtgttagtgtaggagtttggtttttattgtaaggtggtgtttgatgtgtaggtgttttttgagtatgtgtgggtgtttgtgaagtttttagaggaaattttggattatgttgatttgtaggtttgggggtgtggtggagttgggatttatttgtttgagttttggagatagaatgaagtgtttagtattttgggaatattttttttgttgagagttgatgtttgtttttgggttagtagggatggggttggggaggtttttttaattttatttttttttttttttagttttattaaatttttttttgttttaattgaggtttgatttttttgttgttgtgggtgggtggggtgggaggttggaagaagaatttttgaggatttttgttggagttggagattttgtggagttgtttttggtttaaattttttttttatttttaggagatgtagagaggagttaggattgttgaaaattaataatttattaaaatgttgtgtgtgtatgtgggggggagggtgttgtaatagatagggtagtggtgggtggatgtataggtaggagatggtgtttggagagtgggggtggtagtttgttattggttggttatgtgggtgggtaggttagatatttttgttgtgtaggtgtagtttgtggtgttgtaggtggttgtagagtgattgtatataggtgaagatatatttggggttaggttttttgtttatgattattatgttgtttatttttattaggggtatatagtttattagtattttgtagggagggggtatggggttggatgttagtgttagatttgttttttgtggtgtttttttattttaaggttttttttattgttgtattgtttgttggttttttataaattttagatagggaaaagttttttaggaaggtaggaagtttttggttttatttatttaagtttggaggtattttttggggtgggggagtagagttaggtaggtggaggtggagatggtagaagagagttttattttagttaggtaggttttgggtttgttttttttaattttggggaggtgttggttttaaattttgtttatgttttttttggagattattttttgtttatttttattggtatattttagttggtagaagttttttagtttggtttttgtatttagatgggttttattattggttaatttttatttatggataggttttattttagtggttttgtggtttattgatgattgtttgttagttgtttgatttggtattttttgttgagaggtttagggatttttatt

SEQ ID NO: 3509 - DNA, 2470 bp, Artificial Sequence
  chemically treated genomic DNA (Homo sapiens)
gttttttgttttatgaatgttagaagtaagtaaaaatgtttttatttaaattatttttttttttataaaaataagaaaattatgtaattaaaataattttttgtttttttaatgagtttattatttgatttagtaattttttaatatttttatttgttttattgtaagtagttttagtgtatgttggttagatggtttttgggtttatattagtttaattgaattaggagaggagttttagaaggtgtattggatagttatgttagaggttgtgtgtaattttaggttagattagtggttttttgttttatttgaattttaaaataattgtgaaatttttaaaaaatatattgttgttggggttttatttatatagattaaattatttttaggggtaggttttgggtttgagtttttttgtttttgtttttgtgttttttaatttttttagttgttttttttgtgagtgaaggttgagaagtatagttgtttttgtgaggaatttagtttttagagagagtttgtttgttgttttttattttttagagaggttgtagggtgtttagattttgtaggtattgttgttttttgttaagtttgatgttgttatttaattaatatttgtttatattaattagttgttatatgtattgaaggggagtggttttttttgaagtttttagttgttgattatataagatttggtttgaagtgggatttttggaaatttaattaagataatgatttttaggtttttttaaaagtttattttttaggtataggtaggtaatgaaataatttaattgtggttttttttataatattttttattttatagtattgatggagtaggagggtgtggataggtttttttgggtttttggtgttttttgttaggtgttaaaataaagaggattattgtgttttttggaattggtttaaatgtttatgtttaagattaagatttagggaaatgtatttttgtttgatatttattagtttttgattgtgaaaagggtattaatttgtgtaatggtgttgtgatttggttgtggattttagtttttaaagttgggtatttttaattaggagaaattaagtggggttgttatatattttgagaataagtaatattatttaaatttaggtagttttaattattaatttaattgttgaatttttgttgttatatgttttttaaatagattagtataattttaattaggatttaaaatgtattatttttgttttggaatttagaatttgtagttgatgggagtttttggaggtttaatgattttaattatggtgagaaatatttttttttggtggggaggggtgtggttggtggtgaggagggtatttttttgggttggagaaggttggatggtagtttgttttgaaagttttggtttgttggattgggggtttgggggtggggggaatatagagaagtagggttggtggaggggaggagggattttgtagggtggtatatgatgggtgggagtggggaggaggagggtttttggtgtggggaggagttgtgggaggggggatgttggttgtagggttttggagttttgagttgtgtttgtggttttagtgttttgattttttgttagggaaatttggaaggttaggttgggttgtagttaagttttggagtgaggagttggtgggtggagttggtagtattgtgttatttatttttattttttaattttttaagtagtgaagtttgtttggttgttttggttttttgtttttgtttttgttgttgtttttgtttttgtttttttttattttttgtgtgttggttttttgtaggttgtagattaaggggttttaagttttgaaagtaagttagttaaatgttttgtaagtttggtttagtaaaattatgtatgttgtatatattttaaaagaaattagatatttttttaaagttgtgtgtgttttttttttttattttttttatttttattttagtataaattatttaagaattataggtgattttttttgttggtttgtgagtgttagggtttagtttgtttttttttttttattattattattatttttgtttttggtattaggatttttttattggttatttgtgtgtttttggtgtgtgattttattttttatggaatgaaaagtttttgttggaaaatagggtttttggtgaggtaggttttgggagtttttttgtttagtgagaatgttttgtgttatgtagtgatttatgttttagagaatagtagttgattagaatgtttaagagtttggtgtttgggtggttattattaagtgaagaatttgaggaggaggaaaggaaaaagtgaggagtaaggatttaaaatttatttagtggtttttagagggagggggataataggatttaaagagtttgggttttttggtttggggtaggatttgttaagagggatttgtgggtgttagg

SEQ ID NO: 3510 - DNA, 2470 bp, Artificial Sequence
  chemically treated genomic DNA (Homo sapiens)
tttgatgtttataggttttttttggtgggttttattttaggttagagagtttaggttttttgagttttgttatttttttttttttggaggttattaagtggattttaaatttttattttttatttttttttttttttttttttgagttttttatttagtagtgattatttaggtattaggtttttgaatattttggttagttgttgttttttgaagtatgagttattgtatgatataggatatttttgttgggtaagggggtttttaaggtttgttttattaagggttttgttttttgatagaaattttttattttataggaaatgaggttatatattaagagtatatgggtaattggtgagaaaattttggtgttaggaatgggggtggtggtggtggtagaagaggagaggtaaattagattttaatatttatgaattagtagggggaattatttgtggtttttgggtaatttgtattagggtggggatgaggagggtggaggaaagggatgtatatagttttaaaaaaatatttggttttttttaaagtatatataatatatatgattttattaagttaaatttgtagggtatttggttagtttatttttaagatttggagttttttaatttatggtttataggagattaatatataggaggtaaagaggggtaggggtaggggtagtggtaggagtgggggtgagaggttagggtggttaggtgggttttattgtttggggggttgggaggtgagggtgggtggtgtagtgttgttagttttatttgttggttttttgttttagggtttggttgtagtttggtttgattttttaggtttttttggtaggagattaaagtgttgaagttataaatatagtttagaattttgaggttttgtggttaatatttttttttttgtggtttttttttgtgttaggagttttttttttttttatttttatttgttgtgtattgttttgtagggtttttttttttttttattagttttgtttttttatgttttttttatttttgaatttttaatttagtgggttgggatttttggggtgggttgttatttggttttttttgatttgggaaagtgttttttttgttattggttgtgtttttttttattgggagaagatattttttgttataattaaagttattaagtttttaaaggtttttgttggttgtaggttttgagttttggaatgaagatgatgtattttaagttttagttaagattatgttgatttatttaggagatatgtagtagtgagaatttagtggttaagttagtggttaaggttgtttaagtttaaatagtgttatttatttttaaaatatgtagtagttttatttaattttttttaattaaaggtatttgattttagaggttggagtttgtggttgggttgtggtgttattgtataggttggtattttttttataattagaaattagtgggtgttaaatggaaatgtatttttttagattttaattttaaatatagatgtttaggttagttttaagaaatataatgattttttttgttttaatatttgataaggagtattaaaaatttaggaaagtttgtttatatttttttgttttattgatattgtggggtgaaagatgttatggaaaaaattgtagttgggttgttttattatttgtttatgtttggaagataagtttttggaagaatttggaagttgttattttggttgagtttttagaagttttattttaggttaaattttatatagttagtaattagaaattttaaaaaggattatttttttttaatgtatatggtaattaattaatataaataagtgttaattaggtggtagtattaggtttaatgaggaataatagtgtttgtaaagtttggatattttatagtttttttggaggatgagaggtggtgggtaggttttttttgaaggttgagttttttataggggtagttatgttttttaatttttgtttatggaggaggtaattggggagattaaaaaatataaaaataaaaataaaaaaatttgagtttaggatttatttttagagatgatttgatttatatagataaaattttagtagtaatatattttttagaagttttgtagttattttaaaatttagatagggtagagaattattgatttaatttaaaattgtatatggtttttggtatgattgtttagtgtattttttggagttttttttttgatttagttggattgatgtagatttagaggttatttaattagtatgtattgggattatttataatgaggtaaatgaaggtgttagaaaattgttgaattaggtggtaaatttattgagaaggtagaagattattttgattatatgatttttttatttttatgaagaggaaggtaatttggatgaaagtatttttgtttgtttttaatatttgtgggataggggat

SEQ ID NO: 3511 - DNA, 2491 bp, Artificial Sequence
  chemically treated genomic DNA (Homo sapiens)
aatgtaaaaatgttttgaagaaagagatattgagtattggaattaagtattttatgtttttttttttgtaatattggggattaaggattattatttgtatttttggtgaagaaattgaggtatagagaagataaattatggttttttggttataaagtaagtagtagagtttagagtttgaagttaggtttgatatttaagttttgtagtaaattttttattgaggtaggtaagttttgttttgtagagagtggtaaattagggaaaaaagaattaaatgtgtttgagtttaatagaatatatatattatatttaaagagaaagatattttttttataaaaagtttgaggataaatgagattttatgtgatgtgttttgtattaaaaaaaaaaagttagattatataagttagattggtgttgattaaagaagagtaaggtaataaatatgtataagaagaaggaagtggttggttttattttgggtattatttaagttataggtaggggaggggataggttttgtatggggatagttttttgatttgtttttttttttttttatttttttttttttattatttttttttttaaaatttaaaaaattttaagtaggaaaaaagggagttaattaaaaaagagaaaaatatttttgagattaatgaagtttttataatttatagtgatagatagggatttgtagaatagtaatttgattaaataaggatataagggatttaaaaggattttttagttgtgtaaagtgtgtttatatgtttgaaaaatattgtatttatttggtttttaaatttgaaaattttttgatgggggagattgtttttatttggaaattaggaagaaattataaggtaaggttatggggttttggtagggttggggattttatgttgggtggaaattttaagaagttagttaagggtttgtaggaggggttttggtagagagaagtattagaatgtaagggtaggtaaagttatttttatagaaggtgattgtgggttgagtttgaggttttttttagatggggaagagagaatagtatattttttttgtttatgttttggtattttatttaagaattagttgtttgttagttatttgttattggagatagttttgttggtggtttttagaaaaagtgaagtagttagaggatgaattgttatttggggaatatatttgtatataggataggaatggatgggagtggggagtgttttggggttattgtttaaatgttatttttatggtttttaagatttgtattagtagtttagttgttgatgaattataatttttggataagttgtagaggttttttttgttttatgtgtttatttttgttgtttatattgggggatttatgttttttggggttaggaggagaaaataatgagttattggggataagagaaaaataaaaatgttttgtatgtgtaaaattatttaaaatggaggtttttagaggatatttaaattttagttaattagttagaaagggttttgttgggggtatattttatgtgtttttgttatttttggatgtagtaaagttagaaatgtttatattttttggagggattatttgtgtaaataggataggtttttttgagaaggttgtttgtttttttgggattttgaatttgagaagaaatggttttggtttggtgtggtggtttgtgtttgtaattttagtattttgggaggttgaggtaggtagattataaggttaggagattgagattattttggttaatatggtgaaattttatttttattaaaaatataaaaaattagttgggtgtggtggtaggtgtttgtagttttagttatttaggaggttgaggtaggagaatagtatgaatttgggagttggagtttgtagtgagtggagattttgttattgtattttagtttgggggatagagtgagattttgttttaaaaaaaaaaaaaaaaaaaaagaaatggttttgtatttttgatttgggaggtttaattaagtagaggaattgttggttgtaaattttttaaagtagaggattttttgggaggttgaggtaggtgattatttgaggttaggagtttaagattagtttggttagtatggtgaaattttatttttattaaaaatataaaaattagtggattgtggtgggttgtatttgtaattttagttatttgggaagttgaggtatgagaattgtttgagtttgggaggtggaggttgtagtgagttgagattgtgttattgttttttagtttgggtgatagggtaattttattttaaagtaaataagtaaagtagaggattttgatggttatttttaagtttatagttatttgtatattttatgtggtgaagtattggtggggggtttaggaagttttgtatgagttggttgtagttgttatgattttaatttttatgttattttttgtatttagttatagagttgtatttttagaga

SEQ ID NO: 3512 - DNA, 2491 bp, Artificial Sequence
  chemically treated genomic DNA (Homo sapiens)
tttttggagatgtggttttgtggttaggtgtagagggtggtgtgggagttggaattatggtagttataattaatttatgtagggttttttgggttttttattagtgttttattatataaagtgtgtaggtagttatgaatttgggggtggttattagggttttttgttttatttatttattttgagatggagttgttttgttatttaggttggagggtagtggtataattttagtttattgtaatttttattttttaggtttaagtaatttttatgttttagttttttgagtagttgagattataggtatagtttattatggtttgttaatttttatatttttagtagagatggggttttgttatgttggttaggttggttttgaatttttgattttagatgattatttgttttagttttttaaaggattttttgttttagaaggtttatagttaatagtttttttgtttaattggattttttaagttagagatgtaggattatttttttttttttttttttttttttgagatggagttttattttgttttttaggttggagtgtagtggtaagatttttatttattgtaagttttagtttttgggtttatgttatttttttgttttagttttttgagtagttgggattataggtgtttgttattatgtttggttaattttttgtatttttagtagagatggggttttattgtgttggttaggatggttttgattttttgattttgtgatttgtttgttttggttttttaaagtgttgggattataggtgtgagttattgtgttaggttaggattatttttttttaggtttgagattttaggagaataaatagtttttttaagaggatttgttttgtttgtataggtgatttttttaagagatataaatatttttggttttattgtatttaaagatagtaaagatatataaaatatatttttagtaaaattttttttggttagttggttgggatttgagtgttttttaaaagtttttattttaggtggttttgtatatatagggtatttttgttttttttttgtttttagtgatttattattttttttttttagttttaggaagtataaattttttagtatgagtggtaggggtgaatatatggaatgaggggggtttttgtagtttgtttgagaattataatttattagtggttgagttgttgatgtaagttttggagattatgaggatggtgtttgaatagtagttttagggtgttttttatttttatttatttttgttttgtgtgtaggtgtgttttttgaataatgatttattttttggttgttttgttttttttgaaagttgttaatagagttgtttttgatgataggtgattaatgggtagttgatttttgagtgagatattgaggtgtgggtaggagaggtgtgttgtttttttttttttatttgggaagggttttaggtttagtttatagttattttttgtgagggtggttttatttgtttttgtattttaatgtttttttttgttagggttttttttgtagatttttggttggttttttggggtttttatttaatatgggatttttagttttgttagaattttatggttttgttttgtgatttttttttagtttttaaatgggaataattttttttgttagaaggtttttaggtttgggagttaaataaatatggtattttttagatgtatggatatattttatataattggagagtttttttaaattttttatatttttatttaattaaattgttgttttgtaggtttttgtttgttattgtggattatggagattttattggttttaaggatgttttttttttttttaattagttttttttttttttgtttaaggttttttgggttttggagggaggggtagtgaagggagggaagtagagaaggaagaagataagttaggagattgtttttatgtagggtttatttttttttttgtttgtaatttgggtgatgtttaaggtagagttagttatttttttttttttatgtgtatttattattttgtttttttttaattaatgttagtttggtttatataatttaattttttttttttagtgtaagatgtattatatgaagttttatttgtttttaaattttttgtaagaaaagtatttttttttttaagtataatgtatatgttttgttaaatttaagtatatttgatttttttttttttaatttgttattttttgtaaggtgaggtttgtttattttagtgggaggtttattatgggatttaggtgttagatttggttttaaattttaggttttgttgtttattttgtagttggagaattatagtttattttttttgtgttttagtttttttattagaaatgtagataataatttttagtttttagtgttgtagggaagaggatgtagaatatttggttttaatgtttaatgtttttttttttaaagtatttttgtatt

SEQ ID NO: 3513 - DNA, 2478 bp, Artificial Sequence
  chemically treated genomic DNA (Homo sapiens)
tttttgtagttaggtatgttttggtttgagaagttaagtaagaatgttatgtagaatatttaggaagttttttttaaaggagaggggtatgttttttttttttttgtttttttatttgttgtttggaatatggttgtgatgttggggttttagtagttattttggattatgaggtggtttagaggaaggaagttaggagttgagaatagtagagtaaaaatgtggtttttgatgattgtttagttattatattagttttgatttttttatttttggattttttttatgtgggagtgaaataaatttttattttaagttgttattttttttgttttattatgtgaagttgaaataaattttgatagatttttatagtatataaagatgaggttatatattttttatttatatttgtgttataatttgtttttaggaggagattggaaagtagggttagatggtttagaggttttatggggttgaggttagtaggtttggttattgggttttatgggatgaaggtagaaaaggaagttgagtttggtgtttgagatggttttttaattatgttatttgatttgtgattttgtggagggtaaggttttttttgttatttttttagtattatgtttgaatttttgggaagttgttggaagggaataatagaatttgttttattttttttttttttttgtatgagggatagggagaatttttgattgagatttatatttaattttgaaggaaagaggaatgtgaatgtggattggaaaattattgtggggtgtttgttaggttttgggggtgggatatggagggtatttagggatattagggtagatgtttaatggtggagttttgttgtgtattgtaggggtagggtttattttgtaggttttttggaaggtttaatataggttagagatgttttttagagtttgtaggagagtttaggtgtggggagagggtttggagtagtagtagtagtgatggtagtgttttaaggaatttgggtttaggtattgattttgaggagttggtgatgtaggtatggggtatttatgtagggttttagtaatttttgggaaggagaatttggggtttgaaggtgaggtgagtggatttaggattggataatttgggggttttagggaagtgagatttgaagtagttaggttatattgggtttttggtagtaggtagagggttttttgtgggaagtttttggttgttggtatttggtagttgttttttgtagaggtattgggtgtagagttgtgtttattgttttgaaatttgtgatgtttagtagttttgttttagttttattatagtttttgaatgtgtgttgtattggtttttagtagtgtataattttgggttgaatatgtagtagagtagagtaaaaagatggtgtttttgtgttggtttttttttagatataagataagaaggggtgaggagggagtttttgaatatgagggttggggtgggtttttttttgttttgtttttgttttgtttagttttgttttggttttattttttaatttgttttgttggttttgaattgaggagggagtttgttagaatttgttataaagatgtgtatttgttttttgattattgtgtgggttgtttaaaaatgtgtattatattagttattttatttatatttttttattggtaatttggaaagaaggtaggtttttatttttattttatagattaggaagtggagatttggggaggtaaagtgatttgggttttgattttaatatattttaggttatattattttttagggaatgtaatgagatggttgggtagatatgggttaatttgaaaatagtttgaggaaaaaaagagattttagtttgtgttttttagtaagttattataatgaatagtgttaaaaaaaatttataaggttgtaattatatttagtaattagaatattatattgtgattattttatttaggtgttattagattgaaaataagatatttgaatatgatttagttttaatgtgtttgaatattataaaggtgaatggtaggtaataatgtgtaatatattttgggaaagttgaattttaatataatattatgtaagatagatgagtatagggttaagttgtttttattttttttttatattatttggtatgtatgatgtgtgttttttaggtatttaagattttatgagttgttaatttgtttaattagttgatttataggtggggaagagagggtgtggggtttatatgattttttatattatatattatagggtaggattattagtttggttagagtttttatttttgatttattttgtagggaggggtggtatttaagttgtttttttttgaggatatttttttgttgtttaatggggtggagaaagtttttaaattattagaaaatgaagttttttttttagtttttttgtagggagatatttgatttgattttt

SEQ ID NO: 3514 - DNA, 2478 bp, Artificial Sequence
  chemically treated genomic DNA (Homo sapiens)
ggaggttaggttaaatgtttttttgtagaggagttaaaaaggggattttattttttggtgatttgggagttttttttattttattaggtagtagaaagatgtttttgggggaaggtagtttgggtgttgtttttttttgtaaggtgggttagaggtgggggttttggttgggttggtggttttgttttgtgatgtgtggtgtgggaggttatgtgagttttatatttttttttttttatttgtggattagttgattgggtaaattggtagtttatgaagttttgggtatttggggagtatatattatatgtgttaaatgatgtaaaaaaaaaatgaaagtagtttaattttgtgtttatttgttttatatagtgttatgttaaaatttaatttttttaagatgtgttatgtattgttgtttattgtttatttttgtgatatttaaatatattggggttaaattatgtttaaatgttttgtttttaatttaatagtatttaaatgaagtaattatagtgtagtgttttaattattagatataattataattttgtgaattttttttaatattgtttattataataatttattagaaaatatagattgaaatttttttttttttttaaattatttttaaattggtttatatttgtttggttattttgttgtattttttgggaggtggtgtggtttgaagtgtgttggggttaaagtttaagttattttatttttttgagtttttattttttaatttgtgaagtggggatagagatttgttttttttttgggttgttagtggggaggtgtaaatgagatggttgatgtaatatatgtttttaaatagtttatataatggttagggggtgggtgtgtatttttgtgatgagttttggtaggttttttttttgatttagagttagtggagtaggttgggaggtgaagttggagtagggttgggtgaggtgggggtgaggtgaggaggagtttattttaatttttgtgtttaaaagttttttttttatttttttttgttttgtgtttagaaagaagttggtgtggagatgttatttttttattttgttttgttgtgtatttagtttaaaattgtgtattgttggaggttaatgtggtgtatgtttaaaagttatgatgaggttggaatagggttgttaagtgttgtagattttaggatggtgagtatagttttgtgtttagtgtttttgtagggagtagttgttaaatgttagtggttagaaattttttatggggagttttttatttgttgttgaaggtttggtgtgatttggttgttttagattttatttttttgggatttttaagttatttagttttgggtttatttgttttatttttagattttgggtttttttttttaaaggttgttggagttttgtgtggatgttttatatttgtattgttagttttttagggttagtgtttgagtttaggttttttaaggtattgttattattgttgttgttgttttgagttttttttttatatttgggtttttttgtaggttttgaagagtatttttgatttatgttggattttttaaggggtttgtaaagtgagttttgtttttgtagtatatagtggggttttattattgggtatttgttttgatgtttttgggtgttttttatgttttatttttagagtttaataaatattttgtagtggttttttaatttatatttatgttttttttttttttggggttaagtataaattttagttagggattttttttattttttatgtaaagaaaggaaggaagtagggtaggttttgttatttttttttggtaattttttaggaatttgggtgtggtgttgggaaggtggtaaaagaaattttgttttttatagagttatagattagatggtgtaattgaggggttgttttagatattaggtttagtttttttttttgtttttattttatggggtttaatggttaggtttgttgattttagttttataggatttttgggttatttagttttgttttttagtttttttttagaaataagttataatgtaaatgtggataggaaatgtatggttttatttttatatattatgagggtttgttaggatttgttttagttttatataatggggtggggaaaatagtagtttaaggtgaaagtttattttatttttatataaaagaagtttagaggtaggaaggttagagttggtgtggtggttggataattattagggattatatttttgttttgttgtttttaatttttggttttttttttttaggttattttatgatttaaggtggttgttggagttttagtattatagttatattttaggtagtaggtggaaaaataggagagaaaagggtatgttttttttttttaaaggaggttttttggatgttttatataatatttttatttagttttttaggttagaatatatttagttgtaagag

SEQ ID NO: 3515 - DNA, 2292 bp, Artificial Sequence
  chemically treated genomic DNA (Homo sapiens)
aaggggttgtagttttggtttttggtgagaggattgtagtgttggggttggttaataagtattttttattttgtaggaggttggtgtagtatttgtgagtatttgtgttgaatttttttgtggattagatattgtgtttttttgtttagagttaggttggaaaaggaaaatttgttgttggtgtgtatgtgttttaaatttttagtttgggtaagggtatgggtgttgtgaataaaggagttatttttgttggttttttttagaaattgtttatagtttgtaaaaaggttgtgttttttggttttggttgtggttgtgtaggagtttgaatattattttttttagaagttgaggtttttaggttaggtttattttgttttaaatgggtagtattggttttgttttatgtataggttttaggtggatagagttgttgtaggtatgttgttagggggataggttgttttttagttgtgtatggtagtgtgttggaaagaataaggtttgtgggtgtttttgagttgggtttggagttttgttttgttattttttagttgtgtgattggagtttttttgtttttttttgaaaatgggtttggtggtttgtttttaggtttttaattattgtgtggagttatatttgtagaaggttagtttataatagatatggtaattaatgtgatttttgtattttttttttttggggttaggagtaggtttaagaggtggttaggttaaatttttgtagggttgtgggtattgttggttttttaagttttgggattttttgggggttgggtggattttaagttttgtttatttgttttttttttatttttattatttattttgtttttttggttttttttttttttgttttgttttttattggttttttgttttttttgtttggagaggggaatgtgaaggaggtgaggagggagtagtgtaggaggatttgggttttttttttttttttttttttattttttgagggtttaattagttggtgaaggtttttaattagtaaaggaggaagtagttggggttggtgagggtgaggttggtagttaggtaggaaggtagtaggaggaggaggaagtggaggtggtattttttgagaggtgtatgtttagtgagttgtgaagatggtagggttggtggagtggttgttgtatttgattttttttttttttttaggatatgtgatggtgtttagtttggagttgggataaggtttttgtagttgatatttttataggagaagttttgggattggggtagtagtaaggtgtttatgttatatattgttttttgaggaaatgtggtttagtgattttttgattgtggattttgtgggaaattttgttaataaatgttaaagatatattttgaggtagtgtggatgtggtttgtttttatttaatagtatggtttgtgtggtttttttttgggattatttgtgtttttatatatttgtttagtgtttgtgagtttttgtgtttggtttttgtgtattagatatgatgtatttagagttaggtagtaggagggagttttgttttagaggaagtttagttatgttgttatggagagggtgtgttttttttgatgtattagttgttgttagaggaggtttatggtagtgggtgtttggagttatagtgtttgagttatttgagtgtgtgagtggtaagggagaaatatttaaattgtgtaatattagggatattgaagtaaagatggagtttggtgtttatagatgaatggtagtatgaatgagtgtgtgttttttggggttgttttaagttattataaatgtgggggtttaaaataatatatattaatttttttgtagtttggagattagagtttagaatgggttttgttgggttgtgtttttttggaggtgttaaggggaaattttttttttttgttagtagtgagaggtattatattttttggttgatgttatttgtatttttaaagttagttatgtggtgttttttattttttttttttgttttttttgtgtttttgttgtttttgaaggatttttgtggtgattttggatttgtttggggaatttaggggttttatttttaggttagtagatgagtgtttttaattttgtttgtagatttagtgtttttttgttatgttattgttatgtttatatgatttagggattaggaggtgtgtgtttttggttgggtgggagtgtgggatattattttgttttatataattagtatttttttaatatttgggggataattttaaattggttat

SEQ ID NO: 3516 - DNA, 2292 bp, Artificial Sequence
  chemically treated genomic DNA (Homo sapiens)
gtgattaatttaagattattttttaaatattagagagatattagttgtgtgagatagaataatgttttgtatttttatttagttgaagatgtatattttttaatttttggattgtgtaaatgtgatgataatatgataagggggtgttaagtttgtagatggaattaaggatgtttatttgttgatttagaaataagatttttggattttttgggtagatttgaggttattataggggttttttaaagatagtagagatgtagaggaggtaagagggagagatgggggatattatatggttggttttaaagatgtaggtgatgttggttaaggaatgtggtgttttttattgttggtaaaggagggggatttttttttagtgtttttaggaggatgtagtttagtaagatttattttggattttgatttttagattataagaggattaatgtgtgttgttttaagtttttatgtttgtggtgatttagagtagttttagaaaatgtatatttatttatgttgttatttgtttgtagatattaggttttgtttttgttttagtgtttttaatgttatatggtttgggtattttttttttgttatttatatatttaaatggtttgagtattgtggttttaagtgtttgttgttgtgggttttttttgataatggttggtgtattgaggggagtgtgttttttttgtaatagtatggttgagttttttttggggtaaagtttttttttgttgtttggttttgaatatattatgtttggtatatgggaattaaatatggagatttgtagatattgggtgggtgtgtgagaatatgggtggttttggggaaaggttatgtgggttatattgttgagtgaaagtaaattatatttatgttgttttggagtgtgtttttaatatttattgatggggttttttatagggtttgtagttaaagaattgttgaattgtgtttttttgagagatggtgtgtggtatgggtgttttgttgttgttttagttttagagttttttttgtaggggtgttggttataggaattttattttagttttaaattggatgttattatatattttaaaaaaaggggagagattagatgtggtggttgttttgttagttttgttatttttatgatttattgagtatgtgttttttagaaggtgttgtttttgtttttttttttttttgttgtttttttgtttggttgttggttttatttttattggttttggttgtttttttttttgttggttaagaatttttattagttggttaagtttttggagaatggaaaagggaaagaaggagagatttaaatttttttgtattattttttttttattttttttatgtttttttttttggatggagaggatagagggttgatgagaggtggagtagggagggaaggagttggaaggataaggtgggtagtgaggatggaggagaggtaggtggatagaatttaaggtttgtttggtttttagaaggttttggggtttaggaaattagtagtatttatagttttataggggtttagtttgattattttttagatttgtttttgattttaggaaggaaggatgtaaaggttatattggttgttatatttgttatgagttgattttttgtaggtgtgattttatatagtggttaagaatttgggaataaattattagatttatttttagagaggagtaaagaggttttagttatatggttgagaagtggtaggataggattttagatttggtttaggggtatttataggttttgttttttttgatatattgttatgtatagttggggggtagtttgtttttttgatagtatgtttgtagtagttttgtttgtttggagtttgtgtatggggtaaggttaatgttgtttatttgggataaggtgggtttaatttagggattttaatttttggggaaaatgatatttagatttttatatagttgtagttggggttagggaatatagtttttttgtaagttgtgggtaatttttagaaaaggttagtaagaatggtttttttatttatgatgtttgtgtttttgtttaagttgaggatttggagtatatgtatattggtggtaagttttttttttttaatttgattttgagtaagaagatataatatttgatttatgaagagatttaatatagatatttataaatgttgtgttggttttttgtaggatgaagggtgtttattaattagttttggtattgtagtttttttattagaagttaggattgtagtttttt

SEQ ID NO: 3517 - DNA, 3056 bp, Artificial Sequence
  chemically treated genomic DNA (Homo sapiens)
gaagtgtatatatggggttatttttattttatagggttgtttttttgttatttagtagttgtgatgaggatattgtgatttttgtggataagtttggtaaaggtttttgaggtatttatgttttgagttattttagtttttttgtttttggtatgttttgaaggtttgattatgggggtgatagtttttgagaaggtggtttttgtggtatttggtagtggattgtaatagtgtttgttattttatttgtttaataagtggttattaggaagttttggaataaagtttagaagaattgggataggggttgttagggttgttagtggggatagggtggggtataggaagttgtaggatagatttagaatatggggttttgttgggtaagagggtgataggtagtagttttagtaaattgaggaattttttatgggatttgaaagttgaagatgggtagggagttttgttttgatttttaagaggttggtatttttgtatttatattgtggttttgtgttttttgtgtttttattgtgtttttgtgttttttgtgtttttattgtggttttgagttttttgtgtttttattgtggttttgagttttttgtgtttttattgttgttttgagttttttgtagttatattgtggttttgtgttttttgtgtttttattgtgtttttgtgttttttgtgtttttattgtggttttgagttttttatgtttttattgtggttttgagttttttgtgtttttattgttgttttgagttttttgtagttatattgtggttttgagttttttgtgtttttattgtgtttttgtgttttttgtgtttttattgtgtttttgtgttttttgtgtttttattgtggttttgagttttttgtgtttttattgtggttttgagttttttgtgtttttattgttgttttgagttttttgtatttatattgtgtttttgtgttttttgtgtttttattgtgtttttgtgttttttgtgtttttattgtggttttgagttttttgtgtttttattgttgttttgagttttttgtagttatattgtggttttgagttttttgtgtttttattgtgtttttgtgttttttgtgtttttattgtgtttttgtgttttttgtgtttttattgtggttttgagttttttgtgtttttattgtggttttgagttttttgtgtttttattgttgttttgagttttttgtatttatattgtggttttgtgttttttgtgtttttattgtgtttttgtgttttttgtgtttttattgtggttttgagttttttgtgtttttattgttgttttgagttttttgtagttatattgtagttttgagttttttgtgtttttattgtagttttgagttttttgtgtggtttgtgttgttttagagtttttggtgtggggtggggtatataggtagggattaatttatggagtttttagtttgttttgtagtgttttttataaaagttatggatttttttttgtttgttatatgttgtgtttattattgtgatggttttttttatggggatttttatatgatagagagtaaggtgttagttaaggattattgggtagttgggggttggtggtgttaagtagtaggaagtagtttagttggatgaggagtgttggttgtagagatttttttgttgggttttgttatttggtaggatttttatggaggagttgtatttatattttattaaaatttttaatttttgtagaataaagttgagttttagagaagggaagagatttgtttaagttattaataggttaataattatgggggtttagatagggaagtttaagtggtttgattgtagtttattattggtagttaagtttaagtagatgagtttttggggtagaaggaagagttaaatggttttgtgaatatggaaggtaaagaaaaattttattttattttaaggaagtatgtagtaagatgttaaaaatagatattttggtgatatggagttgtagggggaaatagtgtgaggattttggaaggagtaaggtatgaaggattgtatgtgtggttttgtgttgatgtgaggagtaagtgtatggagtttttatagtaggaggggggatgggaatgagttgtaggttgttgggtggagagtttttttattggaatgtttgagaggaggtgaggatgttgggtttttttatgtttttttttgggttttatgttgttttgtgaaagggaagggaattatttatttggaatatgaaggaagaataataaaattttattgtttattttagagaagatatggttatagaggttgtatgttatattgtgggtgttatagggagtttgtttatatagtgtttttatattgtaggtgttatagggattttgtttatatagtgttttttgattgtaggtgttatagggattttgtttatatagtgttttttaattgtaggtgttatagggagtttgtttatatagtgttttttaattgtaggtgttatagggattttgtttatatagtgtttttatattgtaggtgttatagggattttgtttatatagtgttttttaattgtaggtgttatagggattttgtttatatagtgtttttatattgtaggtgttatagggattttgtttatatagtgtttttatattgtaggtgttatagggattttgtttatatagtgttttttaattgtaggtgttatagggagtttgtttatatagtgtttttatattgtaggtgttatagggattttgtttatatagtgttttttaattgtaggtgttatagggattttgtttatatagtgtttttatattgtaggtgttatagggattttgtttatatagtgttttttaattgtaggtgttatagggagtttgtttatatattaaattgaaggttttatagggatttagtttatatagtatttttatattgtaggtgttatagggattttgtttatatagtgtttttatattgtaggtgttatagggatttagtttatatagtgtttttatattgtaggtgttat

SEQ ID NO: 3518 - DNA, 3056 bp, Artificial Sequence
  chemically treated genomic DNA (Homo sapiens)
gtggtatttgtagtgtgaggatgttgtgtagattgggtttttgtggtatttgtagtgtgaggatgttgtgtagatagggtttttgtggtatttgtagtgtgaggatgttgtgtagattgggtttttgtggagtttttagtttgatgtgtagataggttttttgtggtatttgtagttggaggatgttgtgtagataggatttttgtggtatttgtagtgtgaggatgttgtgtagatagggtttttgtggtatttgtagttggaggatgttgtgtagataggatttttgtggtatttgtagtgtgaggatgttgtgtaggtaggttttttgtggtatttgtagttggaggatgttgtgtagataggatttttgtggtatttgtagtgtgaggatgttgtgtagatagggtttttgtggtatttgtagtgtgaggatgttgtgtagatagggtttttgtggtatttgtagttggaggatgttgtgtagatagggtttttgtggtatttgtagtgtgaggatgttgtgtagatagggtttttgtggtatttgtagttggaggatgttgtgtagataggttttttgtggtatttgtagttggaggatgttgtgtggatagggtttttgtggtatttgtagttggaggatgttgtgtagatagggtttttgtggtatttgtagtgtgaggatgttgtgtagataggttttttgtggtatttgtagtgtggtatgtagtttttgtgattgtgttttttttggggtggatagtgaggttttgttattttttttttatattttagatggatgattttttttttttttatagagtagtgtggagtttagggaaaagtgtggaggggtttggtgtttttgtttttttttaggtattttggtgggaaggttttttatttagtaatttatagtttatttttgtttttttttttgttgtggggattttgtgtatttgttttttatattagtgtaggattatatgtgtagttttttatgttttgttttttttagagtttttatattatttttttttgtaattttatgttattgggatgtttgtttttgatattttgttatatgtttttttggaatgaagtggggtttttttttattttttgtgtttatagggttatttgatttttttttttgttttagggatttatttgtttggatttagttattgatgatgggttgtagttgggttatttgggtttttttgtttgggtttttatgattattgatttgttggtgatttgggtaagtttttttttttttttgggatttagttttattttgtagaaattggaggttttggtgggatgtgggtgtagtttttttgtgggaattttgttgggtggtagggtttagtagaggagtttttatagttagtgttttttatttagttgggttgttttttgttgtttagtattgttagtttttgattgtttagtgatttttaattgatgttttgttttttgttgtatggaggtttttgtggaagaaattgttatagtggtgggtatggtatgtggtaggtaggggaggatttatagtttttataaagaatattgtaaagtaggttggagattttatgagttggtttttgtttgtgtgttttattttatattaagggttttgaggtagtgtaggttatgtaggaagtttagggttgtggtgggggtgtgggaagtttagggttgtggtgtggttgtgggaagtttagggtagtggtgggggtgtgggaagtttagggttgtggtgggggtgtgggaagtatagggatgtggtgggggtgtgggaagtatagggttgtggtgtgggtgtgggaagtttagggtagtggtgggggtgtgggaagtttagggttgtggtgggggtgtgggaagtttagggttgtggtgggggtgtgggaagtatagggatgtggtgggggtgtgggaagtatagggatgtggtgggggtgtgggaagtttagggttgtggtgtggttgtgggaagtttagggtagtggtgggggtgtgggaagtttagggttgtggtgggggtgtgggaagtatagggatgtggtgggggtgtgggaagtatagggatgtggtgtgggtgtgggaagtttagggtagtggtgggggtgtgggaagtttagggttgtggtgggggtgtgggaagtttagggttgtggtgggggtgtgggaagtatagggatgtggtgggggtgtgggaagtatagggatgtggtgggggtgtgggaagtttagggttgtggtgtggttgtgggaagtttagggtagtggtgggggtgtgggaagtttagggttgtggtgggggtgtgggaagtttagggttgtggtgggggtgtgggaagtatagggatgtggtgggggtgtgggaagtatagggttgtggtgtggttgtgggaagtttagggtagtggtgggggtgtgggaagtttagggttgtggtgggggtgtgggaagtttagggttgtggtgggggtgtgggaagtatagggatgtggtgggggtgtgggaagtatagggttgtggtgtgggtgtgggagtgttggttttttggaggttaggataggattttttgtttgtttttagtttttaggttttatggagagttttttgatttattgaggttattgtttgttgtttttttgtttagtagggttttgtgttttggatttgttttatagttttttatattttattttgtttttattagtaattttagtggtttttgttttagtttttttgggttttgttttagggttttttggtgattatttgttaagtggataaagtaatgggtattgttgtggtttattgttaggtattatagggattatttttttagaggttgttatttttatggttaggtttttaaggtgtgttgaaggtgggagggttgggatggtttaagatgtgagtgttttgggggtttttgttagatttgtttgtagggattatgatgtttttattatggttgttgggtggtaggagggtagttttgtggggtggggatggttttatgtgtgtgtttt

SEQ ID NO: 3519 - DNA, 2500 bp, Artificial Sequence
  chemically treated genomic DNA (Homo sapiens)
ttgaggtaatttatgttgttaatgtagagtgaaggttagatattttataagaaatatgtaaatgtttttagatttagaaattttttttttattttatttgtttttttattttaagggaagttaatattttggaattttgtgtagatgttattaagaagaagaagaggggtttagaggtatgtagaatttagttgaaaaagaataatttatttatgtttgaagttttaaattagttttaattatttttgttaagagttgaggaagggatttaggagaaaggggattaaatttattttttttttttttatgaattttagtataatttgttttaagttaatttttattgaatgttgtgggttgattgttattttaagttatttgttttttttaaatattttaagaagtgttttgatttattttatagatgaagaaattgagatttaaagaggttaagtaattttttaagtggtgaatataggtggtagagaagattgaagatttaaattttggttgttagtttttaaaatttgaatttattattgatttttatggtattggtttggattagattatttttaatattttttttaattttgagattttaggattttttgatgttaggatattataaatttattataatttttttaaatttgttaaattaattttagatttttatgattatagatatgatatttttagaattaatatttaaattaaggtaggattattatatagaaaatataattgagtagaatttatttttgttatgttgttttttttagaattgattttaaaatatagtgttatgtttgttagagttagttatttgtaatgtgttagaattttgattttaggtaagtgttaggagttaaaatgtaggtttttttaaatttttaagtagttgtggtgttaagttgattttgatgagttgagtttttattgagtagtttaaatgattagattgtaattaggggttttatttttttatttatgaagtattagggtagttaaggggaaagattgatgtagaaggaatgaggtttttatgggttgggtttaaaagatttagagtgagtgtttagttgaaatatttgttaaaattttaaggaatatttatataaaaataagaagttgtttggtatagaagttagggtaggggatgttttttgaaggttatattttatggtaggtatatagtagtatgtttaaatatggtttttgttaaggttagagaggtattatttatatagaagaagttattattgtgattttatttattttgtgtttttattgtgtaattgaatgttgagtgtggatggtattttttttagtatttggttgtgttattgtgtttagttggtaagttttgggggagaagagaggtttagaaggaagattatttgagtttattagaataatgtgtgtttttaataaggtaggggtgtttaaatttagtaggtttaatagattaagttatgttatgaaggttttgtggattatttatttttgttaattagttattatttaaaagatgagaaaatgttagtttataggttaaatgggaggtatttagaagagatattaatgaagagatgtttggttttgtattaattattgtaggtaaattaatattaaatgttaggaagtaaagtagaggtatttttttattataaatttttgggataagtttagagattattagtagtttagggtttgtgtatgttgagaattgaggggataatagaattgtgtaatattttggtgttttattgtttttgttattaaattttatagtttatagtattgttttggtatattgggtttgtgtaatatttatggatttgatttggaattataaagtggatttagtttttgttatatttatttattttagtgattttgggtatatattgtgtttttgaaggaggtatagtggttataaatggaaatagtatttgtttgtttttggggattttggttatagatttttgaggtttttttgggagttagtttaagataatgggtaagagtatggattttgaaggtagagttttttgtttggaattttagttttgttattttttaattgtgtggttttaataagttatttagtttgtttgtgatttaggttttttatttataaaatgggtataatagtttttattttatagggttgttatggtgatttgtgggttaatattaaaggagattttttaattttagtattattgatatttggggttggataattttttgttttgggggttgttttgagtattatgggatgtttagtaatttttttattttttatgaattgttgtgataattaaaattgtttttagatattgttatatgttttaaatattttttaggggggtaaaattgtttttagttgagaattattgtattagattatgttgtagatataaatagttaaatattagtaattttatgtggtttaatttaataattataaagtatttaatagttaaaattt

SEQ ID NO: 3520 - DNA, 2500 bp, Artificial Sequence
  chemically treated genomic DNA (Homo sapiens)
gagttttaattgttaaatattttataattgttagattgaattatgtgaaattgttgatatttggttatttgtatttatgatataatttaatatagtggtttttaattggaggtaattttgtttttttaggaaatatttgggatatgtggtaatgtttggagataattttggttgttataatagtttgtagagggtagggaggttgttaaatattttataatatttaggatagtttttagaataaagaattatttggttttaaatgttaatggtattgaggttgagaaattttttttaatattagtttatgaattattatgataattttatgaggtaggaattattatgtttattttatagatgaggagtttgagttataggtaggttaagtagtttgttaaggttatatagttgggaaatggtagggttaggattttaagtagaggattttgtttttagagtttatatttttatttattattttagattggtttttaggaaagttttagaagtttatgattaaggtttttagaagtaggtaaatgttatttttatttatggttattgtgttttttttagaggtatagtgtgtgtttagagttattggggtgaatgaatgtaatagaagttgagtttgttttgtgattttaggttaagtttatgagtattatataagtttagtgtgttaaggtgatattgtgaattgtgagatttggtaatgggggtggtggggtattaaggtgttgtataattttgttatttttttagtttttagtgtatataagttttggattgttggtggtttttgggtttgttttaagggtttataataggaaaatgtttttattttattttttggtatttggtattaatttatttatagtaattaatataaagttagatatttttttattggtgttttttttaaatgttttttatttggtttgtgagttggtgtttttttattttttaagtggtgattggttggtgggggtaggtggtttataagatttttatagtataatttggtttgttggatttattgagtttgggtgtttttgttttgttaaaagtatatattgttttgatggatttagatggttttttttttgaatttttttttttttttaaggtttgttaattgagtatggtaatgtagttaagtgttggaagaagtgttgtttatatttagtatttaattatgtggtgggggtgtggggtgggtagagttatgatgatgattttttttatgtgaatggtgtttttttagttttaataggaattatgtttaagtgtgttgttgtatgtttgttatggagtgtggtttttgaagaatattttttattttgatttttgtgttgagtaattttttatttttgtgtgggtgttttttgaggttttggtaaatgttttaattaagtatttgttttaggttttttggatttagtttatgggaattttattttttttgtgttagtttttttttttgattgttttagtgttttgtgggtgagagaatgaagtttttggttatagtttggttatttgaattgtttagtaagaatttaatttattgaaattagtttggtattgtagttatttggaagtttgaaggaatttgtattttagtttttagtatttgtttagagttgaaattttgatatattataaatgattggttttgataaatatagtgttgtgttttagggttaattttgaaaagaataatatggtaaaggtagattttatttagttgtgttttttgtgtaataattttattttgatttaaatattgattttaaaagtattatgtttgtaattatagagatttagaattggtttgataaatttaggagagttataataggtttataatgttttgatattagagaattttagaattttagagttggaaaagatgttaaaggtaatttaatttaaattaatgttatggagattagtggtaaatttaggttttggaggttgatagttagagtttgaatttttaattttttttgttatttgtgtttgttatttggaaagttatttaatttttttgggttttagtttttttatttgtaaaatgggttaaagtattttttagggtgtttgagagaagtaaatgatttagaatagtagttagtttataatatttaataaaagttagtttagaataagttatattgaaatttgtaaggagaggaggaatgagtttggtttttttttttttaagttttttttttagtttttaataagagtagttaaagttggtttagaattttagatataagtgggttgtttttttttagttgggttttgtatgtttttgggtttttttttttttttttggtagtatttatataaagttttaagatgttagttttttttggagtgaagggataaataaagtaaaaaagaagtttttgagtttggggatatttgtatattttttatgaaatgtttggtttttattttatattgatagtatgagttgttttaa

SEQ ID NO: 3521 - DNA, 2780 bp, Artificial Sequence
  chemically treated genomic DNA (Homo sapiens)
tatgtagtttaagattgttagtaatttttttgtgaaaggtttttgggattgtgattttgaggattggtgagtgtttttttttgagagagtgagtgttgggtgtttggtgtaggtgttgttttgatttgttttttgtttgtaggttttggaattattggtttggtgtattgttgtttatgagtgtttttgtgtgtttgtggaattttgtggtttttttgatgtagtttagtggtatggagaaaggtagggttggggttgtgggatttgggttttggttttgtgtgtgttttattttgggttggtggttttgtttgattttgtttgtgtttttggggtgttttaggtttttgtgttggttgtataatggttgtggtggtgggtaagtgtgtatttgtttgtttggtttgatggttgtgttttgtttgttgttgttgttgtttgtagaggggtgtgggttttggggagggtttggggtgttggtgatttggggttttgggtatgttggtattgattggttggggaatattgagggtggttaagagttttttttttgttagggttttgtatggggtgttggagttttttggtggttttggttggttgtgtttattttttggttttttttgtagatgtggttgaggtttggtgagaattttagtgtgatgtgggtgggttagtagtgtttggggatttggtgtattttttgtagttgttggtttgggtgttaagttttttgttgtttggggttggtggtgttggtggtttagttttgttgtttggtgtgtttggaggttggtttagttttttgaattttgagttgtgtttggaggtgtttggtgtattggagttgttgtattattatttttataaatatttggttgttgtttatgattattattttggggttaagagttggttggtgttttatttgttgtttggtttgtgtggttatggttattatttgtatgtgtatttgtattattattattattttgtgagtttagttgttgtggttgttgttgttgttgttgtagttgttgtggttgttaatatgtatttgttggttggagttgtgttgtttggtttttatgattattgttttagataatatgggttttgttgtgtttttgttttggttttgtatagttttgaagtttgttgggtttggttattttgttttaagggtaagtaaggaatatgtttttttagttttaggggttattgtggttttttttttttttagttttgaagttatgggggtttttttgttatttttagttttttgggttattgaagtatttggttttttagtttttggagttattgtgggtttttttttggttttgagggttaagggggtttttgtttgttagtgttaaagtgtttggttggaggtggaaggaagtgatatttattgttttttttgagattgtgttgtttgtggtttggttggtagttgtagtgtagatagtttgagagttttgtttgtaggtggtgtagatatatgtagatattgtagatattgtagatattgttttggtgttgatttgataaatggttttgttttttttggaagttgtttgtgtgtttatttatttgtgtttagttagattgtgttgggaatttttgggatagtgagtttggggtagtttagggtttttagggtttttttagttttaatttttgttgattgtaggttggttttggttttatagtgttttgtttgttatgttttttgttttttgtttgttttataggggtttttattgttttttttttttttgaggttttttttgttaggtttgtgtattttttttatttttttattgttttgttttattttaatttttttagggttggtggtattgtttaggtgtgtattttgtttttttatttaaattttttttatttgtagttgtttttattttgggatttgggtttgtgttttggtttgtttttgggatagatgtttgtgtttttttatggaagttgggaagaagggttatgatagatattgttggttggtgttgggagggggagaagtttttgattgggatggggttatggaaagataaaaataggtagtattgttttgttagtattttttttgttggtttagtttaggtttgtatgttttttttttagtgattttatttgttgtgagtgtttttatggagtgatttggttagggggtataatgatagtagttatgagttattttgagatttgtgtatgaagtattttttttaggttaggtggttaagggatttttttttgttaatttaatattagggatggggtgagaggaattttttgatttttttttttttgagtgtaagtaggaagggttgatagttggttagtgttaaggttgttgatttggatataagatgaatgggaagtgtatgtggttgaggttttgttttttattttttgtgtttgttttagtgtgtttgtggtaattgttgttttttaggttatttggtttattattttatgtggtagtggtagtttgagtgttatttttttgagggtatagttaggagtttttagatgtttatttttgtggatttgttttttgtatatatgtttgttttggtggtgtgaagtgagtggggttttagtaattgaatggtaggaattatttttagaggttagtttagggtgggagggggtttttaggggttatttaaagttttaaagggtatttagtattagagagtgaggatttttgtagtatttgtttaggttttgtgagtatggttttggagatgtatttg

SEQ ID NO: 3522 - DNA, 2780 bp, Artificial Sequence
  chemically treated genomic DNA (Homo sapiens)
taaatgtatttttaaagttgtgtttatggagtttgggtagatgttgtagaggtttttattttttggtgttagatgttttttgaggttttggatggtttttggagatttttttttattttagattggtttttgggaatggtttttgttatttaattattaagattttatttattttatgttgttagagtaaatatgtatatgaaaaataggtttgtgagggtggatatttggaaatttttggttgtgtttttggagaggtggtatttaggttgttgttattatgtggggtgatgagttgagtggtttagaaggtagtagttgttataaatatattgggataggtatgggaggtgggggatagagttttggttatgtgtattttttgtttattttgtgtttaagttagtagttttggtgttgattggttgttagttttttttgtttgtgtttaggaagggagggattaaagagttttttttgttttatttttggtgttgagttaatggggagaggttttttagttatttggtttgggaaaaatgttttatatataggttttaagatgatttatggttattgttattgtgttttttggttaggttattttgtagggatatttatagtaaataaagttattaaggagggaatatgtgggtttgggttaggttggtaggggaaatgttagtagaatagtgttgtttgtttttgtttttttatgattttattttggttaggggttttttttttttttagtattgattggtagtgtttgttatgatttttttttttagtttttatggaaaagtataagtatttgttttgaaaataggttagggtgtaggtttaagttttagaatagggataattgtaggtgggaggaatttaagtaaaaaggtaggatgtatatttgggtggtattattagttttggggaggttgggatgagatgggatggtgggaaggtggggggagtgtataggtttggtaggaggggttttggagaggggaggggtagtgggagtttttatggggtgggtagagggtaggaggtgtggtggatagggtgttgtgggattgggattgatttatagttggtagggattggggttggggaggttttgagggttttgagttattttgggtttgttgttttgaagatttttaatgtgatttaattgggtataaataaatggatatgtaggtggtttttaaaagaggtgaaattgtttattaagttggtgttggggtggtatttatagtatttatagtatttatatgtatttatattgtttgtaggtggggtttttgggttgtttatattgtaattgttggttgggttgtgggtgatgtggttttggggagaataataaatattatttttttttgtttttgattgggtgttttggtattggtgggtggggatttttttggtttttggggttggggaaggatttgtggtggttttagggattggggaattggatattttgatagtttaaggggttgggggtggtgagggggtttttatggttttgaggttggggaaggggagagttgtggtggtttttggggttgggggaatgtattttttgtttgtttttggggtagggtggttgggtttggtgaattttggggttgtgtaggattggggtgggagtgtgatagggtttgtgttatttggggtaatagttgtaggagttgggtggtgtggttttggttgatgagtatatgttggtggttgtggtagttgtggtagtggtggtggtggttgtggtggttggatttatggggtggtggtggtggtgtggatgtgtgtgtgggtggtagttgtggttatgtaggttgggtagtgggtagggtgttggttggtttttggttttgagatagtggttgtaggtggtggttggatatttgtaggggtggtggtgtagtggttttgatgtgttgggtgtttttaggtgtagtttggggtttgggggattgggttggtttttgggtgtgttgggtagtgggattaagttgttggtgttgttggttttgggtagtgaggggtttagtatttgggttagtagttgtggaggatgtgttgggtttttgagtattgttggtttgtttgtgttgtgttggaatttttgttgggttttagttgtgtttgtggagagggttgaggagtgagtgtggttggttggggttgttgaggagttttgatgttttatgtgaggttttggtggagagaaggtttttggttgtttttggtgttttttgattagttggtgttagtgtgtttgagattttaagttgttggtgttttgagttttttttggggtttgtgtttttttgtgggtggtggtggtggtgggtggggtgtagttgttgggttgggtgggtgagtgtgtgtttgtttgttgttgtggttgttgtgtaattggtgtgaaagtttggagtgttttgggggtgtaggtgaggttgggtgaggttgttggtttggggtagagtgtgtatagggttggaatttggattttatgattttggttttatttttttttgtgttgttgggttgtgttggggaagttatggggttttgtgagtgtgtgaaggtgtttatgagtggtagtgtgttgggttggtggttttggggtttgtgggtgggaggtggattagggtggtgtttgtgttaggtgtttggtgtttatttttttgggggaggatatttattagtttttagggttatagttttggaagttttttgtgaagggattgttggtaattttgagttgtgtg

SEQ ID NO: 3523 - DNA, 2333 bp, Artificial Sequence
  chemically treated genomic DNA (Homo sapiens)
gtgtaaaaggaattgttggagggttttaatgatttaaattgaaaataatgataaaaagtttttaaggtattttttatttatatagtttaaaaaataattatgaaaaggaataagataatttaatggtttgattaatgaggtgttggttattgtgttgtgtgttggggtaggatggggttttatttggggtttgtatttttaagtttttatagagttttatattgattttaaggtggggttggttggagggatatttaagtttagtaaatataaatgtaaattgtatttttttgtgaaaaagatttgaaaaatattgtagtatttttaagttgtaatttaaagattgatggggtatattagggtttttgagatttttatgagagagatggtagtgaggtattggaggaggtttttgtaaaaggtttttttttttttattatttttgtttttatttgtattattatttttgagttagtgggtatgtgattatttatgtttgggaaaatttttttttagggtattattaaaagatatttttagatgaaattgatgttgagggaggaatttttgtttgtgttgtttttatttgtttaggtttgtaggggtgtgggtgtggggttatgtgggtgtgtttgggggtttgtggaggatgggggagggttgtaggagaattttttttgttttttaattttgaaaagtaaaatttaatttatttgtttataaaatattagttattgttttattttagtttattgttattttgtaggtttgggaggattttgttgaaggaaaaaaaaaatgttttaagtatttaaatatgttgagttatgtatgtatttgtttatagtgttgtgggttgttttttttttttttttttttttgttttttttttttttttttttttttttttattaaagtatatttattaaattgttgagttggaaagatttgtaatgagtttttgagttgtatgattgtgttttttttttttttttttttgttttttttttttttttaaatttttatttgatattaaataaagtaaattttaaatagattaattgttgtatggttttgttttgtttttttagtttgtttttaggtttggtggggggttgggttgtggtggtggtagtggtgggagatgttggggtggttggtggaggtttatgtggtgttttaggtgggatgttagtgttttgaaggtggaggttttggttttttttttttgtggtttgggtatggtatttttttagttttatgtgatggttgtttggtggtattagtatagttggtttattattgaggtggatgagtatagttttaattttatttaggtttttattttttataatattaattagggttgtttttagttattgtatgtgtagatgtaagtgggattggtggggtgggggtgggggtggtgatggttttttggggtgggtgtatggttttgggtgttttttggttttgggggtattgtaataagtattgaatgtttgttgattgtaataattttggaattttaggattattggggttttgagttgggagggattggtaagaagttgtagatggatggtttgtgggttgattttggttgtagttttgttttatttggttaggagtatgttttataaatatttaaagatgaggtggatgtatagaaaattttagatttttggttttattttataaaatttaaaggtttggaaattttaggtttatatgtttttttggtagtgtttggtgggggttatatttttgattttttttttggtatttgggtggtgatttttggtttgatttatgttttttattgtatatatggggagattgagttttagagaggggaaggggtttgttataagttttatggtaggttaggatattagttttgggttttttgttttttttttttgtttttttttttgtttagattttgtgttttttttgtgaaagtagagatgtttttttaaaaggattgggggattttgttgtttgttttttggggtattgggggtgtttaagtagtgaggttttggggagtatatagatttaaggtttttgtgagtagtaggaggatttgttttgatgtttgtgtgtggggttagtttttttttttttggattttttgaggatttggaaagttgtgggtagtttggggtggttttagaggtggttgagtttttggttttgttttgggtggttttttgagtttttggagtttttttttttttttatttttattgttttttttatgagttttgtatgatagagtttatttggtgaggaattaggggtttaggtttgtgaggtgttttattttg

SEQ ID NO: 3524 - DNA, 2333 bp, Artificial Sequence
  chemically treated genomic DNA (Homo sapiens)
tagggtggggtattttatgggtttgggtttttggttttttattaggtaagttttgttgtgtagggtttatgggagaagtaatggggataaaggaggaggggggttttaggaatttagggaattatttagagtagggttaggagtttgattatttttggagttattttaagttatttatagttttttaggtttttgggaaatttagagagggaaaggttggttttgtatataggtattaggataagtttttttgttgtttatgggggttttgagtttgtgtgttttttagggttttattgtttgagtatttttaatgttttgaggggtagataatagaattttttagtttttttggaaaagtatttttgtttttataagagaagtatagggtttggataaaaggaagggtagggaggggaaataaagagtttaagattggtgttttaatttgttatggggtttgtggtgagtttttttttttttttggggtttggtttttttatgtgtataatgaggagtgtaaattagattaggggttgttatttaaatgttaagaaagggattgggaatgtggtttttgttagatgttgttaggaggatatgtgggtttggggtttttaggtttttgggttttataaagtgaagttagaagtttggagttttttgtgtatttattttatttttaaatatttgtaaaatatgtttttggttaagtgaaataggattgtggttagaattggtttataggttatttatttgtaattttttgttggttttttttaatttagagttttgatgattttagaattttagaattgttgtagttaataaatatttaatgtttgttatagtgtttttagaattaggaggtatttgagattatgtatttattttagggggttgttattgtttttatttttattttattggttttatttatatttgtatatgtggtggttggaagtggttttggttgatgttgtagaaggtgaaggtttgggtggggttggagttgtatttgtttattttgatgatgagttggttgtgttggtgttgttgagtggttattatgtgggattgggagaatgttatgtttaggttgtaggggaggagggttagggtttttgtttttaggatgttggtattttatttagagtgttatatggatttttgttggttgttttggtattttttattgttgttgttattgtagtttggttttttgttagatttggaaatagattgaggagatggagtagaattgtgtgatagttaatttgtttgggatttgttttatttaatgttagatgaagatttagaaagagggagagggtggggggagaggaaaaaaaaatatagttgtatagtttaaaaatttattataaatttttttaatttagtagtttgatgaatatattttggtaaaaagaaaagggaagggagggaggggataagaaaaaaaagaaaaaaaaaataatttatagtattgtggatggatgtatgtatggtttaatgtgtttaaatatttaagatatttttttttttttttaataaaatttttttgagtttatagggtgatagtgagttggggtaagataatggttggtattttgtaaataggtgagttaagttttattttttagaattggggaataggaaggatttttttataatttttttttattttttatagatttttaaatatatttatatggttttatgtttatatttttgtaagtttgagtaggtggagatagtatgggtgaaaattttttttttgatattgattttatttaaagatattttttagtggtgttttgagaagggatttttttagatatagatggttatatatttattggtttaggggtggtagtgtaggtaggggtagagatggtgagggaggaggaattttttgtaaaaattttttttgatgttttattattattttttttgtaaggattttgggaattttaatgtgttttgttaatttttgaattgtagtttgagaatgttgtaatattttttaaattttttttatggggaagtgtagtttgtatttatatttattggatttaaatatttttttaattgattttattttggggttagtgtagaattttgtagaaatttggaaatgtaggttttaggtgaggttttattttattttaatatatagtataatggttgatgttttgttagttagattattgagttgttttgtttttttttataattattttttaaattgtgtaaatgggaaatgttttgaagattttttgttgttgtttttagtttgggttattaagattttttaatgattttttttgtgt

SEQ ID NO: 3525 - DNA, 2567 bp, Artificial Sequence
  chemically treated genomic DNA (Homo sapiens)
attatttttgtgttaaaatgtttttgtaattagtagttttggaagataaattgaaatatgtgattttttagggtttagttggttttgggattgaattttagtgtgtgtgtgttttagggtataagtatgtgtgttttaggatatgtggggtgtaagtgttttggggtatatgtgtgtgttttagggtatattgggtgtaggtgttttggggtatatgtgttttaggatatatggaatgtaggtattttggggtatatgtgtgtgttttagggtatattgggtgtaggtgttttggggtatatgtgtattttaggatatatagtgtgtaggtgttttggggtatatgtgtgttttagggtatgttgggtgtaggtgttttagggtatatatgtgttttaggatatatggagtgtaggtattttagggtatatatgtgtgttttagggtatgttgggtgtaggtgttttggggtatatgtattttaggatatatagtgtgtaggtgttttggggtatatgtgttttagggtatgttgggtgtaggtgttttggggtatatatgtgttttaggatatatggaatgtaggtattttggggtatatgtgtgtgttttagggtatgttgggtgtaggtgttttggggtatatatgtattttaggatatatagtgtgtaggtgttttggggtatatgtatgttttggggtatgttgggtgtaggtgttttggggtatatgtgttttaggatatatggagtgtaggtattttagggtatatgtgtgttttagggtatgttaggtgtaggtgttttggggtatatgtgtgttttggggtatattaggatgtagattttttattgggtgtaaagtttttaattttttttttgagttattagagtatggtttttagattggagtagtttttttttgggttaggtagggtgtggattttgttttgaatgtatttagtttttagttgattttgtttttttttttatttattgtataggtaggtgttgtaggttgtagggagggtgtgtgttttggtttttttgttttgtgtttagtttgggaagtgttttaagattattttgggagaggtttgggttgtggtgtttttgtttttttgttttgtgtaaggttggggattttgtttttttggagtgagggtgtttggtaggtattagtggttagtagtagttggggttgggttttatttgaggattgaggtgttgatgaatgtttatgtttggaagatattggttttttggtttatgtatttatttaattttaagttaggttttttagatttttaaattaatagtggattttgtaaattgttgtgttagaggaaaatttaagtgagtttgattgtgggaagtattgttgttatgaaaggtggtggtttagtgttatttgttgggatgtggtagttaagggagttggtgttgggggaggtttgaggttttgggtttttgggaggaaatagagttgtttgtaggaataaaggaggaaaggagggttatggttgtttgaagaatttttatatgaaaggtatgaaattagttggaattattttaaggaaaaaatttttttttaaataggtgtttttgtgtttagtagaagtgggttttattgttattgagtatggtttggggtttgtggggttgtttttagaattggagggaagtaatttagttgtatataagaggttttggggagaggaattttttagggtttggagtttttgtttgagttgtgttatatttgttgggttggaagtttttatttagtgggagaaatataatttttggttttggtgtttgtggtagtaaaatttttatttttgtaaagttattgggtggaggttaggttttgtaagaggtttttttttgttggaggaagttttgggtttttggggattttgtaggaggtagatgttggggatagggtttggtttatgggtagttgtgtttttttttagttttggtttttttgttttttttgttttttttgatttttttattggtttttattgtttatagggtgttgagttagtagtagaaattgaggtggagatagtttttggtttttaaaatttgtgaaggagtttggattttgggaaggtattgaggattgtttaggattttagaaaaggatgatagttaggtttttttttttttttttttgttttttaagttgttgggttttttggggggggggggttttgttgttgttttgagatagagttttgttttgttttttaggttggtgtgtagtggtgtgattttggtttattgtaatttttattttttagttttaagtgatttttttgttttagttttttgagtagttgggattataggtgtttgttattatgtttggttaatttttgtatttttagtagatttaggttttattatgttggttagtttggttttaaatttttgattttaagtgatttatttattttagttttttaaagtgttgggattataggtatgagttattgtgttttattgtgttttttaaatgttgatggtagtttagttgttttttattttaataaatg

SEQ ID NO: 3526 - DNA, 2567 bp, Artificial Sequence
  chemically treated genomic DNA (Homo sapiens)
tatttattgaaatggggggtaattgagttgttattaatatttgaaaaatatggtggggtgtagtggtttatgtttgtaattttagtattttgggaggttgaggtgggtgggttatttgaggttaggagtttgagattagattggttaatatggtgaaatttgaatttattgaaaatataaaaattagttaggtgtgatggtgggtgtttgtaattttagttatttaggaggttgaggtaggaggattgtttgaaattaggagatggaggttgtagtgagttgagattgtattattgtatgttagtttgggagatagagtgagattttgttttaaaatagtaataaaattttttttttttaaaaaatttaataatttgaaaaatgaaggaaggaaggaagggatttggttgttatttttttttgagattttgggtagtttttggtgtttttttagggtttagatttttttatagattttgagggttgaaggttgtttttattttagtttttgttgttggtttagtgttttgtgggtagtgggagttggtggggggattagaaagagtagaggaggtagggaggttaggattggggagggatgtagttgtttgtgggttggattttgtttttagtgtttgttttttgtggggtttttgagggtttagggttttttttagtaaagggaggttttttgtaaggtttggtttttgtttagtggttttgtagggatggggattttattgttataaatattagagttagggattgtgttttttttgttgagtggaggtttttaatttagtaggtgtgatgtagtttgagtggggattttaggttttggaggatttttttttttaggattttttgtgtgtagttggattgtttttttttggttttgaaaatagttttgtagattttaggttgtgtttaatggtaatgaaatttatttttgttaaatgtaggagtgtttatttggaggaagattttttttttgaaatgattttaattaattttatgttttttgtgtaagaattttttgaatagttgtggtttttttttttttttttgtttttgtaaatagttttgtttttttttgaggatttgaggttttaggttttttttgatattggtttttttggttgttgtgttttggtaggtggtgttgagttattgttttttatggtgatggtgttttttgtgattgggtttgtttagatttttttttgatgtaataatttatagaatttattgttgatttagggatttggggagtttaatttaaaattaagtaaatatataaattagggagttagtgttttttgaatatgagtgtttattggtattttggtttttgggtgaggtttggttttggttgttgttggttgttggtgtttgttggatatttttgttttgggagagtaggatttttggttttgtgtggagtagagggatgaaggtgttgtagtttaggttttttttagggtggttttgagatattttttagattggatatggagtgggaggattgagatgtatgttttttttatggtttgtagtgtttgtttgtgtagtgaatggagggaggggtagaattggttggaagttgagtgtatttagggtagggtttatattttgtttggtttgaggaggggttgttttgatttgggagttgtattttggtggtttggggaaggagttgggggttttgtatttagtaagagatttgtattttggtgtgttttgaaatatgtgtgtgttttaaaatatttgtatttggtgtgttttgaaatatgtgtgtgttttgaaatatttgtattttgtgtgttttgaaatatgtgtgttttgaaatatttgtatttggtgtgttttgaaatatgtgtgtgttttaaaatatttgtatgttgtgtgttttgaaatatgtgtgtgttttaaaatatttgtatttggtgtgttttgaaatatatgtgtgtgttttgaaatatttgtattttgtgtgttttgaaatatatgtgtgttttaaaatatttgtatttggtgtgttttgaaatgtgtgtgttttaaaatatttgtatgttgtgtgttttgaaatatgtgtgttttgaaatatttgtatttggtgtgttttgaaatatatgtgtgtgttttgaaatatttgtattttgtgtgttttgaaatatatgtgtgttttgaaatatttgtatttggtgtgttttgaaatatgtgtgtgttttaaaatatttgtatattgtgtgttttgaaatatatgtgtgttttaaaatatttgtatttggtgtgttttgaagtatatatatgtgttttgaaatatttgtattttgtgtgttttgaaatatgtgtgttttgaaatatttgtatttggtgtgttttgaaatatatgtgtatgttttgaaatatttgtattttgtgtgttttgaaatatatatgtttgtgttttgaaatatatatatattggggtttagttttgaggttggttggattttgaaaaattatatattttaatttattttttagaattgttaattataaggatattttggtataagagtaat

SEQ ID NO: 3527 - DNA, 2312 bp, Artificial Sequence
  chemically treated genomic DNA (Homo sapiens)
agtgaatgagtgtttttatttttttttgatatatggtttaagtgtatagtttaatgaattatttgttttttatttagttagtatttgtttagaggttgttattattttgattgttaatagtattaattggttttgtttgttattgaatttttttgtttttttttttttttttttttttttttttgagatggaatgttgtttttgttgttgaggttggagtgttgtgatgtgattttggtttattgtaatttttgtttttaaggtttaagtgatttttttgttatagttttttgggtagttgggattataggtgtgtattattatgtttggttaagttttgtatttttagtagagatggggtttttttatgttggttaggttggttttgaatttttgattttaggtgagttatttattttaattttttgaagtgttgggattattagtatgagttattgtatttggttgtgtttttgaattttttatatatagatttatttgggtttttgtgtgtttagtttttgttttgtgttagttggaggtttttatttgtgtagttgggtgtgattatttattttttttagttgttaatgtttggattttggatttttttttttgttgtgggtttgttgttattgtttattttgttttttttttaggtttttatttttgggtaggagagttgttgattattttgggggtgttttttttgtgtttgaatatttatagttgtttttgaggggttgggagttgggtttttgggagagatgagttatgaattttttatagtttttgtatttggggattttattttaggagagtgttatttatagtttttgttagggtaaaggagttgagtagttattttaagtttagtttattttttttttttggtttttggtaggtatggattagtagttgtgagtagttagagttgatgtttggtttttaggggggtagaggtgttgttattatgagtttgggtaagtttttgtttgtgggttgggtgtttagtttatagggaaagaggtggttgattgtagatatgattagttatttatttggggatttttgttatattatgtatgtgggttgtggtggggatgtttttggggatatgtttttttttagtaattatggtggtagttttgggagtatttattgtttattttgtagttttttggttaagaagttgtagttggtgtggagggtgggggtgtttttttggaggatggtatttttttttgtattttttttggttttattggttattttttttattattaagaatgttatttttttgttttagtttaattaggttgtttatgatagttttgtggttggtaagtttagttttgatagtagttttattagttttatggatggttattttagttatggtgagggtttgggttattttggtttattttttagaggttgaggttgaggtttagaggggtttagtggtttttttaagttttaagtgagttttaagtgattatagaggttaggtttagattttatattatggatggggagggggtgtagtggtgggaataagttgattttttaaaatatttgaggttgagagtgaggaggtggagtttgaattttagttgttttttatttgttgtgtgatttgggtaagtatatttttttttttgggttttagttgaattagttatttatttatttttgttttttttaattaaagttttttttttatgttggaatgatattatggagaggtgaagggtttgggttttagattttaatttagttttgtttgaattttaggaagttagttgatttttataagtttaagtttttgtttggataatgagttttttggggttattgttaagatttagtgttaggagaggtgtaggggggttgatatttagtaggtgtttaggatattggagttgttgttatttgaatttggttttttgtaatttgataaatttgggaaattatttataggaattgtaagttataggtttttttgtttagttagaagtgttattttggttgtttggttagagtttatttgagaattatgggtttttgttgttatttggtggttattttttgttttgtgggagtggttttaatatttttgttttaggtggttgtttagaattgtattgaggattggtttatagaaatttgattttgttttaggtttgtagttttggaagtaggggttggatatgtttgttttttatttttatatagttagattttgattgttggttttattttgtgtttataaattagtttatgtgttatgggtttatttgtagttattg

SEQ ID NO: 3528 - DNA, 2312 bp, Artificial Sequence
  chemically treated genomic DNA (Homo sapiens)
tgatggttgtaggtgaatttatagtatgtgagttggtttgtggatataggatgggattagtaattagggtttgattgtatagaaatgaaggatagatatgtttagtttttgtttttaggattatagatttgagatagaattgggtttttgtggattagtttttagtgtggttttgagtagttgtttggggtaggggtgttagagttatttttgtaaggtagggagtggttattaggtggtagtaggggtttatggtttttaggtgagttttgattgaatggttaaggtggtatttttggttgggtaggaaggtttgtggtttgtggtttttgtgagtggttttttaaatttgttgagttataggaaattaagtttagataataatagttttagtgttttgagtatttattaagtattagtttttttgtgttttttttggtattgaattttagtaatgattttgagagatttattatttaggtgaggatttgaatttatagaggttaattgattttttgaaatttaggtagaattggattggaatttagagtttaggttttttatttttttatgatattattttgatatgaggggaaggttttggttgaagggggtaagaatgggtgggtgattggtttagttaaggtttagagagggggatgtgtttgtttaggttatatagtaagtgaggggtagttagaatttaaattttatttttttatttttaattttaggtgttttggggagttagtttgtttttattattgtattttttttttatttatgatgtggggtttgggtttgatttttgtggttatttggagtttatttggagtttggaggagttattgaatttttttgggttttagttttagtttttgaaaagtgggttaagatggtttaggtttttattgtagttggagtggttgtttgtggagttggtggggttgttgttgaagttgagtttgttaattatgaggttgttgtaggtggtttggttgagttggggtagggagatggtgtttttgatgatgggggagatggttggtggagttggggagggtgtagggggagatgttattttttgggggggtgtttttattttttgtattagttgtagttttttggttaggaagttgtggggtgagtgatgggtgtttttggagttgttattgtggttgttgaggaaggatgtgtttttgaagatatttttgttatggtttatatgtatggtgtggtggaagtttttgagtgggtggttgattatgtttgtagttagttgtttttttttttgtgaattggatatttagtttataggtgagagtttgtttaggtttatggtggtggtgtttttgtttttttgggggttgggtattagttttggttgtttatagttgttagtttatgtttattaggggttgggggagggaggtgggttgggtttgggatggttgtttagtttttttgttttggtggaagttgtaaatggtatttttttaaggtgaggtttttaaatgtagaggttgtggggggtttatggtttgttttttttaggggtttggtttttagttttttagaagtagttatagatgtttaagtgtagagaaagtatttttgaggtggttggtaatttttttgtttagaggtggagatttggaaggaagatagaatgggtggtgatggtaggtttgtgatagaggaggaaatttggggtttaaatattagtagttgaagaggatagatgattatatttaattatatggatggaggtttttaattgatgtggggtagaagttaggtatatggggatttaagtgagtttgtgtatagaaagtttaagaatatagttgggtgtggtggtttatgttggtaattttagtattttgggaggttgaggtgggtggtttatttgaggttaggagtttgagattagtttggttaatatagagaaattttgtttttattaaaaatataaaatttagttggatgtggtggtgtgtatttgtaattttagttatttaggaagttgtggtaggagaattatttgaattttggaggtagaggttgtagtgagttaagattatattatggtattttagttttggtaataagagtaatattttgttttaaaaaaaaaaaaaaaaaaaaaaaaaaaaataaggaagtttagtaataggtaaaattaattgatgttattagtaattagaatgatggtagtttttgagtaggtattgattgaataggggataaataatttattgagttatatatttaagttatgtattaggaaaaaatagaagtatttatttatt

SEQ ID NO: 3529 - DNA, 2439 bp, Artificial Sequence
  chemically treated genomic DNA (Homo sapiens)
tattatttattagagggttgatgtttttgttagataggttatagttagtggaggtattgtttttgattagtttgttgtttttgataaggtagttttggttaattttataaatttgaatgaataagaagggtgtaaggttggggtattagggataaataatttagatatgttagtgtgttgatttgtaaagtatgttagaaggtagttgaggttttagttttagttatagtgtattttaaggttagagtaaaaagttggttggttttttaggtttttttttgtaaggtggttgggttaaaattaaagattttgttgtataatataggtttgttatttttttggtggtggtattagggattaataagattagtatttttagttatattagttagttttattatagttattttataggatggtattttataaattattaagatgggttagaattgattatgagaagtaagttattgatgtttatgtgatgtataagttatagttagtgaagtagtattgataggtatagaaattttattttttattatgggggtttttttttatttttagggagttatttttagaattttatttttttgttgattttagtgtggtgatggtagtttttttgtttagtgtgtgttatagagaaggttatatgagtaggatgttatgttttaatataggttattttgtgtaggttttggtgggttttgtggggtagttttttggtgtgttaatgattggtgatttttggaatggatatatattattttattttagtgtttagtattttttattgatttttttttgttatttagtaattattaattatggttgggttatttgagggagtgataagattattttatgtgtattatttataggttttttttgttaagttggataggttttgggggtgttattttgaatttaattttgaatgggtgttttttaaggtatttattagtttaagtttttttatttatagggattgattaatataattttaagtttttttttgtagttattagtaggttataaagagtaaagggtttaggaatgtgttaagaagttgttttttggttttttgttattttagttatttttgattataaggttgtttttagaaggaaggtagtagagaatggttttatattgtttgatttgggtgttgtatttagtgtttattttgagttttattaatgaatagttgggtttgaaattattttttttttaggtttgtatagtaatttaagttattgtaaagtttatttttgtagtttttgtttttggttattttgatgatgttgattattttattttgtttaaatatttggtttataggtatttgttgtttaagttttttgtgggtttagtttagttttttggttatagtgtttttgtttatttggatttttattaggtgggtttttttttggtgtagaggaagtaggtgtatttaggagaaggtagatatagtttagttttagttgttagtgttttttttatagtagaggaattgtagttttatgtggtttgattgatgttaagtatatggtaaaaagttagtaattttgaataagttattgaattttattaagaggaaggaatttttatttttgttaatagtaataatttaattttggatattggtgtttgagttattgttaggatgagtggataagatttatattataggtaaataattagattttagtttttattagtttaatgtttttgtggttgttttttgggttagttttttttggggtattgtagtggttttattttagttatttatatttgttttagtgataagtttgtttttgagagagtataagttttaagtaagaaaatgtattattgggagtggtggtttatatttgtaattttagtattttgggaggttgaggtaggtggattatttgaggttaggagtttaaaattagtttgattaatatggagaaattttgtttttattaaaaatataaaattagtagggtgtggtggtgtatgtttgtaattttagttatttaggaggttgaggtaggagaatagtttgaatttagaaagtggaggttgtagtgagttgagatagggttattgtattttagtttgggtaataagaatgaaattttgtttttaaaaaaaaaaaaatgtatttaagtataaagtttttatttaaggatagtttggtaatgttttgataaaattttaatggtggatatgtatttttatttgtggtggtttttattatatggggttgtatttagtatttgagattagttaggataattagtaataggatagtaagaggtatttattttaattaagttaataaaaagtttgtttagtttattaattaggtttttaggagagtagttagtattttataattgatttttaggtaggtattttagtgttattggtgagttatta

SEQ ID NO: 3530 - DNA, 2439 bp, Artificial Sequence
  chemically treated genomic DNA (Homo sapiens)
tggtgatttattagtaatattgaaatgtttgtttgaaagttggttgtgaggtattggttgtttttttggaaatttagttgatgagttgagtaggttttttattgatttggttagagtgggtgttttttgttgttttgttattggttattttggttgattttaagtgttgagtgtaattttatgtggtgagggttattatggatgagagtgtatgtttattgttgaaattttgttaggatattgttaggttgtttttgagtgaaagttttatgtttaaatgtatttttttttttttagagatagaattttgtttttgttgtttaggttagagtgtaatagttttattttagtttattgtaatttttattttttaggtttaagttatttttttgttttagttttttgagtagttgggattataggtatgtgttattatgttttattaattttgtatttttagtagagatggggtttttttatgttggttaggttggttttgaatttttgattttaggtgatttatttgttttggttttttaaagtgttgggattataggtgtgagttattgtttttggtgatgtatttttttatttagagtttgtgtttttttaaaagtaggtttgttattagggtaagtgtaggtggttgaggtaaaattattgtagtattttaaaaggaattgatttaaaggatagttataggaatattgggttggtaggggttgggatttggttgtttgtttgtggtgtgggttttgtttgtttattttgatagtaatttaggtattagtatttaaagttaagttgttgttgttggtaaaaatgaaagttttttttttttggtgaggtttagtgatttgtttagagttattggttttttgttgtgtgtttgatattaattaggttgtatggagttgtagtttttttgttgtgggaggagtgttggtagttggagttgagttgtgtttatttttttttagatgtgtttgttttttttgtgttagaagaaggtttatttgatggagatttaggtgaatggaggtattgtggttgagaagttggattgggtttgtgagaggtttgagtagtaggtatttgtgaattaagtgtttgggtaggatgagatgattgatgttattggggtgattaagggtaaaggttataaaggtgagttttgtggtggtttgagttgttgtgtaaatttgggggagaagtggttttaggtttagttgtttgttgatgaggtttagagtgagtgttgggtatagtgtttgaattggatagtgtagaattattttttattgttttttttttgagaatagttttgtggttagaagtggttgggatagtggagggttaggggataattttttaatatgtttttggattttttgttttttgtagtttattgataattgtaaaggggagtttggaattatgttagttagtttttgtgaatgggggagtttaaattaatggatgttttaaaaagtatttatttagaattgagtttagggtgatatttttagagtttatttagtttgataggggagatttgtgggtaatgtatatgaaataattttattatttttttagatgatttagttatggttggtaattgttgagtagtaggaaggggttagtgggaggtgttgggtgttgaggtgaagtaatgtgtatttattttaggggttattagttgttggtatattaagaagttgttttgtaagatttattgaggtttgtgtaaggtggtttgtattggggtatggtattttgtttgtgtagttttttttgtggtatgtgttgggtagaaaggttattattattgtattgagattaataagaaggtgaggttttgagagtggttttttgggggtgggaagaggtttttgtgatggggagtggggtttttgtgtttgttagtgttgttttattgattgtagtttatgtattatgtggatattagtggtttgttttttatggttagttttggtttattttgatgatttgtaaggtgttattttgtagagtggttgtggtggggttgattggtgtggttggggatattagttttattggtttttgatgttattattaggggggtgataggtttgtgttgtatagtaggatttttagttttagtttagttgttttatagaaaggaatttggagggttagttagttttttgttttgattttgggatatgttgtgattgggattgaggttttagttgttttttagtgtgttttgtaggttagtatattggtatgtttgggttatttgtttttaatgttttagttttatattttttttgtttatttagatttataagattggttagggttattttattaaggatggtaagttgattaagaataatgtttttattgattatgatttatttgataagagtattaattttttggtaagtaatg

SEQ ID NO: 3531 - DNA, 2453 bp, Artificial Sequence
  chemically treated genomic DNA (Homo sapiens)
atatatttttagaaggataagggagagtggatgttggaaagatagagtgagagattattattagggaaagattttatttttggaaggatattaaatttgggggggggttggtagtggagttgttgtttttttttttgtatttaatagttttaattttggttttttttatttttagttttttttttttttggtttttttattgttggtttttgtaagttttttttttattttttgtttaatatattttttagtttaaagtaaattatttttttttattttttatattttttagttttttttttttttttattgtaggttttagtgtttttgttttttttttggtgtatttgttatttgtattaattttttttttgttgtgtttagttatataaatgttaaagttattaatatttagttttataagttttattttgttttttttatttttttaataaaatgtttgtattttggttaggtgtggtggtttatgtttgtaattttagtattttgggaggttgaggtgggtagattatgaggttaggagatggagattattgtggttaatatagtgaaattttgtttttagtgaaaatataaaaaaattagttgggtgtggtggtaggtgtttgtagttttagttatttgggagattgaggttggagaatggtgtgaatttgggaggtggagtttgtagtgagttgagattgagttattgtattttattttgggtgatagagtgagattttattttaaaaaaaaaaaaaaaaaaaaaaaaaagtttgtattttgttttggtttgtgtttggtatttttgttttggtggttgtattgttttggggttattggttttggtttggttgtagtattttatggattttggtgagaaagttgagttttttttttagtttttgagtttgtttttttagttttttagttgattttgattttgtttttttaagtaagtgttttgatttatatgtaaggttgattatatttagtagaagtaagatgtttttagtggttgtatttatgattatggtttttttgtttattgtttgggtggggtttttaataatttttttaatttgtttattgtttttagttgagatttgtttaatgatatgtgggggtggggtatatgtttttaattgagggttggttttggtttgtttgatggtatggatgttttttttaattttttgtgtgatttggtattaattgttaattaaggtaagaatattgggtgtgtttttatttataaatttttttattatttttgttatattggtgttgttttggtttaagttgtgggtttgggtttgtgtttgtaatttgtttattagttttattatattgtaggtaattttagttatagtagttgttgtttttagatttatgttagtgtttaagagtataaaattgattttttttgtgaagggtgttagatttaggttgaggagggttaggatgttagaggtagtgttaatagagttggatattatattggtaatggtggtgtttttgtggatttgtttaattttttttgtaagggtatggagtttttttatgtgatttttaagttttttttttaattgaggaaatttttttaaaaattattgtttgtgttgttggtttttattgtggtggtttttgttttttatgattatgtgatttgtaagtttgtttagagttttatggagtttatttgttttatttttgtataaggaaaggttaaaggattaagaaatgtagtttttttatttgtgaaatgagttttatgtgatttttattttgtgtaaattgtagagtttttattattaattaaatagaaataaattttataaatggaattaattattttttaaatttaaatatattttgtttattatagatattttttagtatttattttatatggaaataaatattttaaaggtattttagatgtttttttatggtaggtgtttgataaagatgtttttttatttaagggtaggttaatattgtgattgttaaagtgtttggagagggaaaattttgtagatgaataaagagtagtgagagtgagataaagagattttattattaggatggtaggaaagtgaagtatgaattttatttaaagagaggttttttttttgtttttagtttttgggaagtgatttttaggtttttggaatgttttgtttggtaggaatatttttttttgtttggtgatttggttatgggatagtatagtgatgtgatggatgatagggtttggggttatttggtgttttttttgatttttagaggatttggggattaaaggtgtgagattttagggaagggttggagattttagttatgagggtagtttgtgatttagttttagtagatattttggatattaaggtatgggttgagaaagaaggattttttttttgattaattttagttgggttttttagagt

SEQ ID NO: 3532 - DNA, 2453 bp, Artificial Sequence
  chemically treated genomic DNA (Homo sapiens)
gttttgaagagtttagttggagttggttaaggagaaagttttttttttttaatttatgttttagtgtttagagtatttgttggggttggattataagttgtttttatggttagagtttttagtttttttttgagattttatatttttagtttttaagttttttggaagttaggaaagatattaaatagttttaaattttattatttattatattgttatattgttttgtggttaaattattaggtaaagaaagatgtttttattaggtaggatattttaggggtttggagattattttttaggagttgaggataaagggaaggtttttttttgggtaaagtttatgttttatttttttgttattttggtaataaggtttttttgttttatttttattgttttttgtttatttgtagagttttttttttttaaatattttggtagttatggtgttgatttgtttttgagtgaggaggtatttttattaaatatttattatgaaagagtatttgaggtgtttttaagatatttatttttatatggaataagtattgaggaatatttatgatgaataaaatgtgtttgagtttgaaagataattaattttatttgtaaaatttgtttttatttgattgatagtgaaagttttgtaatttatataggatagagattgtatggagtttattttatagatagggaaattgtattttttaattttttaatttttttttgtgtagggatgaggtagatgagttttgtaaagttttgaataagtttgtaagttatatggttatgaaggataaaaattgttatgataaagattagtagtataggtagtggtttttgaaagagtttttttggttgaaaagggagtttgaggattatataaggaagttttgtgtttttgtagaggaggttgagtaggtttatagaggtattattattgttaatgtggtgtttaattttgttggtattatttttggtattttgattttttttggtttgggtttggtattttttatagaaggaattagttttgtgtttttggatattggtatgggtttgggagtagtagttgttgtggttgggattatttgtagtgtggtagaattagtaaataaattgtgggtatgagtttaagtttgtaatttggattaaagtggtattaatgtagtaaaggtgatgaaggagtttgtgggtgggaatatatttaatgtttttattttagttgataattggtattaagttatataagggattgggaggaatatttgtgttattagatgagttagagttaatttttagttaggagtgtatgttttatttttgtatattattgggtgaattttagttgaaggtggtgaataggttgagagggttgttgaaggttttgtttaggtaatgagtagaggaattatgattgtgggtgtagttattggaggtattttgtttttgttggatgtggttagttttgtatatgagttaaagtatttgtttgagggggtaaagttagagttagttgaggagttgaagaagtgggtttaggagttggaggggaagtttaatttttttattaagatttatgagatgttgtagttaggttaagattaatgattttagagtagtgtagttattagggtagaaatgttgggtataggttaggataaaatgtagatttttttttttttttttttttttttttgagatggagttttgttttattgtttaggatggagtgtagtggtttaattttggtttattgtaaattttgttttttgggtttatattattttttggttttagttttttgagtagttgggattataggtatttgttattatgtttggttaatttttttgtatttttattggagatggggttttattgtgttagttatgatggtttttattttttgattttgtgatttgtttattttggttttttaaagtgttgggattataggtgtgagttattgtgtttggttaaaatgtagatattttattagggggataaggagggtaaggtaaagtttatggaattgagtgttagtgattttggtatttgtgtagttgagtatagtaagggaggggttaatgtagatggtaagtgtattaaggagaaggtaggaatattggagtttgtaataagggaggagagaggattggagagtgtggggaatgggaagaagtagtttattttggattaaagaatatattgggtgaagaatagagggggagtttgtaggaattagtaatgagaaggttaggaaaagaaagagttgaaaatggagaaaattagagttagaattgttggatataggagaagaaatagtagttttattattgatttttttttaggtttgatgtttttttaagaataaagtttttttttggtgatggttttttgttttgtttttttagtatttatttttttttgtttttttgggggtgtat

SEQ ID NO: 3533 - DNA, 2305 bp, Artificial Sequence
  chemically treated genomic DNA (Homo sapiens)
aggtagttttattgggttggaggttgtgggtgtttatatagggtttggtttataggaagtgtttgaaaggggggttgatttggtgatggttttttttttttttttattattttatatatttttaggaatttatatggtggggatgtattttttgggaaaggtgttggtggtgtagttgatgagaaggtaggttttgtttatggttttgaaagataggaagtgtaagagggtggtggttatgggttttgttggagatgtggggaggtttttgtttggttttttgtaaagattttagtatttatttagtttagttttttgggtttttgtttttttatgtgagatgttttttgtttgtgtttttatatttgagagtttgtaagttatgtggatgtttgttaaagtggagattttagggtttagttttagagattttgatttataggtgtgtgtagagttggtaatttgttttttttataggtttttttaggggttagtgatgtgggatagagggtgtttagtagatttaggtaatgttgaggggtttttgatgtttgatttgggttttaaattttagttgtattatttattagtggtatgattttggataagttatttaatttgtttttgttttagtttttttatttagaaaatagagatgagtttatttttataggagtgtgttgaggagtaaatttaatgaggtttattaaagtattgagtatagggtttgatgtatggtagtagttgatggttgttagggaagatttgattttgttttttttttttattttttttgtggagtagagtagttattaggttagggtttgagttagagtggtttgggtttaaattttgtgaggttttgggtaaattatttagtttttttgaatttttatttttttatttgtaaaatggatttattaggtttggtgagaggataaatagagaaggttagattaattttagagttggtatataggaaggaagtgataatgtgtgttttttttatttttagtatgtgaggttgggagtgggtgtaggtagtttagttgaagtttagaggttaagggatagttttgggtttttttttgttttgtgtggttttgttattttttgtttagagaagatagtttattttttttttttattattgtttttttttgggtttgttattgaggtaattttgaatgattggaatgttaatttttgatttttgtttgttttttttttgattagatataaagtagaagtgaatagggttggggtaggtgagggtagataaggagttatgtattagaattagttgaggttggtggataaatgggtttgtttttatttagatgggttatagttaaagttggggttatagggtttaggttaggagagttgagttttttaaagttttgggttgtttttttgtagaatgggaaggttggataggaggtttttttttagttagaatatgttttagggtgagtttgtaggttggattttaagatgtggttgttggtaggtatgatagattgataaattggatttgtttttttattttgtgtttttttaagagatagtgttttgttttgttatttaggttgattgtagtggtattattatagtttattgtagttttaaatttttgggtttaggtgatttttttattttagtttttttagtagttgggattgtaggtgtatatgttattatttttggtttaaaaaaatttttttatagatataggtttttgttatgatgtttaggttggttttaagtttttggttttaagtaatttttttattttggttttttaaaatgttaggattataggtatgagttattgtatttggtttggatttgttattttatagatgaggaaattgaggtttttaggggataagatagtttgaagttattgggatttgataattgagaagggttttagtttagtttgttttttttttgttgattttataattatttttttattttttagttttttttttttttttttgttttttaatgtttttttgttttttttgttttttatttatattttttatatattttttttaatttggtaggttgaggggaggggagagaaagtggagggggtgttagaaggtatatattataagtaagatagttatttagtttattttaagtgattttatagtatttttagggtataggtttttttttagatgaataagttgaggtttagagaggtgttgtgatttgtttaaggttatatagtggtattaagttagtgatgatagtttaggttagtttggggataaaggttgaattt

SEQ ID NO: 3534 - DNA, 2305 bp, Artificial Sequence
  chemically treated genomic DNA (Homo sapiens)
aaatttagtttttgtttttaggttgatttgggttgttgttattggtttggtgttgttgtgtggttttgggtaagttatagtatttttttgaattttagtttatttatttgggaggaggtttatgttttggggatgttgtggggttgtttgagataagttgagtggttgttttgtttgtagtatgtgttttttagtattttttttatttttttttttttttttttagtttattgggttggggaggatgtgtgggggatgtgggtgaggagtagaagaggtaaggggatattgagagatagagagggaaggaggaggttaaaggatgggagggtgattgtggggttggtaggggaggggtaggttgggttgagattttttttagttgttagattttagtgattttaggttgttttgttttttgggggttttagtttttttatttgtaaaatgataggtttaggttaggtgtagtggtttatgtttgtagttttagtattttgagaggttaagatgggaggattgtttgaggttaggagtttgagattagtttaagtattatagtgagaatttatgtttataaaaaaatttttttaagttaggagtggtggtatatgtgtttgtagttttagttattggggaggttgaggtgggagaattgtttgagtttgggagtttgaggttgtagtgagttataatggtgttattgtagttagtttgggtgatagagtaagatgttgttttttaaaaaaatataaaataaaaggataggtttaatttgttaatttgttatgtttgttagtagttatattttagggtttagtttataggtttattttggagtatgttttagttggaagggggttttttgtttagtttttttattttatagaggagtagtttaaggttttgagagatttagtttttttggtttgggttttgtggttttgattttggttgtgatttatttaggtgggggtgggtttatttgtttattagttttagttgattttgatgtatggttttttatttgtttttgtttgttttagttttgtttatttttgttttgtatttgattggaggaggggtgggtggaagttaagggttaatgttttagttatttaaaattattttggtggtaggtttaggggagggtgatggtaggaggagaggatgagttgttttttttgagtaggaagtgataaaattatgtagggtaggggaaggtttagagttgttttttggtttttgggttttggttgagttatttgtatttgtttttagttttgtatgttgagggtggaggaggtgtgtgttattattttttttttatgtattagttttggggttaatttagttttttttatttatttttttattaaatttaataggtttattttataggtgggaaaatgaaagtttagggaagttaagtaatttgtttaaagttttataggatttgaatttagattattttgatttaaattttgatttggtaattgttttgttttatgggggaggtgagagggaagagtagggttaggttttttttagtagttattggttgttgttatgtattaggttttgtgtttagtgttttgataggttttgttggatttattttttagtatatttttatgaggatgggtttatttttattttttagatggagaaattgaggtagaggtaggttaagtgatttgtttaagattatattattggtaggtggtatagttgggatttgaagtttaggttaggtgttgggggttttttggtattgtttgggtttgttgggtattttttgttttatattattggtttttggagaagtttgtgggaaaagtggattgttagttttgtgtatatttgtggattagaatttttggggttggattttgaagtttttattttaataaatatttatatgatttgtaggtttttgggtgtgagaatatagatagggggtattttatatggggagatggaggtttagagggttaggttgggtggatgttgaggtttttgtagaggattaggtagaaatttttttatgtttttggtagagtttatgattgttgtttttttgtattttttgttttttagggttgtgggtaagatttgtttttttattagttatattattaatgttttttttggagagtatatttttattgtgtgagtttttggggatatgtggggtggtgggaggaggggagagattgttattaagttgattttttttttaggtattttttgtgggttagattttgtgtgggtatttatagtttttagtttagtggagttgttt

SEQ ID NO: 3535 - DNA, 3096 bp, Artificial Sequence
  chemically treated genomic DNA (Homo sapiens)
tttaggttattgttgtttaggaagaggtgttgtagtgatttgtttataggttggaaggttttgttatgtaaggttttgagtgggttgtttgagagttgtagttttaggagggtaggtagtttttttaaggttttagtgggtattttttgtagttgatttttgtttaggtgtagtttttttagtttttgagttgggtttagtgttttaagggatattttggtgatgtggtttttatttaggtagatttagtgtaaggtttgtgttttttttaggtttttaggtgttaggtggtttatagtgttgttttgtaggtgtagggagaagaggttgggtagggtgtgtagggtagtttttggtatttgtaggaaatggttgtgttttaggtataggtagttgaggtggggagtttttttaagggtagtagtgttgaggtttgtgagttggttgttggagaggtataggtagattaggtggtttagtttggttagggtgtttgtttttagttttgtgatgttgtagtgttgtaggtgtagtgatattaggtggtttaggttggggaaggttgtttggggtattgaggggaagtggttttgttttaggtttaggagttgggtgttgttggggaagttgtggggtattgtttgtaggttgtagtttttgtagttgttgtgttgggatttggggatgtatatgtaggtgtgagggtaaggtgtgattgtttgtttttttttggggttgtgtggagggttgtgtggaggggtgtggggtttggttatagtttgtttttttagttttttttttttttgtgttgtgtttttagggtagtgtaggttttagggttgtagggtgtttagagttttgttttgtaggtgttgtggtttttggtatgtgttgtttgagtgtatgtgtgtttgtgttagttatttgagtaggggttgtgtttggtagttgtattatagtggatttttttgtagttgtagttggtgtagttggtttgggttttgtagtgggggtagggtgtttagttggtttttgtggaggttgagggtgtgtaggtgtggatagtgtgtgaaggttttgggatttagggtttgtagggttttgttgtttagtagtagtttttgtaggttgggtagtgttagtttgttttttttgtttgtgtaggtgagtgggttgtggtttagttttagatgggttaggttgtgggtttgggataagataggtttgggtagagtttggagtttgttgtggtgtaggttgagttgttttagggtgggtaggttagttagggttttgggggttagtatgttgagtgtgttgtgtgatagttgtagttagtggatgtgtagtagtttttggaaggttatggtgggtaggtaaattagggtgttgtgggttaggtttagtgtggttagtgtatttagtgttttgaatgtttttggttgtagtttttttagtgtgtttttttttagttttagttgttgtaatgagtttagtttgtttagtgttttttggggtagtttatgtaggtggttggaggttaggttgagtaggagtaggtggtttaggttatggaaggtgtttttggttattagttttattttgtagtggtgtaggtttaggtgtgtgaggtgaggtatgttttggaaggtggttgtggggattatttttagtaaattgttttgtaggtttagttgttgggttagttggggatagtgaggagaaagtggggttgagttaggtagggattttgtttttgtaagtgttgttttttttttggaatattttttttttttgttattttttttatatttttttttatttgatttttgatattttttttaggaagtttttttttttagtgttttgggtattatttattgtggtattttttatattgtgttgtttttgtttttttgtttttttttttttattagttgatgattttgtagagtagagattatattttattttgttatagtttgtttttttattatagggtttgtagtgaatttagtattgatttatgggttatttatttattttatttatatagtaaggattttaaatagattatttttttgttattggtttttattatttttattttatagaagtgtaaattgaggtttaaagagaagtaatttgttaaggttttttgggtaggtggtggtagattaattggtgtttagtttaggtttttttttttgggtttttattttgttttattgttattttgtgtttgtgtttttgttttgttgattttagggatggtgtttggtattttagtgaggttttggtattggtaggtaatgtgttgtttggagttgttatagatgtaggtttgtgggtagtgttgggtggtggtttgtttagttggggttagtagtagaagtataagaagtggtagtattaaggggatatgggtggagttttggggtttgggatggggagggagagtttgttgtgtataagggttgaggttatatgttgttttttatttagttttagttatggtgtagtttttgttttaaaaattttttagagtttttttttttgggtttaggaaagtgttaattattttgagtttttttgttttttattttttatgtagtggaggttttatgattagttttgttttatatgggaggaaattgaggtttagaaaagtgatttggttagtttttttgtttttgtttaatggtttagtgaggatttgttgattgtgagaatgattttagtttagagtatgtttttaggttgtggtgaggttttggtttagggtaggtttggaagtagtttgtttttagattgatatgatgttagtttttaggtggtaggagtataatggtattttttagaaaggagggaggtatttagtttgggtttttgagtttttttttgtttgtttgtttaaatagagataagttttgttttgttgtttaggttggagtttggagtgtagtggaatgattatggtttattgtagtttttattttttgggttaaagtgatttttttattttagttttttgagtagttgggattataggtatatattattatgtttggttaattttttaattatttttggtag

SEQ ID NO: 3536 - DNA, 3096 bp, Artificial Sequence
  chemically treated genomic DNA (Homo sapiens)
ttattagaagtaattaaaaaattagttaggtgtggtggtgtgtgtttgtagttttagttatttaagaggttgaggtgagaggattattttagtttaggaggtgaaggttgtagtaagttatagttattttattgtattttagattttagtttgggtaatagagtaaggtttgtttttatttaaataaataaataaaaaaagatttaaggatttggattggatgttttttttttttttggggggtattattatgtttttgttatttgggagttggtattatattagtttgaggataggttgtttttgagtttattttggattagagttttattatagtttgagaatatgttttgaattggagttatttttatagttagtaagtttttattgagttattgggtagaggtaaagggattaattaggttatttttttgagttttggtttttttttatgtaaaataggattaattataggatttttattgtgtggggggtggggggtagggaggtttagggtgattggtatttttttgggtttaaaggaggaggttttgaggggtttttggggtaggagttgtattatggttgggattaagtgagggatagtatgtggttttggtttttgtgtataatagattttttttttttgttttaggttttggagttttatttatgtttttttggtgttgttgttttttgtatttttgttgttggttttggttaggtaggttgttgtttagtgttgtttataggtttgtatttgtgataattttaggtgatatgttgtttgttggtattagaattttattgaggtgttagatgttatttttgaggttagtagggtaggagtataggtatagagtggtagtggggtaaggtggggatttagagggaggagtttgggttgggtattagttgatttgttattgtttgtttgggagattttggtaaattatttttttttgagttttagtttatatttttgtaaaatgggaataataaaaattagtaatagggagatgatttatttaaaatttttattgtgtgaatggaataagtaggtgatttatagattgatattgaatttattgtagattttgtggtggagaggtgggttgtggtagggtgaggtgtggtttttgttttgtagagttattagttagtggaggagagagagtgaggaggtagggatagtatagtgtgaaaaatgttatagtgggtgatgtttagggtattggagaggaaggttttttggaggaggtgttaggggttggatgaagagaaatatgggaaaggtgataggagaaaagagtgttttggggaagaagtagtatttgtaaaggtggggtttttgtttggtttagttttattttttttttgttgtttttagttgatttagtggttggatttgtagggtaatttgttgaaggtgatttttgtagttgttttttagggtgtgttttattttatatatttggatttgtgttattgtgaggtggagttggtggttgagggtgttttttgtggtttgggttgtttgtttttgtttaatttggtttttaattatttgtgtgagttgttttaggaggtgttggatgggttgggtttgttgtggtggttggagttggaggggaatgtattggaggagttgtggttggggatgtttggggtattgggtgtgttggttatgttaaatttggtttataatgttttggtttatttgtttgttatggttttttaggggttattgtgtgtttgttggttgtggttgttgtataatgtgtttagtgtgttggtttttgaggttttggttggtttgtttgttttgagatggtttagtttatattataatgagttttaggttttgtttgggtttgttttgttttaggtttgtggtttggtttgtttggagttgggttataatttgtttatttatgtgggtgaggaggatgggttggtgttgtttggtttgtgggagttgttgttggatggtggggttttgtaggttttgggttttagggtttttgtatattgtttgtgtttgtatatttttgatttttgtgggaattagttagatattttgtttttgttgtagggtttgggttagttgtgttggttgtggttgtaggggaatttgttgtggtgtggttgttaggtgtggtttttatttgagtggttggtgtgggtgtgtgtgtgtttggatggtgtgtgttaggggttgtggtgtttgtggggtgaggttttggatgttttgtggttttgggatttgtgttgttttggggatgtggtgtaggaagaggaagagttggaagagtgggttgtggttgggttttgtgtttttttgtgtggttttttgtgtggttttggggaggagtgggtagttgtgttttgtttttgtgtttgtgtgtgtgtttttgagttttggtatagtagttgtgagggttgtggtttgtaggtggtgttttgtggtttttttagtgatatttagtttttggatttgaggtggaattatttttttttggtgttttgagtggttttttttggtttgggttatttggtgttgttgtatttgtagtattgtggtattgtggagttggaagtgggtgttttggttgggttgggttgtttgatttatttgtatttttttgataattagtttgtaggttttagtgttgttgtttttgaaggggttttttgttttggttatttgtatttagaatgtaattgttttttgtaggtgttaggggttgttttgtgtgttttgtttagttttttttttttgtatttgtaggataatgttgtggattgtttggtatttggggatttggggagaatatgggttttgtgttgggtttatttgagtggaaattgtattattgaagtgttttttggggtgttgggtttagtttgggagttggagaagttgtatttggataggaattagttgtgagaggtgtttattggggttttggaggggttgtttgtttttttggagttgtagtttttgggtaatttatttagggttttgtgtgatggagttttttagtttgtgggtaggttgttgtagtatttttttttgaatagtagtggtttgga

SEQ ID NO: 3537 - DNA, 2400 bp, Artificial Sequence
  chemically treated genomic DNA (Homo sapiens)
gttttgttgtaatgaaaattatagtaataatgatgatatttaattttgatgggtatttggtatatgtttggtgttgttttaaggattttgtatgtatttatttatttaatttttatataattttatgagggagaggttattattgtttttattttattaatgattatttggagttaggtttgtttaaagttatttagttggtgataggtagagttgggatttgattttaggagtttttggttttttaaatattttttaggttgtttttatatgatagttttttttgggttttgtatttttagttttttttggataaagttttttgattttattttattttgttgtttttatgggattttttgtagggttttgggtgtttttggagttttagtatttaaagttaatttttagtgtttttagatttgtgtgtttggagtttggtgagatgattttgttaggttttgggtgtttgtgtttttatagttttaaagtttttgtattgtggtgggtgtaattagtttggatgaaataaggatattagggtttaagtttgggttttgttatttagtttggtttttttgggttaggtattttttttttttaagtattagtttttttaattatgatatgagataaagtattaggaagtattttgtaggttataatgttattaattgttgttaatttgggttattttgggagttttttatttttgttaattgttgttttattttaagttttgggtagtttttagtggtagatggttttgggtgttttagttttgttttttgttaggttttgtggttttgagtatatttttttatttttttgattttaatttaagggatgttatgagatggagtaagggtgtgtatgtgatatttatttggtaaagttattgttgggttatgttagttgttattattattattgttgtttttggagaattttaagttttttttaaatggattttttttaagtttttggttttttttttgattttggatttaggagtagagtttgtgaagtgttatttttagtatgttgagtttttttatttttttaaataatgtatttttgttattaggtattatgtattagtaaagagaggagggttgatgttagggtttggggatgggatatttaggttggggtgtttagatttttttgttgattattttattggttttgttgttttatttatatagagtttgtttagtttgttggtttgggtgttgatggatgaggatgtttggatttttttttattagttgttttatgatttagagtaggtgttttaggtattttgttggttttgtttgtgtatttggaaagtgtaagtgattagtttttgggtttttatatggttagagttttgggtttttgttggaaaagtattttttttttttgaaaggagagaaggaaaatatagattagttatatttttggatattttaggatgatttgatttattagatgggtttagaaagttatgtttaggtttggagggatagagggtgtgtgttttttaatgtgataataaggattggaagatgaggattgggatattgattttagagagtttggtgttatagtaattattggggatagtttagaagttttgggtgtttggaaagaattgggggtagagaggagggaaaagttgttttatttataaatattttttgagtatttttgggaatgttttttttttggtgtgttggagttttatggggttagttatggttttagttgtattatgttggtttttagagtatattgttttttttttattttaaaaagtttattttttttattaaaaatttaagttatttgtagattgttgggtttttaaagtttaggttgttgttattaagaattttgggaaaagtaggatggagtttttgagttttttattagtttttttttttgtttttttttattaatgtttttaagggttttttttatgtttggtattttttttgtgtatataggtaggtgtgttttaattttagttgtgttatgtggtagttgtaggttttagagtaaggtattttatttttttaatttttagttttttttagttgaaaaattagaaatagttatatttatattagagtttggttgtagggagtagaggaataaatatatttgaatattttggtaagtgaaaggtattgaatgagtgtgtatttttttttttatttgttttttgagtttggttttttggtttataaagaagggagaataattttatttttaaagaggttgtgaggatttggggataagtgtgtttgtttagaggagtaattgtagttatattttagtattttttgttttttttgttttttttgttttttgtaaggggtttttttggatataggagtaggaagttgggtt

SEQ ID NO: 3538 - DNA, 2400 bp, Artificial Sequence
  chemically treated genomic DNA (Homo sapiens)
ggtttagttttttgtttttgtgtttagaggagttttttgtaaggagtagggaaggtagaggagatagaagatgttgaaatgtggttgtaattgtttttttgggtgggtatatttgtttttaaatttttataatttttttggaggtgggattgtttttttttttttatggattaggaagttaggtttagaaagtaggtggggaaggggatatatgtttatttggtgttttttatttgttaaagtgtttagatgtgtttgtttttttgttttttataattaagttttgatgtaaatgtgattgtttttaattttttagttgagggaaattgaaggttggagaggtgaagtgttttgttttggggtttgtggttgttatatggtatagttggaattaagatatatttgtttgtgtgtataggggagatgttaggtatggagaggatttttggagatattggtgggaggaagtagagggaggagttggtggggagtttaggagttttgttttgttttttttagaatttttagtagtagtaatttgggttttggaagtttagtagtttatgagtggtttgaatttttggtgggaaggatgggttttttggaataagggaggaatagtgtgttttggaggttagtatgatataattagagttatagttggttttatggagttttaatatattagggagaaggtatttttagagatgtttagagaatgtttgtggatggggtagttttttttttttttttgtttttaattttttttaggtatttagagtttttgggttatttttagtagttgttgtggtattaaattttttggagttaatattttagtttttgttttttaatttttattattatattgaaaggtatatattttttgtttttttaagtttgaatatgattttttaaatttatttaataaattaaattattttggagtgtttagggatatggttgatttgtattttttttttttttttttagggaaaagagatgtttttttagtagggatttagggttttggttatgtggaagtttaggggttggttatttatattttttgggtgtgtgggtggagttggtggagtgtttggggtatttgttttgagttatagggtgattggtaaaagaagatttggatgtttttatttattagtatttagattggtaggttgagtaggttttgtgtgggtgagatagtagaattggtggggtagttagtagaaagatttggatattttagtttagatgttttgtttttgagttttgatattagtttttttttttttattaatgtatgatgtttgataatagaaatgtgttgtttaaaagaataagaaaatttagtatgttgaaggtaatattttataagttttgtttttgggtttaaggttaggagagggattaggggtttgagaagagtttatttggaaaagatttaaagttttttagaaatagtagtaatggtgatgataattaatatgatttggtggtgattttattaggtgggtattatatgtgtgtttttgttttattttatgatattttttgagttaggattagagaggtgaagggatatgtttaaggttataaagtttagtaagggatagagttggggtatttagagttatttgttattaaaggttatttaaagtttaaggtgagataatagttggtgggggtggggggtttttaaaataatttaaattaataatagttggtggtattatagtttataaaatgttttttgatattttattttatattatagttgaggaaattgatgtttggagagggaaagtatttggtttagaggagttgagttaagtgatagggtttggatttgagttttagtgtttttgttttatttaagttggttatatttattatgatgtaaagattttgaagttgtgaggatgtgagtatttagagtttggtggggttattttattaaattttaagtgtataggtttggggatattgagggttggttttgggtgttgaggttttagaggtatttagagttttgtagaggattttatgggggtagtaggatgaggtggggttggggaattttgtttgagaggaattggggatgtagagtttggaaaaggttgttatatggggatagtttgggaggtgtttaaggagttaggggtttttgggattgaattttagttttgtttgttattagttgggtggttttgggtaaatttggttttagatggttattaataaaatggggataataatagttttttttttgtgggattgtgtgagaattaaatgagtaaatatatgtagaatttttagaataatattaggtatatattaggtgtttattaaagttagatgttattattgttattgtgatttttattataatgaggt

SEQ ID NO: 3539 - DNA, 2495 bp, Artificial Sequence
  chemically treated genomic DNA (Homo sapiens)
atatatttgtgaatgtttgttgggtttatatttaagaggggaattgttgtattattaggtatgtatatattaagttttaaaagatattgttaaagttttttaaagtaattttattaatttatatttaatgaaaattttaattttgtatattttttataatatttagtattgttaatttgtaaaattttaagtatttttataggtggttagttggagttttttgtggtattaatttgtatttttttaatggttgttgatgttgagtaattttttatattatatgtttgttggttatggaggtatttttttttaaaatgtgttagtttgagttttttgtttatttttaattgatttttttttatttgtaggaaatttttaaataaattttggatgttagttttttgtttgatatttataatgtaaatatttttttttgtttaatgtaaatatttttttttgttgtttgttattttattttttttaaagtaagaaaagatttttggttgggtatagtggtttatatttgtaattttagtattttgggaggttaaggtaggtggattatttgaggttaggagtttgtaattattttagttaataaggtgaaattttgtttttattaaaattataaaaattagttaggtgtggtggtaggtatttgtaatttgtatttgggaggttgaggtaggagaattatttgaatttgggaggaggaggttgtagtgagttaagattgtgttattgtattttattttggtttataggagtgaaattttgttttaaaaaaaaaaaaagagtttgttgtttttattgagttttgaagaatgttagtagtttgttgtttaaaattaaattatagggttttatgatgggttaatttgatgggaaagttattattttgatagttgttgtttaggggattggttaagtagttgttttagtttttgtaagagaaggtgttaaagttatagttatagatattaatgtgtttaaattttaggaattggaaaagtatttgggtatttaaatttgtgtttttgatgttataaagaagaaataaattgattagtttgttaatgaagttgagagatttgatgttttttttaatgttgttggttttgtttattatggaattgttttggattgtgaggagaaagattgggattttttgatgaattttaatgtgtgtagtatgtatttgatgattaaggtatttttttttaaaatgtttgtttaaaaatttggtaatattattattatgttttttgtggtttttagtattaaaggagttgtgaatagatgtgtgtatagtataattaaggtagttgtgattggttttataaaatttgtggttgtagattttatttagtagggtattaggtgtaattgtgtgtgtttaggaatggttgatatgttatttttataagaaagaatataagttagaggaaattttgaagaggtatggaatgattttttgaagagataaaagatgggatgatttgtaattgtagaagaaatagttatgttttgtgtgtatgtggtttttgatgaatttgtttatgtaattggtaattttgttattattgatggaggatggagtttgtgattttaggatttttatggtgggaaggaaggtaggttttttttatttatagtgaatttggttatgaagaaaatttattaattattttttttttgttaattatatgttaatgaaattaagttttttttaataatgttattgtttgtaagagtttgattttttaagtatattaatttttttgtaattttttttgaaattattgtaaagaaataaaaatattgaatttatagtaagagaatagtttttaaaataaattttaatttgtaagtatttgtgttagttattttgggttgttataataaattattatagatggagtgttatagataataaatatttattttttagtttggaggttaggaagtgtaagattaaggtgttagtagatatggtatttggttagggtttattttttagtttgtagatggttttttttttgttatatttttatatagtaagagtagagaaaaaaagtaagtttttatgtgtttttttataaggatattaattttgtttatgggggtattatttttatgatttaattattttttaaaggttttattttttaatgtattatattgggggttaggatgttaatatatgattttggggtgatataaatagtttattgtagtatatataattaaaatgtaaatatgaagaaaaaaggaagtttttgttttttttgtggggggtggggttaaggaagaagatagtaattttaggattaggtattgtagtttatgtttataatttttgtattttgggaggttaaggtaagaggattatttgttgttaggagtttaggattagtttagttaatagagagaggttaaggtaggaggattatttgagtttaagagtttgaggttgtagtgagttgtaattatgt

SEQ ID NO: 3540 - DNA, 2495 bp, Artificial Sequence
  chemically treated genomic DNA (Homo sapiens)
gtatgattatagtttattgtagttttaaatttttgggtttaaataatttttttattttagtttttttttattaattaggttggttttgaatttttggtagtaagtgatttttttgttttggttttttaaagtgtaggaattataggtatgagttataatgtttagttttgaaattattatttttttttttaattttattttttataaaaaaaataaaaatttttttttttttttatatttatattttaattgtatatgttgtaatgggttatttgtattattttaaagttatgtgttgatattttaatttttaatatgatatattaggaggtggggtttttgggaggtaattaggttataagggtagtgtttttatgaataggattagtgtttttataaaaagatatataagagtttgttttttttttttgtttttgttatgtgaggatgtagtaagaagaggattatttgtaaattaggaagtgggttttaattagatattatatttgttggtattttgattttgtattttttagtttttagattgaaaaataaatgtttgttgtttatgatattttatttatggtaatttgttatagtagtttaaagtgattaatatagatgtttataaattgagatttattttaaaaattatttttttgttgtgagtttaatatttttatttttttataatgattttagaagagattataaagagattaatatatttaaagaattagatttttgtaaatagtgatattgttaaaaagggtttagttttattaatatgtgattagtaggaaggagatgattggtgagttttttttatagttaggtttattgtggataggaagagtttgtttttttttttattatggagattttaaaattataagttttattttttattaatgatgatagggttattagttatataagtagatttattagaagttatatatatgtagagtatggttattttttttgtagttgtaaattgttttattttttgtttttttaggaaattattttgtgtttttttaggattttttttggtttgtatttttttttgtagagatggtgtattaattgtttttgggtatatatagttgtatttgatgttttgttggatgaaatttgtagttatagattttgtgaggttaattatggttgttttggttgtgttgtatatatatttgtttataatttttttgatgttggaaattatagaaaatatggtgataatattgttagatttttgagtaagtattttaggaaggaatgttttgattattaggtatgtgttgtgtatattgagatttattgagaagttttagtttttttttttataatttaggatagttttatgatggataaaattagtaatattaaagagaatattaagttttttaattttattggtgaattgattaatttgttttttttttgtgatattaaggatatgagtttgaatatttaggtatttttttagtttttgaagtttggatatattaatgtttgtggttatgattttggtatttttttttataaaagttaaggtagttgtttggttaattttttgagtagtggttgttaggatgatgatttttttattaagttgatttattatggaattttgtggtttaattttaagtagtgagttgttggtgttttttagaatttggtgggagtaataaattttttttttttttttgaaatagagttttatttttgtgggttaggatggagtgtaatggtatggttttggtttattgtaattttttttttttgggtttaagtgatttttttgttttagttttttaagtataaattataggtgtttgttattatatttggttaatttttgtagttttagtagagatagggttttattttgttggttaggatggttgtgaatttttgattttaggtgatttatttgttttggttttttaaagtgttgggattataggtgtgagttattgtgtttggttaagaatttttttttattttaaggagaataaaatggtaagtaatagaggaagatatttatattagatagaagaaaatatttatattataaatattagataaaggattagtatttagaatttatttaaaaattttttataaataagaaaaaattagttaaaagtggataagagatttaaattggtatattttaaaagggagtatttttatagttaataggtatataatataaaaagttgtttaatattaatagttattagggaaatgtaaattaatattataaggagttttagttaattatttatgagaatgtttaaaattttataaattgataatattaaatgttgtagaggatgtgtagaattgaaatttttattgagtgtaaattggtaaaattattttggaaaattttgatagtattttttaaagtttaatatatgtatatttgatgatgtagtaattttttttttaggtataaatttaatagatatttataggtgtgt

SEQ ID NO: 3541 - DNA, 2452 bp, Artificial Sequence
  chemically treated genomic DNA (Homo sapiens)
tattagttaagtgagaatagtattatattttttataggttgttgtgagaattttgttttaggttagtgttttgtatatagtgtatgtttaatttatgttttttttttttatatgttggggttttttagtttttttaatggaatttagagttgtgatagttaagggtttagaatttaggatatttgttttattagaatttaggatatttgttttaagttttagttagtagttattagagttgaggttttgtgtgaagtagtattttttttaagtatttttttgttttttgtaaattaaatagaatgatttaattttattatttggtggatgagtttaggattttttagtataagagagatttttttttgttttggtagtgggaagttgtttttttattttttgggaggtgtagagttgggtgattttgggatgggtttttagggtaatgtttttatgtgtgtttatattttttattttttttataggtagtggtgagttttgttaatttttattatgtttagaattgaataggaagtggtaatttggttgttatggtagtgagaggggtaggaatgggtgaggttttttaaggagtattggtatttgtgaggtgggaaaggtatttatatattggtttttttaggatagaggtagggataggatgtggtattagtattttaagaaaaatgtttaaatttagtttaaaatatatatgatgtaatgattgttgttataattaagtagggttttttgatagaggttaagtagagaaagttatttgtgtgaggaaattgagggttttgttttaaagtttgaggaagtttagtagataaaggagttaatgtagagagggtttagagttttattttggtttgggaggtttgggttagttttgtttggggtttgatattagggtaaagagttaagttagttttaattttttttttttttaatttataaaatattaaataagaaaattgttggtaaggagggtaagaaaaaggttttgagtttttgtttttgtatttatttttttttttataagttagttttttttttttttatttgagatgtaattttgtggttatagtagtagtagtagtaggaaggttggggttatggttttatttagttgggtagtgttaggtttggagatttaaggtgagggtttatttgatataggatgtgttatttgggtttgttagggaaggatttggggttttaaaagtgaagttgtttatttagggaagtgaggtagtgtgggatttattgtttttagttaattgtagggatttattgagtttattatgagggtggtgttggtagttgtttttgtttttttttttggaattttaggtaggtgtggttgttttatttagtttggggttttaagttgggaggatttatagttagagggttttttgttttttttaattttttttagaaattggtttttaggatttagtaagggggttggggtgaggtttttggaatgttaggtatagatttttttggaattttttgggtttagagatttaggggtgtgggtttttaggttgagatggagtattttagattttagttttttatatatatatatttatagggaagtttttataaatttttatttatttatttattgtagattttttttgttttttttttttttttttttttaggtttttggttgtttagaatagttatttgtgtttattgttgtaaataattttttataggtttatttgaaattttatttttgttaagtgggaaaaatgtaaattgttaagatttagggtataaattttgggttgagggaggggtttttgtatttttatatataggtgtgtatgtatatgtatttatatttatagttttattttgttttttatttatttttatatatatatatatatgtttatgtatatagttttatatatattttagtagtttttttttttttttatttatatgttttttttttttgtttttttttttgtttttttttttgttgattttatttattattagttttttttagatttttagttttttgtgtaggttttttatagtttttgtagtatttttttttatttattttattttaagatttttttttttttttgtttttagtttatgttagtatgtaggtaagtgttttttatttttttttgtttaatgttattttgtttgtatagttattagttttagtggaaatgatttagtattaggtttaagattatattttttatttattttaaggtttagaattagaagtattaatttttgatgtttggtatttgtgttatttgtttttttagtgtgtggggatttagttggatttttgtgattatgtatgttttttttatttattagtgttatgtttttattttttagatgggattgttaaaaggtaaattgaggtataataaaattttaaatagattattttagt

SEQ ID NO: 3542 - DNA, 2452 bp, Artificial Sequence
  chemically treated genomic DNA (Homo sapiens)
gttgaaataatttgtttaaaattttattgtgttttagtttattttttgatagttttatttaaggagtagaaatatggtattagtgagtagggggagtatatataattatgggagtttagttgggtttttatatattgaaggagtagatgatataggtattggatattaaaaattgatgtttttgattttaggttttggggtaagtgaagggtgtggttttgggtttagtgttgggttatttttattggagttggtggttgtataggtgagatagtattgagtaggaggaagtggagggtatttgtttgtgtgttgatgtaggttggaggtaggggaggaagggggttttgagatgaggtgggtgaggggaagtattgtggaggttgtaggaagtttgtatgagggattaggagtttagagggagttgatggtgagtagagttgataggaggagaggtagggagagggatagagagaggagatgtatggatagggaaaaggagaggttgttggggtgtgtgtgagattgtgtgtatgggtgtgtgtgtgtgtgtgtgaaagtgaataaaagataaagtgagattgtgagtgtgagtgtatgtgtatgtatatttgtgtgtgagagtataggaattttttttttaatttaaaatttatgttttgagttttaataatttgtattttttttgtttgataaaagtaagattttaagtgagtttgtaagaggttatttgtaatagtgaatataagtgattgttttgagtagttaggagtttgggagagagagagaggaaggaatagaaagaatttgtaatgaatgaatgaatgagagtttataagaatttttttgtgaatgtatatatgtaagaaattagggtttgagatgttttattttagtttaagagtttgtatttttgggtttttgagtttagaagattttaggaaggtttatatttgatgttttagaagttttattttagtttttttgttggattttagggattagtttttgggggaggttggggagggtggggagttttttgattgtgagtttttttggtttggggttttagattgggtggagtagttatatttgtttgaagttttgaggaaaagggtggaaatagttgttagtattgtttttataataggtttaatgaatttttgtggttggttgggggtagtgggttttatattgttttatttttttaaatgggtagttttatttttagaattttgggtttttttttggtaggtttaggtggtatattttgtgttgggtgggtttttattttggatttttaggtttgatattgtttagttggatggaattatggttttagtttttttgttgttgttgttgttgtggttatagggttgtgttttaggtgaggggagaaggggttgatttgtggaggagggagtgggtatagaggtaggagtttagggttttttttttattttttttattagtagtttttttgtttagtgttttgtgggttggggaaggaggagattagggttgatttagttttttattttaatattaggttttaggtgaagttaatttaggttttttaagttaagataaagttttggattttttttgtattggtttttttatttgttaggtttttttaggttttaaagtagagtttttaatttttttatataaatagttttttttgtttggtttttgttaggaagttttgtttagttatgatagtaattattgtattatgtgtgttttgaattgaatttgaatattttttttgaaatgttgatgttatattttgtttttgtttttgttttgaagggattagtgtgtgaatgttttttttattttatagatattaatgttttttgaggaattttatttatttttgttttttttgttgttatggtaattaagttattattttttgtttagttttgggtatggtgggggttggtaaaatttattattgtttgtgagaggggtgggaggtgtaggtatatatgaagatattgttttggagatttattttaaggttatttaattttgtattttttagagggtagagaaatagttttttattgttagggtagaaaggggttttttttgtgttaagaaattttgggtttatttattaaataatgaagttggattattttgtttagtttgtaagggatagagggatgtttagagagggtgttgttttatatagagttttagttttagtggttgttggttgggatttgggatggatattttggattttggtgggatagatgttttggattttgggtttttgattgttatagttttgggttttattgggggaattgggaggttttagtatgtgggaaaaggaagtatgagttgagtatgtattgtgtgtaaagtattgatttggggtagaatttttatagtaatttgtgaggggtgtggtgttatttttatttgattgata

SEQ ID NO: 3543 - DNA, 2374 bp, Artificial Sequence
  chemically treated genomic DNA (Homo sapiens)
aagattagtttggttaatatgataaaattttgtttttattaaaaatataaaaattagttgggtatggtggtgggtatttgtagttttagttatttgggaggttgagatataagaattatttgaatttgagaggttaaggttgtagtgagttgatagtgttattgtattttagtttgagtaatagagtgagattttgttttaaataaaataaaaaataagggaagggaaaatgttttatttaattttattatttgggggttgggtataaaatatgagaaaaggaagatttaaaggtgaaaaaatggttagtatttataaaagaaaaggagtggttgtttgtgttttaggtagttgattattttttatttttagaatattttattttttttaaaaaaaaaaatttaagtttttaatattttaaaatttttttttaataaatgtttatatattagaaaagttatgggttgtgggaatgaaatttgtaaaaatagtgtttttaatattgaaaatagggttaagaatattggtttaaaatattaatgatatttttttatttttaaaatgaaaggagttgaagttgtttaggtattgaatgtatttatttgtaggtgagatatattagatggtttgtgaagatttataaaattaattaaggtatgaattttataatttttaagttattaagtttgttattataggaataaaatattggaagttataaaaattaattttggttttatatatttagatttaatattgtttaaaatatttttaattaaaaaataagttagtattaagtatgttgaaaatgttggaagaagaggttaagtttttggagtgggaaggatatgtttttttgtggggaagtgtagtagtgtggaagggggaaagggatggtttttagttgatttattttagattttttatttagtttggtttttgttttttgtagagttgttaagaggatatttttttggaatgttttttttttaggggtttttattttttaagaatttatgagttttggtaataggtgggggtggggagggtaggtttaaggggtggtagttggtttaggataatttatttgggggtagtatgtttagagagattttgtgtaaaatttggggttttttggttttatttattatgtagttatatttgttagtattttttttttgtagggtaattatttttatttgtagtaggtttttatttaggtttgtgagaaatgtatgtttgtttgttggagttttgtgatttatagttgaggatattaggggttggtatttttttggtaagaattggtattatattttttgagttttgatattttggagtttgtagtggtattgtattagaatggagttttttatgggtgtttgtagtattttagggaggttgttaattatgttttgatttggggaaggaaaggaggtgggaattttgggtaggagttgggagtattttttagtttagttgttggtatgggtgtggtatttataataatatgttatttttggatatggggttgagtatatggggtttagagttgtagttttttttgaattttattttttagttttaggagtagtagtaagagtagggtgaggtttatggttgggtagagaaatgttaatttttgggtttgtttgggtattgatgtagtatttgtttgagggtaggaaatatttgttttagaaagttatttggggtgggagaaaggaaatgatgggtatttttaggggtggggaaagggagtttttttaagttttggttggtttagtgtttaggaattgttttgagggtaagggtgggtaagataggatgagaagatttgaagaaagttagaagtttgtaggggttggggtttggttaaggggtgagatgggaggattgtgataattggaggataggagaggaagaggaaagatgatttttaggatttttttaatatagaatttgagggtgtatagttatgaaggaggaaggtagagtgttttgtattttatttaatgttatttttgtttttaattttttgggagtgttttatgattatttaagtttttaggaggttgtatgtagtataattttaaataggaagttttattttgattttgtgttttggattgggtttttttttatttattgttttggatattatagaatttttttatttggatttatattttttagttttgggaaataaatttttattttgataattatatgtttatttttttttttttttttatttttttgtaattttttaattagttggttattgaatgttgtgtgtttattttatttttatattttttttattttattttttatttttttgttttttttgttttgtttttaaggagatttt

SEQ ID NO: 3544 - DNA, 2374 bp, Artificial Sequence
  chemically treated genomic DNA (Homo sapiens)
gaaatttttttgaaggtagaataaaagagataaaaagatggaaaatgagatagaaaagatatgaaaatgagatgaatatatgatatttaataattaattagttaaggaattgtagaaaaatggaaggggagaagaaaatggatatgtaattattaaagtaagaatttgttttttagaattgaagaatgtggatttagatggaagggttttatagtgtttaggataataaatgaagaaagatttagtttagggtataggattaaggtgaaattttttgtttgaggttgtattgtatataattttttaaaagtttgggtggttgtggggtatttttaaagaattgagagtaagaatggtattgagtgaggtgtagggtattttattttttttttttatagttgtgtatttttagattttgtattaggaagattttgaagattatttttttttttttttttttgttttttaattgttataatttttttattttattttttagttgggttttagtttttgtaggtttttagttttttttgggtttttttattttgttttgtttatttttatttttagggtagtttttgagtattgagttaattagggtttggaagaattttttttttttatttttggaggtgtttattatttttttttttttattttaagtgattttttgaggtagatgttttttgtttttaggtgaatgttgtattagtgtttaggtaagtttaggagttgatatttttttgtttagttatgggttttattttgtttttgttgttgtttttgggattagaaggtaaggtttaggaggagttgtagttttgggttttatatgtttagttttatgtttaggagtaatgtgttattgtgaatgttatatttatattagtagttgggttgggagatgtttttagtttttgtttaaaatttttattttttttttttttttaggttagggtatagttggtagtttttttgaggtgttgtaggtatttgtgggaagttttattttggtgtagtgttattataggttttaggatgttaaagtttagaaggtgtggtgttggtttttgttggaggggtgttagtttttggtgtttttagttgtggattgtagagttttagtgggtaggtgtatgttttttatagatttgggtgggggtttgttgtaggtggaaatggttattttgtaggaagaggatgttggtgagtatggttgtatggtggatggggttagggggttttagattttgtatagagtttttttgaatatattgtttttaggtgagttattttaggttagttattattttttagatttattttttttatttttgtttattgttagggtttatgggtttttgaggagtgggggtttttggggaggaggtattttaaggagatatttttttgatagttttgtagggagtggaaattaaattgggtgggaagtttgagataaattagttgaaaattattttttttttttttttatattattgtgtttttttataggaaggtatgttttttttattttagggatttggtttttttttttagtatttttaatatatttgatgttaatttattttttaattagaaatattttaaataatgttgaatttgagtgtataaaattagaattaatttttgtagtttttagtgttttatttttgtaatagtgggtttgatggtttaagaattatggaatttatattttaattaattttataagtttttataggttatttagtatgttttatttataagtaggtatatttagtgtttgaataattttaattttttttgttttaaaaatggaaaaatgttattaatattttaagttaatatttttgattttatttttagtattaaagatattgtttttgtaggttttatttttatagtttataatttttttagtatataagtatttgttaaaagaaaattttaaaatattaaaaatttgggtttttttttttaagaaagataggatgttttaaaaataaaaaatggttagttatttgaagtatagatagttatttttttttttttatggatattggttatttttttatttttaggtttttttttttttatattttatgtttaatttttaaataataaaattaagtagagtattttttttttttttgttttttgttttgtttgagatagggttttattttgttgtttaagttggagtgtagtggtattattggtttattgtaattttggttttttgggtttaagtgatttttgtgttttagttttttaagtaattgggattataggtgtttattattatgtttagttaatttttgtatttttagtagagatggggttttattatgttggttaggttggtttt

SEQ ID NO: 3545 - DNA, 2465 bp, Artificial Sequence
  chemically treated genomic DNA (Homo sapiens)
ttttaataaatatgatgattttaggtagtttttaggagtggaattgtatagtatttgtttttttgttattggtttattttgtttagtattatatttttaatataaatttttgggtttaagtaatttttttattttagttttttgagtagttggaattataggtatatatttttatggttggtagggttttttttattttttgtagagatgggggttttattaagttgtttaggttggttttaaatttttggttttaagggattttttttttttggttttataaagtgttgggattataggtgtgagttattatttttagttaattttttttgtttttaaggtgaaataatatttttttgtatgtatatattatattatgtttatttatttattttttagtggatatttgggttgtttttgtttttgggtttttgtgaatgatgttgttgtgaatataagtgtgttggtttggttttttttttttttaaatttgttttttgtttttttgtattgtgatggtttttttaaggtggatatataagtatttaagttttgatttatattttggagtaattttattgtagtttatattttagtttgtttatgagttagggatgggtattttatgattggtattgtttggttttagagaaaagtttataattttgggggttatagttgaggttttttatggttgtagggaatttgtttttattgtagttagattaatatttagtttagtttttttattagtttttgggaagtttatagaggtattttttataagagatgttattaaaagtttttgattgtatttagtttggaaattaggttttttatagatgataattagtttagaagatgtttttatgagtatggtgatagggtttaaatgtgtttgggagttttattttttttgattttttaatatgtaaatatttttaaaggttatagtaggaggttttattgaaattgaagagttttttttggttaattttttttttaaaaatgttatttggaaattaagtataattttgttaaaatgagtaaggattttatttaaatgaaattaaagagggttattttattttttttatttagtatttaaaataatttagagtgtgagaaattagattgtttagggttatatgtttttaaggattgttttttaatagttttttttttgtttttgttttggggttttagttttttttttttatttttggatttaagtttgtgtggtgttggttatattgattgatagttaggggatatgtatttattagtagggtgtgtttttttggtttttataatgaatgttggtttagttgttagtagtttttatgttaatgtttttttgttagtgaggttaggtttttaggtgttattggagttagaggagggtagttggtgtgtgttaagtagttattaggagttattttatgttaatgttttattttttgtatgttatagttatgtttagttgtaaaagtagttatgttttgggtttttttggtttttttttttttaagaaaaaaaaaaaggaaaggaagaaagtaattaaaggggtgggggggatttaaagtttgtattttagtatgagttattgaattaaagtttagtaattatatgtaaaataaattttttgtgagggtagtaagtttttgtgaggatggttgggattggttgtatagtaaagttaggagaggttttatgaggagaatagtatttagagtttaagggggagaatttttgttttaagtgggaatttggaatagaagtttttttgtttttagttgagaagatgattagattttagttgtttttggggaaagttggtatttatagttggatataaatatagtttgtaggaggaagagtgttagagtaagagatagagtagagatggttatggagatatgggtgtatatggggatatggtatagggaggattttgtttttgtttttatgaaggggaattttaaatgagttatgaagtttttttgattagggattaaggtattagtttgtgttagagataatatggttttgtggttttttattgttgttttgtgtggtgtgggtggtggttttttttttattgtggtaggggaagtttgaatttatttgattatagtattttgtagattgtttggtttttagttttattaggtataggtaatagatttagaattttgaaattattttttaaatttggtgatgtttattaggggttagaagaagaggaaagaatataattaatttatatagtagtttattttttaataaatttttttgttttaggtagtaatttgttttaggatatatagttaattagttggttaaggtgggtttagaatttaggtgttggtgttagggaggtaagaatggtatatggtaattggaatgtgtagttttttttatttatttattattggttttttaaagaaaatgtgaagtagtgt

SEQ ID NO: 3546 - DNA, 2465 bp, Artificial Sequence
  chemically treated genomic DNA (Homo sapiens)
atattgttttatattttttttgggagattggtggtgaataaataaaaagagttatatattttagttattatgtgttatttttatttttttagtattaatatttgggttttaaatttattttggttaattggttgattgtgtgttttggagtaagttgttgtttgagatagggaggtttgttgggaggtgggttattgtgtgggttgattgtgtttttttttttttttttgatttttgatgggtattattaaatttaggaaataattttagagttttgggtttgttgtttgtatttggtgaggttggagattaggtagtttgtagaatgttgtggttaggtgggtttagattttttttgttatagtgggagagaagttattatttatgttatgtagggtggtagtagggagttatagggttatgttatttttgatataggttagtgttttggtttttagttagaaggattttgtgatttgtttggaatttttttttgtgaaggtagggatagagttttttttgtgttatgtttttatatgtatttatatttttgtagttatttttgttttgttttttgttttgatatttttttttttgtaagttatgtttgtgtttagttgtgagtattgattttttttaggagtagttagaatttgattatttttttagttggaggtaggagaatttttgttttaagtttttatttggaataggggtttttttttttggattttgaatgttgttttttttatggagttttttttggttttgttgtgtagttaattttagttgtttttatggagatttgttgtttttatggagggtttgttttgtatgtggttgttgaattttgatttggtgatttatgttgaggtgtaaattttaagttttttttgtttttttaattgttttttttttttttttttttttttttttaaaaaaaaaaaaattaaaaaaatttaaagtataattatttttgtagttgaatgtgattgtggtgtgtaggaagtggagtattggtatgaagtggtttttagtggttgtttggtgtatgttagttgtttttttttgattttagtggtatttgggggtttggttttattgatgggagaatattggtgtgaaggttgttggtgattgggttagtatttattgtgaagattggagggatatattttgttggtgagtgtatgttttttggttgttagttagtgtggttaatattatgtagatttgagtttaggggtggaggagagagattggaattttggggtagaggtaggaggagggttgttagagagtagtttttgggggtgtgtgattttgaataatttgattttttatattttaaattattttaagtgttaaataaaaaaaataagataattttttttaattttatttaggtgaaatttttgtttattttagtaaaattgtgtttaatttttagatgatatttttgggggaaagattaattagagggagttttttagttttagtaaaattttttgttgtggtttttgaagatatttatgtattaggaaattagaaagagtagaatttttaggtatatttgagttttgttattatgtttatgagagtattttttagattagttattatttatgggaagtttagtttttaggttgaatgtagttaggaatttttggtagtattttttatagaggatgtttttgtgggttttttaaaggttaatgaggaaattgaattaaatgttaatttgattgtagtgaagataaattttttgtagttataagaaattttagttatggtttttaagattatgagtttttttttaaggttaggtaatgttaattgtggggtgtttatttttgatttgtgaataggttggggtgtggattatagtagagttgttttgggatgtggattggggtttaaatgtttgtgtgtttgttttagagaaattattataatgtagaagagtaggggataagtttgagaaaggaaaaggttaggttggtatatttatgtttatagtaatattgtttatagaggtttagaggtagaggtaatttaagtgtttattgaagggtgaatagataaatgtgatgtggtgtatatatatagaggaatgttattttgttttaaaaatgagagaaattggttgggagtggtggtttatatttgtaattttagtattttgtggggttagggagggaggattttttgaggttaggagtttgagattagtttgggtaatttagtgagatttttatttttataaaaaataaaaaaaattttgttagttatgggagtgtgtgtttgtagttttagttgtttaggaggttgaggtaggaggattgtttgagtttgggagtttgtattgaagatataatgttgagtaaaataagttggtgataaaaggataaatattgtatagttttatttttaagagttgtttagaattattatatttattgaga

SEQ ID NO: 3547 - DNA, 2459 bp, Artificial Sequence
  chemically treated genomic DNA (Homo sapiens)
tttggttaaggtggggtttaggtgtttgttttttttgagtttgtttaaggtttttatgttgtaagtattagatgttgaatttaggtggttttttattgttttggaggagaaggttgttaggattggttttttttttttgtttttttttttttttataaaaagaatgggtggtgttttgggaaaaagtttgttttaggatattttagtgtgtttattgttgttttatggttatatgtatggttgtttataaattgtatttttattgaggaagaaggtaaaaaatttagagagggtaaggaattatttattttgtatatgtgattatttggattgtttaaatttttttttaaaaaataagaattataatttaaagaaaatgttattttgattattgttagaaatttaaggtgtttaagtaaaatttaaaagtaaaattagagtttattttgttggaatgaatgtaatataaatataattttattatttttaattagaaattttggtttgttattattttggttggtggttttgtaatgtatgtttaaggggaaaaatattagatttttatatgttttttttttattttttttattttttagtttagagtataatttttagaagataatagaaggaagttagttttggggaaatttggtattttatttattgtaggaaggagaagaaatagtagaaatgggttagagagttttattagattaaatgttaaattatttttttttaaagatgtggtagttttttttaagtttttagagagagagagtgagaggagtagattttagagtagttaattgaagtaaatggatataagtgaggagggttttttgtgggagaatttttgagaggtagagggtgagttttttgagagtggtggttttgtagttttttttgatgttgagttgttattttgttggagtagtagtgtagtggttgtggttgtgtagtagtgttatgaaaatgatttattttaattagaatttttggaggtagagggagagttttttttagatgttattattattgttaagtagttgtattttttgttgggaaatttttttaggtaagagaatgtagagatgtttgtttgtagtttgggggaggatgttttattaggtgttggttatgaataggaggtttttttgggtgtgaggggtgtgttagggttgtttatttaggagtggtttgtgggaggattaggtgaggtttttaatggagtttttagtgtgtgtgttgaagaaggttttttggggttttgtaatgtttgtagttagttttttaagggtgtgtttgatttgttaggtgagtttttggttgagggtgtagtgtatatggttagttttgtgtaggtagattgtatagtttgttttaagggttatgtttattttgttaaggtgttaattttggatatttatttgagtaagattgagggggtataagtggatgagttggttgtgattatttttagagtggaagattgtggtgattgggatgatatggagaagaggtttagtggttgtaggttggggaggtggagggggttgtagaaatttattgatttttttggtgtggatgttgagttttttgagagtgttgttagggatgatgtggtgtttgatgatgaggtggtgttaaatgtggttagtgataatgttttggtggaaaagaaagtgaaatttttgtgggtagtttttgatgggggtgttgtttttgttgtgagtttagagtttaagtttagttttggtattaaagggtagttttgaggggagttggattggagtaaatagttatttttggttttgttttttatgaagaggaagggtaggagttgtgtttttgaggttgtgtttgttttgtttgttagtggtttttgggtttttgttaaggagtttttatttaagagggtgtttgattttagtttagttattaagggtattgtggttgagagtggggaggaggtggtgtgggttattttttgtgagtttttggttaagagtagtttgttgttgttggagattaagtttgagtataagaggggtttgttttttaattattttaatggttgggtagagggaggttgaagtagagagttgggtagagtggttggagtgtttggagtttttgatgttgatggtttgaagtttaggaattattttggtgtgggtaggttgatagtgattattaaagtgattttgtaagtagttgtgtaagttttggttgagttgttgtttgtatatgtgttgggggtttgttttgagaggtttggggtatttgtattgtggaagaaatgtttggttattgaatttttttttttatgttgaatttaagatagtgaagggttagtttatatagttaagatttaagatgatatttgtggtagtttttttagttaattttttttttaatataagatttaagtttaatgaatgtaaaaataggatatt

SEQ ID NO: 3548 - DNA, 2459 bp, Artificial Sequence
  chemically treated genomic DNA (Homo sapiens)
gatattttatttttatatttgttaaatttaaattttgtgttaaaaagggaattaattgaggaggttgttataggtgttattttaaattttgattgtgtaaattggttttttattattttaagtttagtatggaggggaaagtttagtgattagatgttttttttataatgtagatattttgagttttttagagtggatttttagtatgtgtgtggatagtaatttggttgggatttgtgtggttatttatagggttattttagtggttattgttgatttgtttatgttgaaatggtttttgggttttaagttgttggtgttagaagttttaggtgttttggttgttttgtttagttttttgttttgatttttttttgtttggttgttgaagtggttggggagtgggttttttttgtgtttgggtttgatttttggtagtagtgagttgtttttgattgggagtttgtgggggatggtttgtgttgttttttttttgtttttggttgtagtgtttttggtgattgggttgggattgggtatttttttgggtggggattttttggtgggagtttgggggttgttggtgggtggggtgggtatggttttgagggtatggtttttgttttttttttttgtgggggatgaagttgggggtggttgtttgttttggtttgattttttttggagttgttttttggtattggggttgggtttggattttgggtttgtagtggaggtaatgtttttgttgagggttgtttgtggagattttatttttttttttgttgaggtgttattgttggttgtgtttggtgttattttgttgttgaatattgtgttgtttttggtagtgtttttagggagtttggtgtttgtgttgggggagttggtggatttttgtgattttttttgtttttttgatttatggttgttggattttttttttatgttgttttagttattgtaattttttgttttgggagtaattatgattggtttgtttatttgtgtttttttagttttatttaagtagatgtttaaagttagtattttagtagggtgggtgtgatttttggggtgggttgtgtagtttgtttgtgtggagttggttgtgtgtgttgtgtttttggttggaggtttatttggtaaattagatgtgtttttggggggttggttgtgggtgttgtggggttttagggagttttttttggtatatatattgggggttttgttaggggttttgtttagtttttttgtgggttgtttttgggtgggtgattttggtgtattttttatatttaggaaagttttttgtttgtggttagtatttggtgaagtgtttttttttggattgtgggtgggtgtttttgtgtttttttgtttggaggaattttttggtgaggaatgtagttgtttggtagtggtggtggtatttgggaaaggttttttttttgtttttagaggttttaattggggtgaattatttttatggtattgttgtatagttatagttgttgtattgttgttttagtgaggtgatagtttggtgttagggggggttgtggggttattgtttttggggagtttgttttttgttttttggggatttttttgtggggagttttttttgtttgtgtttgtttgttttagttggttgttttgagatttgttttttttattttttttttttgggagtttaggagaggttattatatttttgggagagagtggtttggtatttgatttggtgggattttttaatttgtttttattgtttttttttttttttgtagtgaatagagtgttaagtttttttaaaattggtttttttttgttgttttttggaggttgtgttttggattgaaaaataaaagggatgaggagggaatatatgagaatttggtgtttttttttttagatgtatattatagaattattagttaaaatgataatagattagagtttttaattgaaaatgataaagttatgtttatgttatatttattttaataaaataaattttggttttatttttgaattttgtttaaatattttaagtttttggtagtagttagaatagtattttttttgaattataatttttgttttttaaaggaaaatttgaatggtttaaataattatatatataaaataaatagttttttgttttttttaggttttttatttttttttttaataaagatgtaatttataaatagttgtgtatgtgattatggggtagtagtaaatatattaaagtattttaaggtggatttttttttgaaatattgtttattttttttgtaggagggaaggaggatgaagaaaaaaaattagttttagtagtttttttttttagaatagtaagaagttatttgggtttaatatttagtatttgtaatatgaaaattttaagtaagtttggaggaagtaagtatttgggttttgttttagttgga

SEQ ID NO: 3549 - DNA, 2382 bp, Artificial Sequence
  chemically treated genomic DNA (Homo sapiens)
ataaagttattattttttattttttgagaagtttattattttttaataggttaagtgtttttttgtatatttaggggtttgtattttttttgtttagatttgtttttttttgtttattgggttttatgtgtttttatggttgggttaatgattaatatatagatatatttaaagtttttttttatttgtgtttttttttttttttttttattgtttgtttttgtttgtttattttattttatatttattattggtttttatttggggtttgatgttataaaggagtattttgaggttttgttttattttttttagtgtttgggttaattttttttaagtgttggtggtatatatttttttttttaggaggtttagaggtttgattatgttgttgttattgttgtattgaaggaaaagatttttatttaagaagatttgtgttttatattagggttgtttaggtttggataatgattttatagtgaagttgaagtaaagagagtgattatttgtgagataaagatgtaggtgaggtttaggataggggaagaggtttattagaatttgtgtttttgtgatttaagattttttggattgggttaggttagtagaggtggggtagttttattttagatttttttaattttttggatttttgtttttatttttttttgattgtttgggatgagatatttgatggtattagggatttttggggtgtatttagtgttaatggtgttaataggaggatttatgttataagtatttttagtaatatttattaagttttgaggtataaaatagataagttagtgtatgattttttgagatttaaattttagttgaatatatatgatatttaatagaaaggaaaaagaggtatttattataggatatatgttgaatttttgtggggttttagatgtttaggaaagtgatttggagtagaaggtggggggtagtattgtagaattgttttttgtgagttagtgttttgtttagggttttaggttgtggttttttatgaattgggtgtaatattttagggatttttttttttatgttatttttaagagtaggtatttatttgtttgaagtttgtatgaagttttatttgtttattttttattttttttttttttttttgtttttagttagtttttgtgtttaggatatttattaattatgatttttaaggttattagtagtaatagtagaaataaaagaaggtgtatagggttagaagttagggatattttttgtatattgtggagagtaataggtaggaagttgggtgtgtatatatttatttttattggtatggtgaagaaatgttatttaatagtgtgggtgtgggtattgtttaaattttttattttggaataattgaggttaggtttgtagagatttaattaaagaataattttgtgaagagagtgttttttaagtatttagaatataattatttattgaaaaataaaagaagatatttaaaaataaaattaattttgaataaattttttttttttttttgtttttgttgtttttgtaaaaaaaattttttttggtgtgagtaggatggttggaggttatgtgagttttttttttttttttttagtttttttttttttttttttttttgttttttttgtttttttttttttttttggtattttttgtttatttttgtatttttttttattgttattttttttttttttattgtttttaatttgtttaaattttttttttttaaatggttgagatttttttttattaagtatattttagtattaattaaattagttgtaaataggtagtaagtggtttattatgatagatgggttttgtgtgtgtgtgtgtgtgtgtaattgtaataaaatatattgagttatttaataaatatagagtgtttattatatgtattaggtattattatagatgttaattaatgaaattgaaatggttaggtttttatagtggtttatgtttataattttagtattttgggaggatgaggtaggaggattatttgaggttgggagtttaagattagtttgggtaatatagtaagattttatttttataaaaaaaaatttttttttattatattttaagttttgggttatatgtgtagaatgtgtagttttgttatataggtatatatgtgttttggtagtttgttgtatttattaatttattatttatattaggtattttttttaatgttattttttttttagttttttattttgtgataggttttggtgtgtgatgtttttttttttgtgtttatgtgtttttattggttaatttttatttatgagtgagaatatgtggtatttggttttttgattttgtgatagtttgttgagaatgttg

SEQ ID NO: 3550 - DNA, 2382 bp, Artificial Sequence
  chemically treated genomic DNA (Homo sapiens)
taatatttttagtaagttattataagattagaaaattaaatattatatgtttttatttataggtgagagttgattaatgagaatatatggatatagggaggggaatattatatattagggtttgttatggggtggggggttaggagaggggtaatattaggagaaatatttaatgtaggtgatgggttgatgggtgtagtaaattattagggtatgtatatatttatgtaataaaattatatgttttgtatatgtaatttaaaatttaaagtataataaaaaaaaatttttttttgtagagatggagttttattatgttgtttaggttggttttgaatttttggttttaagtgatttttttgttttatttttttaaagtgttgggattataggtatgagttattgtgagggtttggttattttagttttgttaattagtatttatgatagtgtttgatatatgtagtagatattttgtgtttattgagtgatttaatatgttttattataattatatatatatatatatatataaaatttatttgttatggtagattatttgttgtttgtttgtagttagtttaattaatattggggtgtgtttggtgagagaaaattttaattatttaagaggaaagagtttgaatgggttagggatagtgggagaggggagaatggtgatgggagaaaatataggaatgggtagggggtattaggaagaaagggaaaagtaaaagaggtagggaggagaagggaagaggaaattggaggaaaggagaaggagtttatataatttttaattattttgtttatattagagggggttttttttgtaggggtagtagggataggagaggagagagagtttatttaaagttaattttgtttttaaatgtttttttttattttttaataaatgattatattttgaatatttggaaaatattttttttataaaattgttttttaattgggtttttataggtttgattttagttgttttagggtaaagaatttgggtagtgtttatatttatgttgttggataatatttttttattatattagtgagggtgaatgtgtatatgtttagttttttgtttgttattttttatagtatgtgaagaatatttttgatttttagttttgtgtgtttttttttgtttttgttgttgttattaatagttttggagattatggttggtgagtgttttgagtataagaattggttgaggataaggaggagggagaaaggtagggggtaggtgaatggggttttatgtaggttttagataagtgggtgtttgtttttaaggatgatgtgaggaagaggatttttgggatgttatatttagtttatgggagattatagtttgaggttttaggtaaggtattggtttatagagggtagttttataatgttattttttgttttttattttaggttatttttttgaatatttgggattttataggaatttagtgtgtgttttgtgataaatgttttttttttttttttattgaatgttatgtgtgtttagttagagtttaagttttaggaggttatatattggtttgtttgttttgtgttttagaatttggtagatgttgttaaaagtatttgtgatatgaatttttttgttaatattattaatattaagtgtattttaggggtttttggtattattaagtattttattttagatagttagggagagatgggaatagggatttagaaggttgagggagtttgggatggagttgttttgtttttgttagtttggtttagtttagggagttttgggttatagaagtgtaggttttaatgggtttttttttttgttttggattttatttgtatttttgttttataggtggttattttttttgttttaattttattataaaattattgtttagatttggatagttttggtgtgaagtgtaggtttttttgaataaaaatttttttttttagtataatagtgataataatatggttaaatttttgggttttttggggaagaaggtatatgttattagtatttggggagaattgatttaaatgttgggagaagtggggtgagattttaggatgtttttttgtgatattaaattttagataaagattagtggtaagtgtggaatggggtgggtaaatagaggtaggtagtaagagaggggagggaagaatatagatggggaggggttttaggtatatttgtgtattgattattggtttaattatagaggtatatgggatttaatgggtaggaaagggtaagtttgggtagaaagaatatagatttttaaatgtgtagagaaatatttgatttattggaggatgatggattttttaaagagtggaggatgatggttttgt

SEQ ID NO: 3551 - DNA, 2498 bp, Artificial Sequence
  chemically treated genomic DNA (Homo sapiens)
gattattatgtttttatttgttttttatattaatgtgtttatagattttatgtatgggggttttattaaaatatggatttttatttaggaggtttggggtttgagattttgtatttttaataggaggtgaatttgttgttagtttatgaagtatatttttgagtagtgagattttttttagaggatattgagtgagttgaattaataatggtagtttttagtaatttagaatagtgtttggtttatataaatatagttattgttttatagttattaatttatttaattttttaatattattatgatgtagattttattatttttatttgatagtggaggaagttgaggtatagaggggttattaatataattagaggatttttgaagttttgagttttgttagtttttttttgattttaggaagggttttttaaggtttatatttttgattttatgtttattttttataggtttaggggtggttttaaggtggattgagtgagtttaattttttatttgtttttttttagttttgtttttgattttgatgatgatgggggtgtttttttattttttttagttttgttttttgtgttaatagtttttagttttgtgttgggttttgttttggttagaatttagttaattttaggggttgagtttagtatgttttagggtattttttattaattttgttttgttttttgatagtttgttaaggttttgatgtattttggggagtatgatagtaagatgtagttagatgaattttttggtatttttgatatttttttgtaggtttttttagaggtttggtaggatttagaggttatgaggaggaggaaggaggaggaggagtggtgggtgtgtatggaagttatggtgaggggtagtgttaggtttgggattgaggggagatgggtgttatttggggagaatatttttaaattggggtgtgtgggaggagggtagagattgaggaattgaggaatattataggggttggatgttagttttaggagagagaaatttttttttagtttgagggaagagagtggtgtgaagttgggggtttgtatgttttaggtaggaagaaagtggggttaatagatataggtaggtagtatgattatggtttaggagttagtttagggttggggggttgttttggttttagtgtttttttttgagagggtttttatttttggttttttgtttgtagttgaaggagtagagggaatgtgagtggtggtagtggtagtggaaggttttggttgtaggtagtttgttggaggagggaggagagtttgatgatttggtgttggttttgtgttttggggaggtttttgataaggatttatgtaagtttaagtgtagttgtaagtgattagggagttaggttttggaagttatttgggagtgggtaataaattggttaaattattgatttggggaattagttatataggaggttgggagatagggattggtgagaatggggttgagtggaggaggtggtgatatttaaattatttggtgtttggtttagagttttgggttgggttttgggatggggggttgtgtgtggttggattaggtgtttttttatgtttattttaaggggttttttttattttttttttatatgattttttttgtgttttggttttaggtattattttgaggttgttttggatggttttaggttaggtaattttaggttgaaggggttttgttttttattttttattatgggtatttatgtgttggtatagaatagttttagatttagattggagaggtttatagttttgtttagagtttttgtgtagtatggggagtaatgatggagggagtttttgagagggaatttggtgagggaatttagattttttttttttaaggggaggtttaatagaatattgatttgggggtaaattttttttttgaatgggaatagaggaggtattatatattttagttagattagttttggtaggttttagagaatagttaatgttggaaggatgatgtagggattaaagttattaggatagagtagtagtgtttgttttttatgttataagttttttggtttttttttgtatgttttaagtattttttttttttttttttatttttatttttattttgtttattaatttatagttttagaagatttattttgggtttttatagttatggtttattattaggtgtttgatgaatttggtgaggggtttaagatagattttatgtattattatattttatgttttttgggtattttttatgtttttattttttggatatttggttattgttgtgaagttagatagtgattttaaatgttgttttggagttttttatagttttttagtagagggtagtatttgaatgtttagttttattttatagttttttattttatataaattgtttaggtttttttattttttttttaatattagttttaaggtagaagttatagtagtttt

SEQ ID NO: 3552 - DNA, 2498 bp, Artificial Sequence
  chemically treated genomic DNA (Homo sapiens)
gaggttgttgtggtttttgttttgaagttagtgttagagaaggggtgggagggtttgagtaatttatatgaagtagagaattatgggatggagttaagtatttaagtgttgttttttgttgaggggttgtaggggattttaaggtaatatttgaggttattgtttggttttataataatggttaggtgtttaggagatggggatatgggagatgtttaaaaggtatgaggtgtggtgatgtatgaggtttgttttgagttttttgttagatttattaagtatttggtagtgagttatagttgtggaaatttaaggtgagttttttaggattgtggattagtagataggatggaggtgagggtagagaaggaagggaaagatatttaagatatgtagggagaggttagaggatttgtgatatgggaaatagatattgttattttgttttgatggttttggtttttgtattatttttttaatattgattgttttttggaatttattagagttgatttaattagaatatataatgttttttttgtttttatttaagaggaaagtttgtttttaggttaatgttttgttgagtttttttttgagagaagggagtttggatttttttattagatttttttttaggggttttttttattattgttttttgtgttatataggaattttggataaggttgtggatttttttagtttagatttggaattgttttgtgttagtatatgggtgtttatggtaggggatggggagtagggtttttttagtttggggttatttggtttgaggttatttaaggtagttttagaataatatttggggttagggtatagaaggaattatgtgaaggggagataagaggagttttttaaggtaagtgtggggagatatttggtttagttatatatagttttttattttaggatttagtttaaggttttaaattaagtattaaatggtttaaatattattattttttttatttagttttatttttattagtttttgttttttggttttttgtgtggttagttttttaggttaataatttagttggtttattgtttgtttttgggtaatttttagggtttggttttttgattgtttgtggttgtgtttgagtttgtataagtttttgttgaagatttttttagagtgtagggttgatattaggttattgaattttttttttttttttagtgagttgtttgtagttaggattttttgttgttgttgttattgtttatgttttttttgtttttttagttgtgggtggggggttaaagataggaatttttttagggagaggtgttgaggttagggtagttttttaattttgggttaatttttaggttatggttatgttgtttgtttgtatttgttggttttattttttttttgtttaggatatataggtttttagttttatattattttttttttttaggttgggaagaagttttttttttttggggttgatatttaatttttatggtgttttttagttttttagtttttgttttttttttatatattttagtttgggggtgttttttttaagtagtatttgtttttttttagttttaggtttggtattgttttttattatggtttttatgtgtgtttgttgtttttttttttttttttttttttttatggtttttagattttgttgggtttttgagaaggtttgtaagaaggtattaaagatgttaaagaatttgtttggttgtattttgttgttatgttttttgaagtgtattaaggttttggtgaattgttaagggatagaataggattggtggagagtgttttggagtatgttgggtttagtttttgaggttagttgggttttagttagagtagagtttagtgtaaggttggggattgttggtatagggggtagggttggaagaggtgagaagatatttttattattattaggattagagataaggttaaggagaggtaggtaaagagttgggtttatttagtttattttagagttatttttgggtttgtaaggggtaggtatgaggttaggggtatagattttgggaagttttttttgaggttaggaagaggttggtagaatttagaattttaaagattttttagttatgttaataatttttttgtgttttagttttttttattgttaaatgggaataatagaatttatattatagtggtgttggggggttagatgagttggtggttataaaatagtggttatatttatataggttaggtattgttttgagttattgagagttattattgttaatttaatttatttagtattttttaagaaagattttattatttaaaagtgtgttttatggattagtagtagatttattttttgttagaaatgtagaattttagattttaggttttttaaatgagaatttatgttttaataagatttttatatatgaggtttatggatatgttagtgtgagaagtagatagaggtatggtaatt

SEQ ID NO: 3553 - DNA, 2351 bp, Artificial Sequence
  chemically treated genomic DNA (Homo sapiens)
ggttttgtttttttatgttttagtttttttattgataaaagaggtgataattatatttattttatagggttgttgtgaagattgaaataataagggtatggggtgttagttattattattttttagaattattattttttagattgagatttttttgtagtagatggttgatattttaaagttttgtttgttttttatgttataatatggttataagttttttgatagtagggagtatattagtttttgttttttaatatttaagattggtatttagtatatagtagatatttaataagaatgtgttgaatagagttagatagagttgaattttttttttttttgaggagtattttttatttttttttttatttttttttttttttttttttttttttttgtttgatattttttttgtttgtttttttttttattatttttttttttaattattatatttttttttatttttttttttaattattttttttattttttttggggttttatattgatatgtgtgtttttttttttggttgttttatttttagagtatgtttttattttgttttaaatttgtttttaggtttagtttttttgggaggttttttatggtttagttttgaggatattgaagtattagggttggatgggagttttattatttgttttattttagtttgtttattttttagatgaagatgttaaggtttaaagtattaagaaggttgttttatggttatgtggttaatttgttttagagttaggattagaatttgggtttttttatttttggtttaatgttttttatattatggtatttatagaggtagtggtagaaatatagtaggagattattgaatgtttgttagataaatgaatgaatgaatgaatgaatgttattggaagaggagagttatttagataatattatttgtttttttgtagttttttttgatttgttttatttttgttttattttttatatgtttggggtttttagaggaggtttttggtattgttagttttgtttgtgatttttttattatttttggggagttagtggtttttttttttttttttatttttgtgtgtataaaggttatttttattgttttttgtggaaatatttttagaggattgagggtattttttgagaataaagtttttttttggggagtgttggttagggtttttgttattgtggtttgttgtttgtttagagttttgtgttttgataagaataaagtgattttgattggaattttgtagtttgttgttggttttgtttgtttttttgtagatgtgtagttttattttggttttttttttttttaaggaaaggggagttgtttttaattgatggtttttttttaaagtttagttttttttttttttatgttttttttttgtattttatttggtattttttaaatattatttgttgttgtagttttttgttgaattgttttggttttaattttattttttgtaattggagtttgaataatgagttattttataggaagattgatttgggtattagggtattatttagtttgttattataatagttaattttggttatatgtttagttgtgaaggggaaatgggttagtttgttggagttttttaaagtatggagttggtgagtagggggatggggtattgggttgaggggtagaggtggtagatgggtaggaggaggggttttggtttgttttagtaaaaatgtttttatgtttataatatgatattgtgaaagaaattgtaaggattgaaaatggatattatttttttttaaagggataagaagagtagagtttttaggttgtagatgttaggagtggaaaggttttttttaaataattgagtgagtgagttttaaattaaagagtattttagatttattaatattttaggatgataaaatagtggtgtatttttatttgttatttttatattagatttagttgtagaaattttagtggtttttttatttattttttttatagtattttttataatttaatatttttttttttatttattttaagtgaaattttgtttattttttttttaattagattgaaaattatatgagggtaagaattatgtttatgttgtttatttgtttttttagggtttgagatagtgtttggtattttatgatatttaatagatatttgttgaatgaagtgaatgagtattagagggtattggttttatggatttgggtgtgggggataaggtatattatgtgtagtggtttttgatttttttgtatatgtatggtggtttttgattttttttatgtttatggtggtttttgatttttttgtatgtgtata

SEQ ID NO: 3554 - DNA, 2351 bp, Artificial Sequence
  chemically treated genomic DNA (Homo sapiens)
tgtgtatatgtagaggagttagagattattgtgagtatgaggggagttagagattattgtgtgtgtgtaggggagttagagattattgtgtatggtatgttttgttttttatatttagatttatgaaattagtgttttttgatgtttatttattttatttaatgaatgtttattgagtgttatgaagtgttaggtattgttttaggttttggggaaatagatgagtagtatagatatggtttttgtttttatgtagtttttaatttagttgaggaagagataggtgagattttatttaaagtaaatggaaagggaagtgttgggttgtgagaagtgttatgagggaaataaatgggggagttattgaaatttttgtagttgggtttggtatgggagtggtgagtaaggatgtattattattttgttattttgaaatattggtgagtttggaatgttttttaatttggggtttatttatttagttatttaagagagatttttttatttttggtatttatagtttgaaaattttgttttttttgtttttttgaggaagggtaatgtttatttttaatttttataattttttttatagtgttatgttgtgagtataaagatatttttgttgaagtaagttagaatttttttttttgtttatttgttatttttgttttttagtttagtattttatttttttatttattagttttatgttttagaaagttttagtaggttggtttattttttttttatagttgagtatgtaattaaaattggttgttgtaatggtaaattaaatgatgttttaatatttagattaatttttttgtgaaataatttattatttaggttttaattgtagggaatggaattaaaattagaatagtttaataaggaattgtagtggtagatagtgtttgggaggtgttaggtgggatataggagaaaggtatggagaaggagggggttaggttttggggaggggttattagttgaagataatttttttttttttgagaggagaggaggttagaatggggttatatatttgtaggaaaataggtagagttagtaataagttatagggttttaattggaattattttgtttttgttaaaatataaggttttgagtagatagtaagttgtaatgataagagttttggttaatattttttaggaagaggttttgtttttagagaatgtttttggttttttaaagatatttttatagagaataataaaaatggtttttatgtatataggagtgagaggagggagaaaggttgttgattttttaggggtggtggaagggttataggtaagattaatagtgttaaagattttttttggggattttaggtatgtggagggtggggtaggggtagagtaggttaaaaggagttgtagaaaaataagtagtgttgtttgagtagttttttttttttaatagtatttatttatttatttatttatttatttaataagtatttagtggttttttattatgtttttgttattgtttttgtgaatgttgtaatgtaaagagtattgggttaagagtgggaaagtttaggttttaattttagttttgggataagttggttatatgattgtgaagtagtttttttggtattttggattttggtatttttatttgaaaagtgagtagattggaatagaataggtagtgaagtttttatttagttttgatgttttagtgtttttaaagttgagttatgggaggttttttaggaggattgagtttggaggtaaatttggagtagaataggagtgtgttttggagatggggtagttagggaaaggggtgtatatgttagtgtgaagttttgaagagagtggggaaaatggttgaaagaaagagtaagagggagtataataattagagagagaggtggtggagggaaagatagatagagagagtgttagataaagagagggaagaagggagagagggagatgggagagagaatggaagatgttttttagaagaggaaagaatttagttttgtttggttttatttagtatgtttttattgggtatttattatgtgttaggtattagttttaagtattgaggaataaagattaatatgttttttgttattaaggaatttatgattatattataatatgaaaaataagtaaaattttaaaatgttaattatttattgtaaggggattttgatttagaagatagtaattttggaaaatagtaatagttaatattttatgtttttattattttaatttttgtagtaattttataaggtgggtataattattattttttttattggtgaggaaattgaggtatgggggggtaaggtt

SEQ ID NO: 3555 - DNA, 2487 bp, Artificial Sequence
  chemically treated genomic DNA (Homo sapiens)
gaggtgggaggattgtttgagtttaggagttttaggttatagtgtataatgatgattttattggtatatagatgaaaaagaaaaagatatttgaaataaaaataaaaatatagtgtataatgattaggtttgtgaatagttattgtattttagtttaggtagtatagtaagattatattttttatatgaaattttattagaatgaaatttatggtttattatatagatgttgtttatttgttgtaggaaaaattgaattatagatgatttttaaaattattagagtaaattatttaatttatttgtgtatatatttttagattttttatatatgttgtaaaaaaaatagattgtattattttgttggttttttaagttgttttttgtaagtaatgtattgtgagtatttttttatggttataattattatatataaaagaaaaaaataggttttataataaatagttaaaagatattttgatttgaaattaatgaagaagggttttttggttttgtttttgtattttttgtataatgttgaaattggtaattttgtagtaaatattaatattttttgaggatttgttgaagatgaatgtgataaaaaataagaaattttattttttttattatatagttttaattaatattgttggttttgtttgagattaagtaaatgttggttttagtgtttaagtttttttttggggttttatggttttgggtttggtatttttgttgggtattttgtagggtttttgagatgtgttgtgatttatgggattttatggaagtttttttttattgtaagttttttggaggtagggaaaggagttgggatttgagtttagttggttttaagagaagggtggtggtttgtatggtgtgggtggttttgtttattgtagttggggagatgtaggttggttgtttgggtgtggtggtgggaggggttgtgggtttgtggggtggggtggtggttttgtgttgttggatttttatggagatgattttgtttttgttttatttttttttggagttgtggtttgagttggtgtatttgatttttattgtgtggttttaagaggagatagttgttattgtattgggttttatagttattttttagaggtaaagtttgtggtttttgagttgttagttttttttttggggttgtttggggtatattgtttgggttggtttagttttttagtgtagttgtttaggaagattttaagtagtgttgaggggtgtagggttttttttttgtgattttggagttttttagtagttttggaattaattaagattttgaagaggttttggggagaaataaaatttatgtgtagggtagggtttgtattgggttatgttaagtaaatttttattttttttagagaattgatttgggattgaagtaaagtttttgaatattttggaaaatgttgatttttataggtttatattaattgtttttttttttttgatagttttttttttttttttttttatggggtttaaaaatgtagggagtagggtgggggttgggttgggggaatgagggaggaatataaaaaatttattgtgaatataggttttggttataaggatagttttaagagttaatatgttaagatttgatgagtaggataaataaaatagtggtattttaaaatattgatttaaaaatattgatgttgtgtttattaataaattttgtatatgtattagaatataatattttgatattattggtgttaaagtttattgtaatttatgtaattgtatttaagtttgttaaagtttgttttgtaggaattgatatttgtgttttatagaaattttaaaaattatgttttataaatatttattttagtgggaggaagaagggttaaggatttggaagttttatagtaatagttgtattttgtttgttatagttttagttttatagttttaaatttataaattagtgagtatatttattatttgaaaatattagtataagtatggtattttttattattgtttgtaagattaatagtttaggtttttttaaaatatgttattatttttattatttattgtttagtgtgtatttaataaaaattatatattggtatgtagttttatatgttttaaatgtgggatatttaatttaattggaattgttttttatttttgtttttttattaattatatttattttttttttatttttgtttttttgtgtgatttttagaattagatatttttttggaggtatatttaaggaagtaaatttttgataaataaaggaattattgtataatttgtatgtgtgaattgtagaagtatgtgtatgtaggtatatatttttgttgaggagtagtgttttaatttttaagttattttgtttattgtagtggagaaggattagattaatttgtatttttttagttgtataatagataatttgtggaaatatagttaattgatattattgtt

SEQ ID NO: 3556 - DNA, 2487 bp, Artificial Sequence
  chemically treated genomic DNA (Homo sapiens)
agtaatgatgttaattaattgtgtttttataggttatttgttatatagttggagaaatgtaagttagtttggtttttttttattatagtagatagagtggtttagaaattaaaatattgttttttggtagaggtatgtatttatatgtgtgtatttttgtaatttatatatgtaaattgtgtaatgatttttttatttattaaaaatttatttttttaaatatgtttttaaaaaggtatttggttttaaagattgtataaaagaatgggagtagaagaaaagtaagtgtgattggtgaaaaaatagaaatgaaagataattttagttgagttaaatgttttatatttagggtatgtaaaattatatgttagtatataatttttattaagtatatattaagtaatggataatgaaaataatggtgtgttttgaggaaatttgggttattgattttataggtggtgatagaaaatattatatttgtgttggtatttttaaatggtggatgtgtttattgatttataagtttaaagttataaaattaaagttgtaataaataagatgtaattgttgttataaaatttttaagtttttaattttttttttttttattgaaataagtgtttgtagagtatgatttttgaggtttttgtggagtataaatgttagtttttgtagaatagattttaataggtttggatataattgtatgggttgtagtgaattttaatattaatgatgttaggatattgtgttttgatatatatgtaaagtttattaataagtatagtattggtatttttaaattgatattttaaagtattattgttttatttgttttgtttattaaattttagtatattaatttttagagttatttttataattaagatttatatttatagtagattttttgtattttttttttatttttttaatttagtttttattttattttttatatttttggattttataggaggaaagagggagagaattgttagaaggaagaaggtagttggtgtgaatttatgaaaattagtgttttttaaagtgtttaagaattttattttgattttaaattagttttttggaggaggtaagagtttatttggtatggtttgatgtaaattttattttatgtgtggattttgtttttttttagagtttttttagaattttggttaattttagagttgttaagggattttagggttgtggagggagggttttgtgttttttagtgttgtttagggtttttttgggtgattgtattgggaaattaagttggtttaggtgatgtgttttgggtggttttaagaaaaagattagtggtttagaagttatgggttttatttttaggaagtggttatgaggtttggtatagtggtggttgtttttttttggaattgtgtagtgaaaattgagtgtgttaatttgggttgtagttttggagaggggtggggtagggatagggttatttttatagggatttaataatatggagttattattttgttttataggtttgtagttttttttgttgttgtgtttggatggttaatttgtatttttttagttgtagtgagtaaagttgtttgtgttgtgtgagttattgttttttttttgaggttagttaggtttgggttttggtttttttttttgtttttagggagtttgtggtgggagaaagtttttgtggggttttgtgggttgtggtatgttttggaagttttgtgaggtgtttagtagaggtgttagatttaaggttgtgggattttaagaagagatttggatattgaagttaatgtttgtttgattttaaataaagttagtgatgttaattaaggttgtgtgatgaggaaagtggagttttttattttttgttatatttatttttagtagatttttagaaaatgttaatatttattgtagaattattaattttagtattatataggaggtataaaaataaaattaaaaaatttttttttattagttttaggttaaaatgttttttaattatttattgtgaagtttgttttttttttttgtatgtaatagttatggttatgaaaagatgtttatagtatattatttataaaaagtagtttagaaaattagtagaatggtatgatttattttttttgtaatgtgtgtaagaaatttgggagtatgtatataaataggttaaatggtttgttttggtagttttaaaaattatttgtaatttaattttttttataatgaataagtaatatttatgtaataaattataagttttattttagtaaagttttatatgagaaatgtgattttgttatgttgtttaggttggagtgtagtggttatttataggtttggttattgtgtattatatttttatttttattttaaatattttttttttttttatttgtatgttagtaaaattattattgtatattatagtttagaatttttgggtttaagtaatttttttgtttt

SEQ ID NO: 3557 - DNA, 2392 bp, Artificial Sequence
  chemically treated genomic DNA (Homo sapiens)
gagtatttgttttgtgatagtgtaatgttgggtgtttgtggttgtgttgggaaaatagatgtgtatatatattttttatgtggtgggtttagagtgatatgaaagtttttgagggtgttgtgtggggttttgtgggggttttttagaggtggtgggagtgggaagggaaggatagttggagggatgagggtttggtttggttgtggggtgggagagaggatgggtgggatgggtagtggggttgtaggtatttgagatgagatgttttgttggagagtgaggttttttttagttagaaaatgggagttattgaaagtttaaaaataaagaaattatatgggtagtttttaattttggtgagtttgattttggtgagttttgtgtggtaggagatgggttggtaggagtgggaggaaggtttttgtgagtgattattaggatatgaaggtaggaagtttagatatgttgatttttttatatgaagtagaaaggagggaggattttatttttaatagagtagtgattttgaagttatggatttgataaggattttagtagagttgagggaggggggaatttagttgtggtttagatgagtattgtaggtggttgagaggggttggggtgtaattaggggatgttttgggatggaatttagtagatagtttgggttggagatagggtttgggaatgggggtaggaaatggttaggtattgtttagggagagtttgtggtgggagaagaggtgaatttttgtggtgtggggagttggtgttgaagagaaaggtggagttgggggatttttatagaagatatgggtttggtgggtaggagggtattttggaattagggggtagagttgttgggaagaaggagggtttgtgttgtgggaggaggatgaggtgtaaagtttaggaaggaaggatttggagttgggttggagttttggagggaggagagaggggaggttggagttggagtgtttattatggtgattgttgtttttattaggtattgtttaggggttgtttatttttttttagtttttatgggggatgttgtgatttgataggtgaggagagtaagttttttagataggttgtttttttaaggttgtgtagtttttataagtttaaatgtgatttgtgttgggtaattttaaaatattgttgttgttagttttaggtggttttgtagggaggggtttttggtgttttttgtgaattggaattggaggttgattttttagagtgtgagaagttggtgggtttggtggttggggatgtgttgtggtgtgtgtgtattgggttgaagatttgttaggttggatgtttttgttgtgagtggtgtttttagaggttgtggttttttgtagtagttttgggtagtttgtagtagggaaatttttggttgagtgggtttagggggagttttggtggttaagtttgttgtgtggttgtagtagaattttgagtttgggtgagggggaagagtagaagttttttttttatatttttggaggttgggggtgtaagattaaggtgttggtgtttttggggttttttggttgtgtttttggaggttagagggtgttggaggttgtaggaagttttttgtgtgatggttttgattttttttattgggaggagatttggagttagttattttttaatattattatgttggtaatgtttgggttttggaggggatatatttgaattttagttaggtataagtaggtaaggtagagaaatgggggtgtagtttttgggggtttgagagttttagaggagttttttatattttagtgtttagtttttatttgttatggtatttttaggatgggaagggtttttgttgatgagttttttttgttggtatagtttttttttttttttggaagttgatttgagtaagtagttggtttatattatattttttattattttttttttgggttttttttttgattgtttggtatatttgttttgatatttatttgtaaattgtaaggttaggtattttggggtttttttttgattgtgtttttgatattttatagagtgtttgtatgtgagatgtttggtggtttgtgattttatgatggttttgttttatttttgttatgtagtgtttttgtaaatttattatgattttattttgttatgtggtatttttgtagttttttggagttgttttttttgaggtttttagtgattttttgagggttggttaatgtaaggtgaattttagttttaaatttttttggggttagaattttttgttagatatgtttatagtttttgtaatttttttttgatgttatttgttaattggtttgtataatgagttatttagtaaatggtgatgtgttttgtttttgttatagtt

SEQ ID NO: 3558 - DNA, 2392 bp, Artificial Sequence
  chemically treated genomic DNA (Homo sapiens)
gattgtagtaaagatgggatatattattatttattaagtaatttattatgtaagttggttaataagtgatattaaggaaaagttgtaggagttatgagtgtgtttaataggagattttgattttaggggggtttagggttggaatttattttatgttaattaatttttaggaggttattgaggattttaaggggagtagttttagggggttgtagggatgttatatggtagggtggggttatggtggatttgtagagatattgtatgatagggatggggtgaggttattatggagttataagttattaaatattttatgtgtaaatattttgtgaggtgttgggggtatggttaggaagaggttttagggtgtttggttttgtggtttataggtgggtgttggggtagatgtgttaggtaattaaggaggaggtttaggaagggggtagtgaggaatgtggtgtgagttgattgtttgtttaagttggtttttggggaaagggagaggttgtgttagtaagggggatttattggtagggattttttttattttgaggatgttatggtaggtgggaattgggtattgaggtgtggaaagtttttttgaggtttttgagtttttagaagttgtatttttatttttttgttttatttgtttgtatttggttgaggtttgaatgtgttttttttaagatttaggtgttgttgatgtgatagtgttggaggatgattagttttaggtttttttttagtgaaggggattaaggttgttatataagaggttttttgtggtttttagtgttttttagtttttaagaatatagttaggaggttttggggatgttggtgttttgattttgtatttttagtttttagaaatgtgggaaggaaatttttgttttttttttttatttaggtttaggattttattgtggttatatagtagatttggttattaaggttttttttggatttatttgattagaggtttttttgttgtagattgtttagggttgttgtagagaattgtggtttttgaggatattatttatggtagggatgtttaatttggtaggtttttagtttgatatatgtatattgtagtatgtttttagttgttaggtttgttagttttttatattttgaggagttagtttttgattttaatttatagaggatattggggatttttttttgtagggttatttggagttgatggtggtagtgttttggagttgtttgatgtaggttatatttgaatttgtgggaattgtatggttttgggaaaatgatttgtttaggagatttgttttttttatttgttaaattataatattttttgtggggattgaaggaaaatgggtagtttttgggtagtgtttggtgggaatagtggttattgtggtggatgttttaattttggtttttttttttttttttttttaaggttttggtttggttttaggttttttttttttgaattttgtgttttgttttttttttatggtatgggttttttttttttttagtagttttgttttttggttttgggatgtttttttgtttattaggtttatattttttgtaggagttttttaattttatttttttttttaatattagttttttgtattgtagggatttgtttttttttttgttataaattttttttgggtaatgtttgattgttttttgtttttgtttttaaattttgtttttagtttagattgtttgttgggttttgttttagggtgttttttggttgtattttggttttttttaattatttgtggtgtttgtttaggttatagttgagttttttttttttttggttttgttgaggtttttattgggtttgtggttttagaattattgttttgttaaaagtggggtttttttttttttttgttttatgtggaaggattagtgtgtttgagttttttgtttttgtgttttgatggttatttatggagattttttttttgtttttgttagtttattttttgttatataggatttgttgaagttggatttgttgaagttggaggttgtttatgtgatttttttgtttttaaatttttagtggtttttattttttggttgagaggggttttgttttttaatagggtattttattttagatgtttgtagttttattgtttgttttatttgtttttttttttattttatggttaggttaggtttttatttttttggttatttttttttttttatttttgttgtttttaggaagtttttgtaggattttatgtggtgtttttgggagtttttgtattgttttggatttattatatggagaatgtgtgtgtgtgtttgtttttttagtgtggttgtgggtatttagtattatgttgttatagggtgggtgttt

SEQ ID NO: 3559 - DNA, 2475 bp, Artificial Sequence
  chemically treated genomic DNA (Homo sapiens)
tggttttggtaatttaatttgtatgggttgtttagagtagggtttttgagggttttgatttgtttgttttttgttgagtaggattaggttttagagagagtaattataggttgggtgtggtggtttttgtttgtaattttagtattttgggaggttaaggtgggtggattatttgaggttagaagtttgagattagtttggttaatatggtgaaattttgtttttattaaaaatataaaaattagttaggtatgttggtgtatgtttgtaattttagttatttgggaggttgaggtaggagaattgtttgaatttgggaggtggaggttgtagtgagttaagattgtgttattgtattttagtttgggtgatagagagtttattttaaaaaataaataaataaataaataaaagagagtaataattttttttagagtagtagttgttattgggatattggaagtagaggttgtaatttttatttatatttagggttttttttttttttttttaaaaataagaaattaattaaattttaatatatatatttataatagtatatgtatgtgatttgtaagtaaatatgtatgtattagaggtatagttttaaaaatttgttattgatagtagtgtatgtttaaaaatgtttggggattgatttagaaaatgtgttttaagatattaatttatatttaaaattattagtttatttgatgtttagtagaatggaaaataaatgtgtaatatgttatatatggtgtttatattttagttgtttgttttttttttatttttatgtttaatagtttttatgtttattttaggtttggagtatgatgttttgtatgttaatttaaaataaattttttaaggaatttagatttgtaatgtaatgattttgaatgtagattttgggttattattttttgggaatgtttttattatattatgaaattgtatttattgttgtttatatatatatttttgataattaagtaaatttttgaatattttttttaagatttaaaatagtaaaatgaaatttaatattattataaagttattttttggtaaataatttaaggaagataatttttgtatgtattttttttttaatagtttaggttaggtttttatatatagttttttttaaaatatttgagtgtaattatttagtaggttattggttgtaattttgagaaataaagtagtataatgtgatttgtatagagaatgattttatttattatgtttttaattatttatatttgttttaaattaaaatgttttggttgaatgtaggtatttgaaggaaggtttattttagtttagttttgtttttaatgtttgtgatatatagagtatgtgtgtttagggagaggttgtgtttagtgaagtagttgggtttttatttttatagggtgatattttaataggattttagttttttggggagttattttattgtgttattgttgttgttattatgtagggtaatttttttttttttttatttatgattttattttggtttgggtatttttatttgttttgtttattgtttttttttgggttttttgttttttatgagaattattaagtaaaataagaataaaatgagttttgtaaaataaggtattttgtggatatttgtgaggtaaaaagttgttttttagtagtttgtggtagagtaaattttttttggtttgattattgatttatttgttgttttttgatgggttgttttgaggggttgtgagggtaaggttggttaggttagttgttttgatttattatttgatattgatgttttatttattttttttattttgggttatgatataaatattaggttttgttttttttgttgattagtgattggttattagttgagaagtttgtttttatgaaattttgtttttattgaattttagaatagttttggttaaagttgttatataaaaaattaaattttttgaatatgttagttttgtgttgagattattggtttattttttggttgtataaaattagtttgttttatttattagggggttagtttggattttaagtagatttgtagagaggatttggtggatatttagatgggtatataaatgtgtttaggaaatgttgagtaaatatgaatgatttgtttttttagggttgatttatttatggagttaagagaatatgttttgtttatgagtaaggatatttttttttttataaatatagattaattttttttagtgaaaatattaaagtataaaatatatttttagttttaaggatgatattaattatagaatttatgattatgtaagtttttttttttattataagtattaaattaattttggtttttaattttaaaatgtataaaattaattataaattaggttttatttttattttgggatatggaattaagtatattagaattgtagagatatatgtggttatgtttaattt

SEQ ID NO: 3560 - DNA, 2475 bp, Artificial Sequence
  chemically treated genomic DNA (Homo sapiens)
aggttagatataattatatgtatttttataattttaatgtgtttaattttatattttaggataggaataaagtttaatttatgattgattttatatattttagggttaaaggttaaagttaatttaatgtttatggtaggaagaaaagtttatataattatgaattttatgattaatgttatttttgaaattaaaaatgtattttatgttttgatgtttttattggaaaaagttgatttatatttgtgagaaaggaagtatttttgtttataggtaaagtatatttttttagttttataaataaattaattttaaggaaataggttatttatgtttatttagtattttttgaatatatttatgtatttatttaaatgtttattaagttttttttgtaaatttatttggaatttgagttgattttttggtggatgggatagattggttttatgtagttagaagatggattaataattttagtataaagttggtatgtttaagagatttaattttttatataatagttttagttaaagttattttaggatttagtggaagtagaattttatgaggataaattttttgattaatggttaattattaattagtagggagggtaaagtttggtgtttgtgttatggtttggagtggagggggtgagtggggtgttagtattaaatagtaaattgggataattagtttggttagttttgtttttatagttttttagagtagtttgttaggaggtagtagatggattaatggttaagttaggggggatttgttttgttataggttattggaaagtagttttttgttttatagatgtttataaaatgttttattttataagatttattttgtttttgttttgtttgatggtttttgtggagagtagaaaatttaagaggaagtgatggatagggtaggtggaaatgtttaagttaaggtaaagttataggtgggaaaggagggaggttattttgtatagtagtagtagtagtggtatagtgggatggttttttagggggttaaggttttattgagatattgttttatgagaatgagaatttagttattttattgaatgtagtttttttttgggtatatatattttatgtgttataagtattgagagtagaattagattgggatgagtttttttttggatgtttgtgtttagttaaagtattttgatttgaggtagatataaatagttggagatgtagtgggtaaaattattttttgtataaattatattgtgttgttttgttttttagggttataattgatgatttgttaaataattatatttaagtattttggggagaattgtatataggaatttagtttgaattattaagaaaaaaatgtatatgggagttgttttttttaaattatttgttagagaataattttataatgatattgggttttattttattgttttgaattttagaagaggtgtttagaaatttgtttaattattagaaatatatgtgtgaataatagtgaatgtaattttatgatgtaatggagatatttttaagaaataatagtttaggatttgtatttaaaattattatattataaatttaagttttttaggaagtttattttgaattgatatatgaagtattatattttaggtttgaagtagatataaggattgttagatatggagataagaaaagaataagtagttaagatataaatattatgtgtggtatgttatatatttattttttattttattaagtattagataaattagtggttttgaatataaattaatattttgaggtatattttttaggttagtttttaaatatttttgaatatgtgttgttgttaatgataagtttttgaaattgtatttttaatatatgtatatttatttataaattatatatatgtgttgttataaatatgtatgttaaagtttaattgattttttatttttagaaaaaaaaaaaaaaaattttgaatataaataagagttatagtttttatttttagtattttagtggtaattgttgttttgggagaggttattatttttttttgtttatttgtttgtttgttttttgagatggattttttgttatttaggttggagtgtagtggtgtaattttggtttattgtaatttttattttttgggtttaagtgatttttttgttttagttttttgagtagttgggattataggtgtgtattagtatgtttggttaatttttgtatttttagtagagatagggttttattatgttggttaggttggttttaaatttttgattttaagtgatttatttattttggttttttaaagtgttaggattataggtagaagttattatatttagtttataattattttttttggagtttagttttatttagtggaaggtaaatagattaaaatttttagaggttttgttttgaataatttatgtgggttgggttgttagaatta

SEQ ID NO: 3561 - DNA, 2437 bp, Artificial Sequence
  chemically treated genomic DNA (Homo sapiens)
tttttaggtattgaagaagtggttgtgaatgaaaatagataaaattagattgagataatggtatgtaaagtgtgatatgaatatgggggttaggtttgtttaatgtttttgttatttttatatgggatgattttaataagatatttatagttaagttgttagaaataaaggtttttttttttttttttagttattttaataaatttgggttatttattattgttgtttagtttgtattgagtagttttagttaagtgagttatggttatattgaaatatttatttggttatgaattgagtgaaggtgggaggttttttttgttaatttttttttttttttaatatattttttggtaatttttatgtggaaaattttattttattataggtttttttttttttattttttagaaggtggtggttttatttaggagagggttgtagattggggttagttttagggtttttgtggtgttattttttttttgtgagggtttttgttgtgttttggtttgttgttgggaggtgttgtggtattggtgtaggagttgttggtaggggtggggtggggttggtgggatggggtagagggttttgtggtggtggatgtggtgggtttggttataggtaatttgtaggagttgagagtgttgtttggtgtgtgggtggttggaggtatggtgttgggtggtgttgaggttttggggttgttggagttagtgggagttagtttttgtttttgttttttgttttttattgtgttgttggttttggtttttgtggtgtggatgtttggtgtgggagagaaaggtattaggtgattttgttggttttttgggatttttgtttatattggggtgggtgttttaggttggggaggatgttgttgggggaagggggtgttgtttttttggtattttaggattgttgattgtttgtggaggagatttggatattgtgttttgttttttggtttgtggtttttgaaaatgtttggtgtgagggggtttttttggggtgtttttttttttgtttggtattagttgtttttttggaatatggaattttgggtgagggaggtggagaatttttttttggggtttgttttttgtttttttgtttgtttgtagtttgaaggaagggtggtgggggtgggggtttgagtattttgtggtttgtggtgtgtaggagggtaggtttttggtttgtggttgtttttgaatgattttgtttttttttgttttggatgatagtattagggtgtagttgtaggagaggggttgatattttttaggagttttattggtgaagttttagtaagtggtattttttggggtttagagagttggtgtgttgtttggtttgggtttagatattagtttatttaagtttattttgggtttttaagtgtgttgtttttggtagattttggggattggaggggaagtgtagtattatttgtgatttaagagggatttgaatgttttaaagttggttaagaatgttttttttgtgaggtagtatgagatgggttatgtggtagtaaagagttattttgggtttgtgagatggagttttgattttattatttgttaggtgtgtgattttggaaaatttatttttttaaattttagtttttagaattttaaattgtaggtattgtatataattttgtagtattgtgtttatgtagtgaagtgatgggaatgaaatgtttggtattgtatttttgtgtgttagatattttttgtgaatttgttggatgttgaatttatttatgtttaggttttgttaggttagtgtaagtggaaagaatttgggtaatgaagataaatatatttgggtttaaggtggttttatttatggtatattgattgggggttttttatttttaaaatattaatagtagttttggtggggtttttgttgttgttgttttgagatagagttttgttttgttgtttaggttgtaagttttgatttttttagtttaattgatttttttattttagtttgggattattatatttggttaattttgaatttttttattttattagagatagagttttattgtgttgtttaagttggttttgaattttttttgttttagttttttaaagtgttgggattataggtgtgagttattgtattggtttgtagttttgtttttgagtgtagtaggtgtgtttatattgatatatgttatattttgttatttttagtatttgtttagtatatggtaataaaaaattttttaaaaattagggatataaattaaaattggggagtattttttgttttttaggttatattggatatgggggaagggtagaagagggatgaagaggaattaaagagattagaaaataattagttgtagtgttgggaggtataaattaatggtaatttttaaaaatgtgaatttattaatttt

SEQ ID NO: 3562 - DNA, 2437 bp, Artificial Sequence
  chemically treated genomic DNA (Homo sapiens)
ggagttaataaatttatatttttaaaaattattattggtttatattttttaatattgtgattagttgttttttggtttttttaatttttttttattttttttttattttttttttatgtttagtatgatttagagggtagaaaatattttttaattttaatttgtatttttaatttttaaaaaattttttgttattatatgttaaataaatattaaagatgataaagtgtaatatgtattggtatagatatatttattatatttaagaataaggttgtagattagtatagtggtttatatttgtaattttaatattttgggaggttgagataggaggagtttgagattagtttaggtaatatagtgagattttgtttttagtaaaataaaaaaatttaaaattagttaggtgtggtggttttaggttgaggtgggaagattggttgagttaaggaggttaaagtttatagtttgggtaatagagtgaaattttgttttaaaataataataataaaaattttgttaaggttgttattggtgttttggggatgagaaatttttaattagtatattatggatgggattattttggatttaggtgtgtttgtttttattgtttaagttttttttatttatattggtttaatagaatttaagtatgaatgaatttaatatttaataggtttgtaaaaggtgtttaatatataagagtataatgttaagtattttatttttattattttattgtatgaatataatattatgaggttatgtataatatttgtagtttagagttttaaaaattaaggtttaaagaagtgggttttttaaagttatatatttaataagtggtggagttagaattttattttatgggtttgaagtggttttttattattatgtgatttattttatgttattttgtgggggaaatatttttgattagttttgagatatttaagttttttttgggttataaataatgttgtattttttttttagtttttgagatttattggaagtaatatatttaaaagtttaagataagtttgggtgagttgatgtttggatttaaattagatagtatgttgattttttggattttgggagatgttatttgttgaggttttgttgatggggtttttgaggggtattggttttttttttgtgattgtattttagtgttgttgtttagggtggggagggatggggttatttggaggtggttgtaggttagggatttatttttttatgtgttgtagattgtggggtatttggatttttgtttttattgttttttttttaaattgtaagtgagtaggagaatgagggatgagttttagaagaaagttttttattttttttgtttgaagttttatattttagggaggtaattgatgttaggtgaagagggaggtgttttggggggatttttttgtgttgggtgtttttggaggttgtaggttagggggtgaggtgtggtgtttgggttttttttgtgggtagttggtgattttggggtgttgagggagtagtgttttttttttttgatagtgttttttttgatttgaggtgtttattttggtgtaagtgggggttttagggagttggtgaggttgtttggtattttttttttttgtgttggatgtttgtgttgtagggattaaggttggtgatatggtggggggtgaggggtgaagatggggattggtttttgttggttttggtggttttagggttttggtgttgtttagtgttgtgtttttagttgtttgtgtgttaggtagtgtttttggtttttgtgggttatttgtggttgagtttgttgtgtttgttgttgtagggttttttgttttgttttgttggttttgttttatttttgttggtggtttttatgttggtgttgtagtgttttttagtggtgagttggggtatggtagggatttttgtgagagagaggtggtattgtggaggttttggggttggttttgatttgtagtttttttttgggtggggttattgttttttgaagagtgggaggaagggggtttatagtagggtgaggttttttgtgtgggggttgttaggaagtgtattgggaggggaggagaattagtaggaggaattttttatttttatttaatttgtggttaagtggatattttaatataattatagtttatttaattggggttgtttagtataaattgaataataatgatgaatgatttagatttattggggtagttggagaggggaaaggaagtttttatttttaatagtttgattataagtattttgttggaattattttatatggaaatggtaaaagtattgagtgagtttgatttttatatttatattatattttatatattattattttagtttggttttgtttatttttatttatagttatttttttaatatttagaag

SEQ ID NO: 3563 - DNA, 2308 bp, Artificial Sequence
  chemically treated genomic DNA (Homo sapiens)
gaggtgggtggatttttgaggttaggagattagtttggttaatatggtgaaattttgtttttattaaaaatataaaaattagttaggtgtggtggtgggtattggtagttttagttatttgggaggttgaggtatgagaattgtttgaatttgggaggtggaggttgtagtgagttaagattgtgttattgtattttagtttgggtgatagagtaagattttgttttaaaaattaaataaaataaaagtatgatgatatttataataataattttttaaatttttataatatttttttattttaatatataaattaattttttaaaagagaaaaatagattataatttttttttttaagttaggaagttttagaaaaatttaatgatttttaagaagtagtaatgttttataaataaggaggagattaatttgagaaataatttagtaataataagggtttttaggaaagggtgagagatggtattgagttagagattttagggtttttgattattattatttttagagttgtaatagatttggtttaggtttttaagttatggtgtattttatttgtaaataatatttaatagtgatgttgttaaatagtagtataaaaatgtggtaagatttttataatttataggttttgttgttgtggtaatatgaaagtgaaaataaaagtatattgttttataattgtatagttttttttttttgtttttagggtagtagatgttaattgaatgtttagatattaataagaatagaaaatttaatatatagatgttgttattgatttgtgatgtttattaaatatttataatttagaggaagtatttttttttttttattggtttgaatttattaatttgattattaaataatgtagtagttttattatttttattattgggatttttttttttgattttatttgttgattgtatttatttatatataatttaggttttttttgaatatggagaaagatatatggtatttgttgtttagttagaagttattttaagttattttaaaatgagttatgttgtttagtattttatttttgaaaattaagagaattgttttttagttaaattgaaaatagtaaatatttagtggtttaaatttatatatgggttttaaagttggggagattattttaggatgaaataaaattttaagtaaaatgaattttaaaataattaatttaagataagttgtttataggagttttattttggttagtttaaatgtaagtggttgtttgtatttgatttattttttatgagatgttataattattgattttttaaatttttaattttatggttattttttaaatttttgttttatatttattttaaaatagaatagttattataaagtttaggataatttaatttttaaaagtagttttaagataagttaataagagggaaaaaaataaagttagagaattttgttattttttaattatttattttatattatgtggtaaagaaattatttttaatttttattttatataaattttattgttttatttttttttttttagggagagaattttttatttgtgttggttattttagatgattattatagatatatttttttttaagtaatatattttatttataaatataataatgaaaagttttttaatagtttattggtaattttaaagttgtaagttttgaatattataaattgtattttatatttttttatagggtttgggggagtgtttgttatatttattagaaggtaagaagttaagtaagaagagagaggagaggaaggaggtaggaaaaagtaagttagagttgtagtaatagtaggagagggtgggttggttgtgtttttataagggagagagaaatttaatatatatatatatatatatatatgtgtatgtatgtgtgtgtatatatatatatatatatatatgttataggtattgatggaggtagtagtttggaggaggtgggggtagggaaaggaatattatatgatatagtaaggggaaaatatatttaagtttttttagttgttgttaggggaaatattttagtagagagaagtagttggaagattttattagattttttatgttttgtttgtttttttggaaatttaaattttgagtatattatttttgttgtaaatgtagttttttattattgttgttttttttgggtagagattagttttttttattttttgggttatttttagtgtggtggaagatttattttttttttttttttttttttgtattagtttaattagtgttaggtt

SEQ ID NO: 3564 - DNA, 2308 bp, Artificial Sequence
  chemically treated genomic DNA (Homo sapiens)
aatttgatattaattaagttagtgtaagaagaagaagaaaaagaagatgaattttttattatattggagataatttaagaagtaagaaaaattgatttttatttaaaaaggataataatggtgaaagattgtatttgtaatgggggtaatatatttagagtttaaatttttgaaaggataaataaaatatggagagtttaatgagattttttagttgtttttttttgttaaggtattttttttggtaatagttagggaagtttgggtgtattttttttttgttgtgttatatgatgtttttttttttatttttattttttttagattgttgtttttattagtgtttgtggtgtgtgtgtgtgtgtgtgtgtgtgtgtgtgtgtgtgtgtatgtgtgtatgtgtgtgtgtgtgtattgggttttttttttttttgtaagaatatagttagtttgtttttttttgttgttgttgtagttttgatttgtttttttttgtttttttttttttttttttttttttgtttagttttttgttttttggtaagtatgataaatatttttttaagttttgtgagaaggtatagggtgtggtttgtggtgtttgaaatttgtaattttgagattgttagtgaattgttggagaattttttattgttgtatttataaataaaatgtgttgtttagggagggatgtgtttgtgatagttatttggaatagttaatataagtgaaaagttttttttttggggaggggaaaataaggtaataaagtttatataagataaaagttagaaataatttttttgttatataatataaaatggatgattgaaaagtaataaagttttttgattttgttttttttttttttgttaatttgttttgaggttatttttgggaattgaattgttttgggttttataatgattgttttgttttaaagtaaatgtggaataggagtttaaagaatagttatggaattaagaatttaaaaaattaatgattgtggtattttatgaagaataaattaaatataaatagttatttgtatttagattaattgaagtaaaatttttatggatagtttattttaaattaattattttgaagtttattttatttgagattttattttattttaagatagtttttttgattttaaaatttatgtatggatttaagttattaaatgtttattgtttttaatttgattgaaaaatgatttttttgatttttaaggatgaagtgttaaatggtatgatttattttagaatagtttaaaataatttttggttggatagtaggtgttgtgtgtttttttttgtgtttaggggaggtttaagttatatatagatgagtgtaattaataagtgaggttaggaaaagaaattttagtgatgaaaataatgaaattgttgtattatttgataattaagttggtgaatttaaattagtgaaagaaaaaaagtattttttttaagttatgagtgtttggtgagtattataagttagtggtaatatttgtgtgttgaattttttgtttttgttggtgtttgagtatttaattgatatttattgttttgagaataggaaaaggaagttgtgtagttgtagaatagtatgtttttgtttttatttttatgttattataatagtaaaatttgtgaattatgaggattttgttatatttttatgttgttatttagtagtattattgttaaatattatttataaataaaatgtattataatttaaaggtttaaattaaatttattgtaattttagaagtggtaatagttagaaattttggaatttttgatttagtattattttttatttttttttaagggtttttattattgttgaattattttttgagttggttttttttttgtttatgaaatattgttattttttaaaaattattaagtttttttagagttttttgatttagaagagaaagttgtaatttgttttttttttttaaaaaattggtttatatattggaataaaagagtattatagaaatttaaggaattgttgttataagtattattatgtttttgttttgtttagtttttgagatgaagttttgttttgttatttaggttggagtgtagtggtatgattttggtttattatagtttttgttttttaagtttaagtaatttttatattttagttttttaagtagttgggattattggtgtttgttattatatttggttaatttttgtatttttagtagagatagggttttattatgttggttaggttggttttttggttttaaggatttatttgtttt

SEQ ID NO: 3565 - DNA, 2324 bp, Artificial Sequence
  chemically treated genomic DNA (Homo sapiens)
tttattaagaggatataataattataaatgtatatatatttaatattaatgttttaaagtatataaagtagaaattgatataattaaaataagtggataattttataattatatgaagagatttttaatttttattttttagtaattgataaaaaaatttaaaaaaggtataaatgatttaaagttaattgttatttatagaatattatatttaatatttgaaaaatattgttttgaagtatatatggtattaagataagattatgtatgattggttataaaaattaaataatatttttaaataatttttgggttaaagaaaaaattagaaagaaaatttgaaaatattttgaatttgaatttaaattttaaatattgattttgatatttaaatatgtttgattttggataattaatttggattgttgagtgttagtttttttattaataaagtggagatattaatttttattgggttattatgaagattaaatgaaataatgtatataaagtatttagtataatttttggtataataataatatttaatgttattgtttataatgagaagttattattgagggtatatgggtatatttatagggttttttgttattttgattattttgtttttgtttttttggtgggggagaatttttagttagttggatggtattaataagatttttttttttttttttttattttttgagatattgttttttgttatttaggttggagtgtagtggtgtaattataatttattgtaggtttgaatttttgggtttaaatgatttttttgttttagttttttaagtagttggtattgtaggaatgtgttatatttagttaatttttttgatttttggtagagataatgttttgtttttataaatgttgtttaggttggttttgaatttttaagttgaagtgattttttggttttgggtttttaaaatgttaggattatagatgtgatttattgtgattagttgaatattttgttttttaatattatttaagaagattatgttgtattattttattttttatatttttttgttgataaatgattttattttatttgatttaattttatttttttattgtgtaatattattgatagatagtggatttatgtaggtatataagagatttatgtattttttgaatttaaattttgagttgaggatgatgtttttatttttaggtttttatttggtttgggagtttgtttttagtattattgttgataagatgttagtagtatatttaaaatttgttatttgagattttgattttattatattggttttttattttttaaatattaaaaaataatttgggaaaatgaggaattatgatttttttttatttttttttttaatttaattgtataaatttagtagtgatttttatgtattttgttttttgaagtatttttttttaaatgtttataataataattattttataggaatattggtgtttgattaattattatttgttaaaagatttaggatttttagttggaaaggggattggggatgtatatagtattattttggagagttttgtattttgttatattgaatggagttagtgtttttgtgtaattaaattaattatattgttagggtttatgttgtaattaatgaaatttgtgtagattaaatgaagtgattagtttattatttttagattgaataattaaatttgaagagttttagtgttttttttaatagtttttttttttttagatgattattgatattttggtttttaattttattttattgtgttaatttggtgtgtgtttatttgttttatgttatgtagaatttattataatattaaaaatgttgaatttttataaatgtatttttttaaaagaattaaggtttattttagaaataaatttaatataatagaaaggtaaggggaatggtatgtattttattaagggtttgtattgtgttaggtattgtgtgggtattttatttatttaattttatttaatttttttttagttatatagtgaagttggtttaatttttattttatggatgaagaaagtagtttaaggaggtaaaattatttaaggttataagtaagtaaggggtagaggtagtatttgaatttaagtttttttgattttaaaatttatattttttttatgagtagtagaggtttgtttttgtgttttatttaagaaattatgttattttgaggtatggggatatatttttagagttttgttgtgtttttgtagtttttggtatagattttttaatttgttttgagtgaggatagttttgttgtgt

SEQ ID NO: 3566 - DNA, 2324 bp, Artificial Sequence
  chemically treated genomic DNA (Homo sapiens)
atatagtagagttatttttgtttgaagtaaattggagagtttgtgttgggagttgtagagatataataagattttgaaggtatgtttttatgttttagaataatataattttttgaatggggtatagagataggtttttgttatttatggaaagagtgtgaattttagaattagagaggtttgggtttaaatattgtttttgttttttgtttgtttgtaattttaaataattttatttttttgagttattttttttatttgtaaaatggagattagattagttttattgtgtggttgggaaaaaattagatgaagttgaataggtaaggtatttgtatagtatttgatatagtgtaggtttttgataaaatgtatattattttttttatttttttattatgttgagtttgtttttaaggtgggttttagtttttttaaaaaaatatatttgtaaagatttagtatttttggtgttataatgaattttgtatgatatgagataaatggatatatattgaattgatatagtgaagtgagattgagaattaaaatgttaatagttatttgaaaaaaaggaagttattggaaaaagtattgaagttttttaggtttaattatttaatttaaaaataatagattgattattttatttggtttgtatgggttttattaattatagtgtaagttttagtagtgtggttaatttgattatatagagatattagttttatttaatatagtaagatgtagagttttttaagatgatattgtgtgtatttttaattttttttttagttgaagattttaaattttttgataaataataattaattagatattagtgtttttgtaaggtagttattattataagtgtttaaaaggagatattttaagaaatagagtatatgaaaattattgttgaatttgtataattgagttaggaagaaaaatagaagagaattatggttttttatttttttaaattgttttttgatatttgggaaatggagaattagtgtgatgaagttaaagttttaaatggtaggttttagatgtgttattggtgttttgttaataatagtattgaagatagatttttaggttgaatgggggtttgaggatggaagtattgtttttaatttaaggtttggatttaaaggatgtataaattttttgtgtgtttgtgtaaatttattgtttgttagtaatgttatatagtaaggagataaaattaaattagatagggtgggattatttattaataaagagatataaagagtagaatgatatagtgtggtttttttgggtagtattgaaagatagaatgtttagttggttatagtgggttatatttgtaattttagtattttggaagtttaaggttggaggattattttagtttgggaatttgagattagtttgggtaatatttatgagagtaagatattgtttttattaaaaattaggaaaattagttgagtgtggtatgtttttgtagtgttagttatttgggaggttgaagtaggaggattatttgagtttagaagtttgagtttgtagtaagttatgattgtgttattatattttaatttgagtgatagagagtaatgttttagaaaataaagagagagagagagagattttattaatattatttaattggttagagatttttttttattaaaaaaataaagatagaatgattaaagtagtaggagattttgtaagtgtgtttatatgtttttagtaatggttttttattatgaataatgatattaagtattattattatgttagaagttatgttaagtgttttatatatattattttatttaatttttatgataatttagtgaaggttaatatttttattttattggtgaagaaattgatatttagtaatttaaattggttgtttaagattaagtatatttaaatgttaaaattaatatttgaaatttgaatttaaatttaaaatatttttaaattttttttttaattttttttttgatttagggattatttagaagtgttatttaatttttatagttgattatatatggttttattttgatattatatgtattttaaaataatgttttttagatgttgggtgtagtgttttataagtaataattagttttaaattatttatgttttttttgaatttttttattaattgttgagaaatgagagttaaaaatttttttatataattgtggaattgtttgtttattttaattatgttaatttttgttttatgtattttgaagtattaatattaggtgtatatatatttatgattattatgtttttttgatgaa

SEQ ID NO: 3567 - DNA, 2389 bp, Artificial Sequence
  chemically treated genomic DNA (Homo sapiens)
agtttataggtaaatgttttatattttattattagttggtttaatttttttgtaaatttttgtttgaaggaatatattaagttataaattatttagtgggaatttattttgttaaagtagattatattttttgaagtagggatgttggattaattaagttttgggtatttggaaagtgaaggaattttgggagagtgattgtgttgaagaaatgataggatgaagagtaaagataattttgaaaattttgaatttttatagtgattttattatttgtgatttttttttattttttttttttttttttttttttttttttttttttttttgagatagagttttattttgttgttaggttggagtgtagttgtgtgattttggtttattgtaatttttgttttttaggtttaagtgatttttttgttttagttttttgagtagttgggattataggtatgtgttattatgtttagttaatttttgtattttttagtagagatggggttttataatgttggttaggatggttttgattttttgattttgttatttgtttgttttagttttttaaagtgttgggattataggtgtgtgttattgtatttggttattatttgtgattttttatttaatttttgtaaattagtattattgagtttttaaagaaagagtattttatgaaggaggtaggttgaggtagggtgttagagaattgaagaatgggtatttttgtagattattaagtgtaattagataagaatagataaatttgaatatttttaataaattttaatatgtaattatgtaaatgtatgttagaaaaaaaatttaggtaatatgtttttgagtattattattttttagaagatgtaggtgggtttgggagaatattggggtaggttaagttatatagtttaatttttttttaagtttatttgaatatttatttagtattttttgtatataaagtttaagtaaaatttatttagtttttgtattgttattttgttattaaattttttttttgggttaaattttttttttagatttgtagttattgttttttttgatttttataaagtaggaaatgtttatgtattgttaagtttttagagtttttgttgtttatagtaattaaatgagatgattgttttagttttaagtattggttttagagaagggtagagtatattttgaattggaaaattaaattaaataaaaataaatagttatgtgaggtatgtgagatgttagtttttttttggagaaatgtaagatagaaatttgattgtaaagttttatttttgaatgaaggtttttgtgatttgtttttagggttatattgttttttttttggattattgggaattatagttttagtaaatttagttttttttgatttggtgataaaggatgtaaattaaaattgtattaagttttttttgattttttaaagttattttaaaatagtttgtaaataataaagttattttttaaaatattttttttaaattaattataaattattttgaatagtttgaatatttgttttaaatgatgtttaggatgttttataatatttggaggatagtgttatatttgagagttgattattttaaattggtttttttaagtaattttttatgtgatttgtttgttgtgtttgtttatatgtagtagtttttgaattgttgttttaattatattgattgatttaataaaagagttaaaatattatttaattttgttgtatattttagttaattttgagtttttttaattaaaatagaatgggtggttgagtattttttttttgtagattagtgtttaattttaaaatttatagagatttattggattgatttggaagattattagtaattttagaagtggttaaataattgggataaaagtatttatttagaagtggttaaataattgagataaaagtatttatgttttagatatgtttataggatgatgggtttatgttgttttttttttttattttttgttttttttttaggaaaatgtaaaaagtgtttttttttatattattggataaattattttaggataaattgaattttgtttatagtttagtagttttatgtaattagttttttaaaatttgagttttaaatagaaatgttttaattatgttaaaaatttgagtagttttaagagtttttttttttttaaatggtatagttgtaaagagtagtgtgatttttgtgggtttaagtttgggttttattttttatttaaatgtggttttgaataagtttttaatatttttttaatgttaagtttttattgggtataattatatttattttggttttttgtttgtttgttttttgaaagttaaatggtataatatgaatgt

SEQ ID NO: 3568 - DNA, 2389 bp, Artificial Sequence
  chemically treated genomic DNA (Homo sapiens)
atatttatattgtgttatttgatttttagaaaataaataaataaaaaattaaggtaaatataattatgtttaatgaaggtttgatattgagagagtgttagggatttgtttaagattatatttgagtaaagagtagagtttgagtttggatttataaaagttatattgttttttatagttgtattatttagaagaaggaggatttttagaattatttaggtttttgatatgattgaggtgtttttgtttgaaatttaggttttaaaaaattgattatataaaattattggattgtaaataggatttaatttattttgaagtaatttgtttaatggtgtaaagaaaagtattttttgtatttttttagaaagggggtaggaaataaaaaaaaaaaatagtatagatttattattttgtaaatatgtttaaggtataaatgtttttgttttagttatttagttatttttgggtaaatgtttttgttttggttatttagttatttttgagattattggtggttttttaagttaatttagtgaatttttgtaaattttaaggttgggtattaatttgtaaaagaaaaatatttaattatttattttgttttagttggaaaaatttagaattaattgaaatatataatagaattaaatgatgttttaatttttttgttaaattagttaatgtggttaaagtaataatttagaagttattatgtgtgggtaagtatagtagataagttatgtaaagaattgtttgaaaaagttaatttaaggtagttaatttttaagtatagtgttgttttttaggtgttgtaaaatattttgaatattatttgaagtaaatatttaagttatttaaaatagtttgtaattggtttgaagggggtgttttaaaaaatagttttgttatttataaattattttgaagtaattttggagaattaaaaagaatttaatgtaattttaatttgtgttttttattattagattagggaaaattgagtttgttagggttatgatttttagtagtttaaggaagggatagtgtgattttaaaagtaagttgtagaaatttttatttaaagatagagttttatagttagatttttattttatatttttttaaagagaaattgatattttatatattttatgtggttgtttgtttttgtttggtttggttttttggtttaaagtatgttttatttttttttgagattaatgtttaggattgaggtaattattttatttgattgttatgggtagtgaggattttgaaaatttggtagtatatggatattttttgttttatggaggttaagagaagtagtggttgtaaatttgagagaaaaatttgatttaaaagagagatttaatgataaagtggtaatatagaaattaaatgaattttatttggattttatatgtaaaggatgttaagtaagtatttaagtggatttagaaagaaattaggttgtgtgatttagtttgttttagtgtttttttaagtttatttgtattttttggaaggtgataatatttaaaggtatgttatttagattttttttttaatatatatttgtatgattgtatgttagaatttgttagaaatgtttagatttatttgtttttatttaattgtatttaatggtttatgaaaatgtttattttttgattttttggtgttttattttaatttgttttttttatagggtattttttttttgaagatttagtaatattggtttataggaattgggtaagaagttatagataatggttgggtgtggtggtgtatatttgtaattttagtgttttgggaggttgaggtgggtagataataaggttaagagattgagattattttggttaatattgtgaaattttgtttttattaaaaaatataaaaattagttgggtatggtggtatgtgtttgtaattttagttatttaggaggttgaagtaggagaattgtttgaatttgggaggtagaggttgtagtgagttaagattatataattgtattttagtttggtaatagagtgagattttgttttaaaaaaaaaaaaaaaagaaaaaaagaaaagaaaagaaaaatgaaaagaagttatagatagtgaagttattatagaggtttaaaatttttaaaattgtttttgttttttattttgttatttttttaatatagttatttttttagggtttttttattttttaagtgtttaagatttgattgatttaatatttttgttttagagaatataatttgttttaataaaatgaatttttattaggtaatttatgatttaatatatttttttaggtaagaatttgtagaaagattagattaattaatgatggagtatagggtatttgtttgtgggtt

SEQ ID NO: 3569 - DNA, 2380 bp, Artificial Sequence
  chemically treated genomic DNA (Homo sapiens)
gtgttgagattgtattattgtattttaggttgggtgatagagtgagatatagttttagaaaaaaaaaattatatatatatagatatatgtgtatatatatatatatatatatatatatatatatatatattttattgatagtggtattattagaattgtatatttttaagatttttgtagtagggtatggaagatagaatggagggagattgtattgaggtaaaatatataagtggtaagaaattatgagtattggaattaaataagttagaaaagaatagtaaatgtttaataaataggtatgaattgtttgatattttatgaagtttgtataaattattttttttagagtaaaggttggttgtgaagataaaatgaaataataaaaatataagatgataaaaaaatttagagaaatttatagtggtatttaaataagatttggtttttttttgagttttagtgatttattattttgagttttaatggtgattaataagagtatttagttaaggagtgagtattatttttgtagataattattattataagtttttgagatatttttggatatttgttgttattattggtattgaattttaggaaattttgggaataataattgtttaattataaattttagaaaataatgtggaagtttattagatttttgaataaagtattttttttttttttttatagtatataggtattttaaattaggaatatttgtttttatttttgttagtaaattttttgttaaatttattatttaattgaaaattttagaaaggagtaataaagaaattatggtagaggtttatattattaaaaagaaaaggtagttagtaaaaattattttttatgtagaagttaaaaaaaaaaaaaaattatttttaatgagatttgtattttaaagaaaataagaattgatattatgatttatatattggttggtattttttatttaaagatgtatagatttgaaaaatttatatgttatattttattttattatttgttttttatagttttgtaaattagtaaatttttataagatatataggttgagagtgtgaagttagttagaaaagttatgtggaaatgtatatttattttagagtagttggatttatatttaatatggtaaattaaaatgatgtaggtatttattttttttttttggagtttttaggtttttaaaatttaatattttattgttgatttgtttaaaatttttttaggtgaggtgaattttgagggtattttatttaattatatagttagaggagggtggggttttataagattagattttaaatgttggggtttttgtgggtttttaggttgttgggagtagaggtgaattgttttttgttttttgttgtaggaagaagatgggagatattgattgattggaggtggggggtgggggtttgggggagggaagtaatatggggattgtaataaataagagattttttttatatgattttttatatttggtgtttgatgtttttttttaggttttttagaggaaataggaaatttgttttttggttattggaaagaagagaataaatatattgagaattgtgaaaagaagtagtaggattttaggtaaggagttgatgggttagttaattttattttttattaagtgttttttttttgaagtttttttaagtgtttaattttgtaaaagttaagaatgtttttatttttttttattgagttggagtatattttggttttagtttagatgttatattatagagtagttgatgataggtaggttagaataggttttggaagaatttatttttagttttaggtaagattttttaagttttgtttttggaaagtttgattttttttaattttggattgattttaaagtttttaggttattttgttttagagtttaaagaattattaggaggttattatttgtggagtgaagtaggattttttatattatttatggggttttatgtaaaatgaaaatgtgatgttatttatttgaaaattaagaattttaagatggtgataatagaatattaaagtaagtgtggggattttttggagtatagggttttatgtaattgtattaggttgtagatttattaagttagttttggttgtagaaagaatgtgggaattttgggttatgtggatttttataagttgagttgttgagagatttggattatttttattgtgtttagtagggtgatagttagttttttaatagtagtatatttggaagttgttgtaaggtagtagagggggaggagggtggatgttgggttgtgggtgtgagtaggtaaagattataaatatattattgagtaaaaattatatagtggtttttttgttt

SEQ ID NO: 3570 - DNA, 2380 bp, Artificial Sequence
  chemically treated genomic DNA (Homo sapiens)
gggtaaggagattattgtgtgatttttatttagtgatgtgtttgtggtttttgtttgtttatatttgtaatttagtatttatttttttttttttttgttgttttgtagtagtttttaagtgtgttgttgttggaggattgattgttattttgttgaatataatggaggtagtttaggttttttaataatttagtttgtgaaaatttatatggtttagagtttttatgttttttttatagttaggattggtttggtgagtttatggtttggtatagttgtatagagttttgtgttttagagagtttttatatttgttttaatgttttattgttattattttgaaatttttaatttttaaatgagtggtattatatttttattttatatgaaattttataaataatgtagagggttttattttattttatggatggtggttttttgataattttttaaattttaaggtaaaatggtttgagggttttggagttagtttaagattaagaaagattagattttttaaagatagagtttagggggttttgtttgaggttgggaatggatttttttagggtttgttttaatttgtttgttattagttgttttgtaatatgatatttggattggggttagaatatgttttagtttagtggaagaagatgaggatatttttgatttttatagagttaaatatttagaggaattttaggaagaaagtatttggtaaaaggtaaagttggttggtttattagttttttgtttggggttttgttgtttttttttatagtttttagtatgtttatttttttttttttagtggttagaggataagttttttgttttttttagggagtttggagagaggtattaggtattaaatataggaaattatgtggagaggattttttatttattatagtttttatattattttttttttttaagtttttgttttttatttttagttagttagtgttttttgttttttttttgtagtagagaatagaaggtagtttatttttgtttttgatagtttgggaatttgtaagagttttagtatttgaagtttggttttgtgaaattttatttttttttggttgtgtgattgaatgggatgtttttgaggtttattttatttgagagggttttgggtagattagtagtaaggtgttaaattttagaagtttgaaaattttagaagagaaaggtaggtatttgtattgttttgatttgttatgttaaatgtgaatttggttgttttggaatagatgtgtatttttatgtggtttttttagttggttttatgtttttaatttgtgtgttttgtggagatttattgatttataagattgtgaggggtaaatagtgagatgggatatgatatatggattttttaaatttgtatatttttggataaagaatgttagttagtatatagattatggtgttgatttttattttttttggagtgtaaattttattagaagtagtttttttttttttttggtttttgtataaggggtaatttttattaattgttttttttttttaatagtatagatttttattatgatttttttattatttttttttgaggtttttagttaaatagtagatttgatagagaatttgttaatagaaataggaatgggtgtttttaatttagagtgtttatgtgttataagaaaaaaaaaagagtattttgtttagggatttggtggatttttatattattttttagaatttgtggttaaatagttgttatttttgaggttttttgaaatttaatattagtagtgataatgaatatttagggatgttttggaggtttgtggtggtggttgtttgtagggatggtgtttattttttagttgggtgtttttgttggttattattgaggtttaagatgataggttattgagatttagagaggagttaggttttatttaagtattattataaatttttttggatttttttgttattttatgtttttattgttttattttgtttttataattagtttttattttaagagaaataatttatatagattttatggaatattaaataatttatatttatttattgaatatttattatttttttttagtttatttagttttgatgtttataattttttattatttatgtattttattttaatatagtttttttttattttattttttatattttgttataggggttttgggaatatgtaattttaataatgttattgttagtgagatatatatatatatatatatatatatatatatatatatatatatatatttatatatatataattttttttttttgagattgtgttttattttgttgtttagtttggagtatagtggtgtaattttagtat

SEQ ID NO: 3571 - DNA, 2378 bp, Artificial Sequence
  chemically treated genomic DNA (Homo sapiens)
tttaagaataaaatgtttttttttttttttaatatagaatattttttttatgagttttttaaaagtatgttaagtaaattaaaataaaaggaggtgggtaatgtatttgaagaaatttagttaatttaatttttgtaattttagaagtatgttttatttattttttggaattaattgtggttttattataaattgaattagatatatttgttttaatgttattttaattttgtaggtagattgtaatttagggttggtttagtttatttattttttagtttattaatttattgtttttgttgttttagttgtgtgggtatttttttagttggaatatatagaggttgtttttttttttaaaagtttaaaagtaataaagtaagaaagagagaaaaagtaagaaagtaagaaattgagaaaaagtaagaaagtaaaaaagtaagaaagggaaagtaagtaaatatagtttttatttttttttttatagaattagagttttttgagagtgtttataggatttatttagaaaggttattttgtaaatgttttattagttatggtataatatagtttttttttagtagaaaagttttgttttttgggagtttgttttttttttagtttaatggattttgttaggggtaggatgtggtttttgttattatgggttataaaatttaggagtaatggttgtagtgatggtggttttttgttggtttattagtatgggagtttgatggtgaggaggagagaaaggaaaattgggaaaagttttgaatgtttaataattttttagaggtaagatgagggagagagagatttagagttataattgtagaagttttttgtaaaatttaattaaaatttgggtagaaataaatattagaaataagtgttatttattaatttaaattgttaattaaggtaaatattgttataaatttaggaaaagaaagggaggagaatggaatgaggggtgattattttagatattaagtaaattaaattattttgaaggttttgttagatatatgtattaattattggttattttagttgtatatttgtatggagaggagaatttggtgtttttaaattgattttggttggtaaagtgggaaagtagaaggatagggtggtaggttaaggggaatttaatttagaagtggttatgtggtatttatggttttgtattggttaggtggaagaaggaggaattatgtaagatttaggtgagggtgtataattatttttagttttttagttttgttttttgttttttggagtttatgtagttggataaatttgttgagttgtaatgtgaagtaattttttttgggagggggaaggttttagggtgaatttaagttaattttagggataatagagtgggaaagtaagttgagtttttaaattttttatgtggttggttttttttttttgtgagatttagtatttagtaggagggagatggggtagggtggggtggggataaagtgagttgttgattttgttttttgggttataggttttgtatatttataagttttgagggtaggttataagttgaaatttttttattttagagagaggaggttggagagtagtttagttatttaggttgggagttatttgtatttgatgagtaattttaagtgggaattattagagtgtgtgtttgtgtgaatgttagagtgtatttagagggaataaatgatttattattggggttttaataaagttatatttgaaaagggagggagttttttatttttttttttattattaaaattttaaagaggtagaatttatttggttttttaagttaggttggaagggagttatagttaattaagtagtttgtttagtttttttagtttttttttgagtataataatatgtataaattggtaaaagggattatagattgttttgatgttaaataaagaggaaaatttttaaaatatggtaaaaattgtatttttgtttaatttttttgtgttttttttttagtataaatttaagatatgtatagttaggttttagggagaggtatataatgaaaaattattattttagatatttagatttaagtattttgtagtaagagaaaatgtttagtttttttttttgaattattttttttgtttatgtttttttgtttgttttgttgttgttgttgtttttgagatggagttttatttttgttatttaggttggaatgtagtggtatgattttggtttattgtaatttttattttttggatttaagtaattattttgttttagttttttgagtagttgtgattataggtatttgttattaagtttggttatgattaaatattattttattaataataaatattgtgttttgg

SEQ ID NO: 3572 - DNA, 2378 bp, Artificial Sequence
  chemically treated genomic DNA (Homo sapiens)
ttagagtatagtatttgttattagtgaagtaatatttaattatagttgggtttggtggtaggtgtttgtaattatagttatttgggaggttgaggtaggataattgtttgaatttgggagatggaggttgtagtgagttgagattatgttgttgtattttagtttgggtaataagagtgaaattttattttaaaaataataataataataaaataaataaaaaaatgtaagtagagaaagtaatttagaagaggagattggatatttttttttgttataaaatatttggatttaagtatttgaaatgataattttttattatgtatttttttttggagtttagttgtatgtgttttaaatttgtgttgaagaaaggatgtggaagagttaaatagagatataatttttattgtgttttggaggtttttttttttgtttaatattaaagtagtttgtagttttttttgttagtttatatatattgttgtatttaaagaagggttgaaggagttgagtgggttgtttgattagttgtgatttttttttagtttggtttaagagattaaatggattttatttttttaaggttttaatgataaggaggggaataagaggttttttttttttttgaatgtaattttgttgaggttttgataataaattatttgttttttttaaatgtattttggtatttatataggtatatattttgatggtttttatttgaaattgtttattaagtgtaaatagtttttagtttggatggttgagttgttttttagttttttttttttggagtaagaagattttagtttgtgatttgtttttgggatttgtgggtgtataaagtttgtgatttaggaaataaagttaatggtttattttgtttttattttattttattttgttttttttttattaaatgttgaattttatgagagaagaaaattagttatataaaggatttgaaagtttaatttgtttttttattttgttatttttggagttggtttggatttattttgaagtttttttttttttggggaaagttgttttatgttgtagtttagtaggtttgtttagttatataggttttagaaaataagaagtaagattggaaagttggggatgattgtatgtttttgtttgaattttatgtggttttttttttttttatttggttagtgtagagttgtgggtgttatgtggttatttttggattgggttttttttggtttgttattttgtttttttgtttttttattttgttagttagagttaatttgaggatgttaagtttttttttttatataggtgtgtagttgggataattaatgattaatgtatgtgtttggtagggtttttagggtaatttgatttgtttgatatttagagtgattattttttgttttatttttttttttttttttttttgagtttgtggtagtgtttattttagttggtggtttaagttgatgaatgatatttgtttttggtgtttgtttttgtttaagttttaattaaattttgtaagaggtttttgtaattatggttttaggttttttttttttttattttatttttgaaaagttattgagtatttagaattttttttagttttttttttttttttttttattgttaaatttttgtgttgatgggttggtaggaggttgttattattgtagttattatttttgggttttatggtttgtgatggtaaaagttatattttgtttttgatagaatttattaggttgaggagggaatagatttttagaaagtagagtttttttgttggaggagagttgtattatgttgtagttaatgggatatttgtaaaataatttttttaagtagattttgtaggtatttttaaggggttttgattttataagggaagaggtagaagttgtgtttgtttgtttttttttttttgtttttttgtttttttgtttttttttagttttttgtttttttgtttttttttttttttttgttttgttgtttttaagtttttggaggagaaagtagtttttgtatgttttaattgaaagaatgtttatatggttgagatagtaagagtagtggattaatggattaggaaatagatgaattaaattaattttgggttataatttgtttgtaaagttgagataatattagaataagtgtatttggtttaatttatggtgggattatagttagttttaagaagtaaatggaatatgtttttgaggttgtaaaaattgaattggttaagtttttttaggtatattatttatttttttttgttttggtttgtttaatgtatttttagaaaatttataagaaaggtattttgtattaaaagaggagaaaaatgttttatttttaag

SEQ ID NO: 3573 - DNA, 2469 bp, Artificial Sequence
  chemically treated genomic DNA (Homo sapiens)
ttaatattaggggtattagttagtaaaatttgttgagtttattattgaaaaatttttttatttattattgtggttataatatatagttatttggttaggaaagagtatatattatagggatttgtttattgtatgtgtgtttgagtttttttttattttttgttttttttaagaatttttttttgattggtttaattagaagtgttgattttttttatttgattttttgtaattttataatttatgttttttatttttgtgttatattgtttatttttttttggtttttttgtgtgtatatgtatatgttttggggaatggggtatttatttttgttatttattgtgttatttatttttgtatgtttatagtgtagagtatggtgttttgtatatagagtatgtttggtaaatatgtgtaataaaaagttttttgattatataatggtttgatattggtttttttattttttaaatgagttattttttaattattgatttaaatggagttgatttatttttataaatagtatttttttgatttttattgttataaaatttataataaaattgtttttttatttatttttttttattgtttatattttttttggaaatatttaaatgagggtttgttttagatttttggggaaggaaggtttgtgagtagataatagtagaattaggatgtgtgggattgtttggtggttagtagaataatgtaaattggtttttttgtttaaagttaaattgtgtgtattttttataagtggatatagtgttttttgtgtttgaattattatagttatgtagtggtttagtgagaattttttgttttggttattataaaaataaaatagaaatttttttgttgttaggttaggaattagattataattgatgtattagtttattagttaattttttttaagtttaatattagaataggtaaaaaaaaaaagtattagtttttaaaaattattaataatagtggtataattttgtattttattattttttttttaattattttagtgtagtagatgtaagtagagttttatgtaattatttgagataaggatgaagaattgaaagataaataagtgatttattttaatggatttgttttagataggagaaatttgtaattttttttaggtgtgttttatggatttatagtggagtgaattatagatttgtataagttttgaaattgtgggtaattttatagtttttagattggttttttgtaataggtagttagtttttattgggttttttggatttttattttaaaaatggagaagatagattatagttattgattagggattgtgggaggtgttatgtgatggtgaggtattatgttagggagttgagttttgatttttttgttgggtgattttttatttttgggttgttagatttattttttggatgttgtgagtagatgttttatattagtattatttttttgttgaagaaaggtttgtttttgtatatattttaggagggggaaatgtgtgatatatgatggtattttttggaatgtttgatttttttggaaatttttttaatatgatttagaaattggttagtttaaggttggagtattttttaagttttttttatgtttgtttttttttaagagttgtttgttaggttttaatggtttatttttaggagtgaaaatgtaaagtattttgttaggtaaataaatttattgtttttgtattgtttttttgtttgataaattttaatatttgttttttagattgaatgtaaagttggatgttgttttaaaagtgtttttgattagtttttttttttagtgagtttgaaaaagttattattgtattaatttaaaaaaatatttttttagttattgttaaatatgtttttgtaaaggtatttttttttgttttaagtggttaattttatgttatttgaaggtttatattttttatattttgaagatagttgtgagaggtttaaagtgttgtattattaggtgttgtttatttgtttgtttgtttgttttttagtgttagtatattatgagttttttttatggattagaggtaattgttgggtgtataaatttttttaaaattttataagtattaagatagttggtgagatatttagatgttttttaattttgaaattgttttttaattttgaaattatgtgatttttgaaatttattagaatttgaatttagattttaatttttagaagagatgttgggttataaatagattggttggaagttatttaaagtagttaaagatgagatgtttttgattttaatagtttttttttattttttttttttttaaggttttatgtgaagtattttttttatggtaagggagaattttaagggtaattaaatagattttgttatgagggtaagagatattgggttttaaatatataaataatttgtttatttatttgatgttat

SEQ ID NO: 3574 - DNA, 2469 bp, Artificial Sequence
  chemically treated genomic DNA (Homo sapiens)
ataatattagatggataaatgagttgtttatgtgtttaagatttagtattttttgtttttatagtagaatttatttagttatttttagagtttttttttgttatggaagaaatgttttatatagagttttgggggaaagaaagatagaaaagaattattagaattagaaatattttatttttagttattttagatggtttttagttaatttgtttgtagtttagtattttttttaaaaattggaatttggatttagattttgataggttttaagaattatataattttagagttggaagataattttagagttagaagatatttagatattttattaattattttgatatttataaaattttaaagaaatttatatgtttagtaattgtttttggtttatgaagaaagtttatgatgtgttgatattgaaaaataaataaataaataaataaatagtatttaatgatgtaatattttagattttttataattgtttttagagtataaggaatatagatttttaagtagtatagaattggttatttgaaataagggaagatgtttttgtaaaaatgtgtttggtagtaattggagaaatgtttttttaaattgatataatgatagtttttttaggtttattaaaagaagaaattaattaagaatatttttaaaataatatttagttttatatttagtttaaaagataggtattgaaatttattaagtaaggggataatgtagggatagtgagtttatttgtttgataggatattttgtatttttatttttaggagtgagttattaaagtttgataaataatttttaaagaaaaataaatgtaaaagaggtttaggaaatattttaattttgagttagttaatttttaaattatgttagagaagtttttagaagaattaagtattttagaaaatattattatatattatgtattttttttttttggaatatgtgtaaaaataagtttttttttaataggaaaatggtgttggtgtaggatatttatttatggtatttaggaagtagatttagtagtttagaggtggagaattatttagtaggaaggttagagtttagttttttagtatgatgttttattattatgtggtattttttatggtttttggttagtggttgtgatttgttttttttatttttgaaatgggagtttaaggggtttagtgagaattgattgtttgttgtgagaagttgatttgagaattgtaaagttatttatagttttaaggtttgtgtaagtttgtgatttattttattatgggtttatgaagtatgtttaagagaaattataggttttttttgtttgaagtaaatttattaaagtgagttatttgtttgttttttagttttttatttttattttagatgattgtatgagattttgtttgtatttgttgtattgggataattggaaggagggtgataaaatgtaaggttatgttattattgttgatgatttttaaaggttgatattttttttttttgtttgttttgatgttgaatttggaggaaattggttgataaattggtgtattaattgtgatttaatttttaatttagtaatagagagatttttgttttatttttgtaatgattgggataaggagtttttattgagttattatatgattgtggtaatttagatatagaagatattgtgtttatttgtggggaatgtatatggtttgattttggataggggagttagtttgtattgttttgttaattattaaatagttttatatattttagttttattgttgtttatttataggttttttttttttaaagatttaaagtaaatttttatttagatatttttaggagaaatgtggataataaggagaggtaagtgaggaggtagttttgttatgggttttatagtaatgaaggttaaggaggtgttgtttatggaaatgggttagttttatttaggttagtagttaagaaatggtttatttgggaagtggaaaagttaatattaagttattgtgtaattaaaggattttttattgtatatatttattgaatatattttatgtataaggtattatgttttgtattatgggtatataaaagtgagtaatatagtgagtaataaaagtgaatattttattttttaaaatatatatatatgtatataaaaagattaaaaggaaataaataatataatataaaagtgaaggatatagattataaaattataggaaattaggtggggagaattagtgtttttggttggattaattagggaagaatttttgaagaaggtagaaagtgagggagagtttaggtatatgtgtagtgagtagatttttgtgatgtgtatttttttttggttaggtaattgtgtattatgattatagtaatgaatgaaaggattttttaatggtaagtttaatagattttgttggttgatatttttaatgttga

SEQ ID NO: 3575 - DNA, 2231 bp, Artificial Sequence
  chemically treated genomic DNA (Homo sapiens)
tgataaatggtagtttatttatgattggagaattttaggaggattagtattggttttgtttttataggttgtgaaagtttagtattattttgtttatatatttagatatttaatttatattatttaatttaaattatttgttttattgtttttttgtaaatgaatttgtggataagtgtttttattaatggaaaaataaaaggttaaaatttaatagttttaaagtttatagtatatatgggaaagttatttgaatttttagttggtgatgatagtatttgtttttagaaaattgatataatttattaatgtttagtattgaaatataagagtttattgttgttgttgatgtattgttgttattttgatattttttaaaatgtagaatttgaattattgatgttatgaggtttatttagagagttgttaaataaaaagttagatgatgtgaggataaagaagtttgagagtttgttggtttgtaggtgattttttgtgttttttttagttagtttttaggtaggagaggttattagagtagttggaatattttttataaaatagttatataatttaaagaagatattattgaggtattatttttaggtttttttttttgaaaaaaattaaattatattttgaattttttaggattgttttttttttttgtagggtttatttttttgaataaaattagtatttgttaatgattagaatgataatgtatgttttatgtttatatttatataattgtgttttttatttaaggttttgtttaatgtaatgatttttggatttgaagtgtattaaatgttaatgttttttttaatttttaatttttttttttataaattttgaagataaatattaatattttggtattatattaaagaaatatttaattattagtattgttattttgtttttattttgtatttttaatttttaattttaaaaaataggtgaatattttttatgttggtttttatgtttatataggttattgttttgttatggaggaatttaaaggttattattggttatttatttaattttttgaatatgtttttttttgtttagataagtttggtttttttgttttttggatatggtaatatttttattgatttttgttagtaaagttatatgttattagtttttttagggttatatgtgtagtatggtagtttttaggtattatattgattgtaaagaagggtaggaatttttgtgtatgtttgtattatttatttttggggaataaagataatataagtggatgatttagaaaggtagtgttttttttttagttatatgttaattaagtttttttatagaaaaattgaagagtttagaagttagtgggtagtattagagtaaagtattttgtatgtggatgaatttagtttatttttggaatatgtgtttggaattttgaaattttttaattattttgattgattattgttggaatggggagaggaggtaaagaggaaatgaagataagatttagattgggatagtttgttgatggaaattgttagggtgtagattttttttaaatgtttaatagaaattttagagattagataattgtagggatttatggaatagtaagttaaatttatttttttatttattttatttttaattagagtttttttgggggaaatttagaaatggaaattgtttaagtataaatattttgtatattataaatattgttgggtttgatattttgtagggagtaaagaaggggattgtagagatgtatggatttgagtttgaaatgtggttttatttttttttggttgtgagaatttggaaaatttgttgatttattaaattttatttaattttttataagatgtgaattataatttgttttgtagagttatgtgaatttaaaattagattttatttgtaaagtttttaaagtagtatttggttaatgtattttaggttaggatattgttggtattttgtttttaagatgtatgttattgattttttttttataagaatttttagtatgaaatttattttagtgtattatagttttatttttaaaggaaatttaatttagaaattaaggtaaattttaaaagttattaattaatttttttagttttaatattatttataggaaaataggaaaagaaaatttgtagaaggaaatagtgtaaatggagaaataaattggggtgagagaggagagaataaggaagggt

SEQ ID NO: 3576 - DNA, 2231 bp, Artificial Sequence
  chemically treated genomic DNA (Homo sapiens)
atttttttttattttttttttttttattttagtttgtttttttatttgtattatttttttttataagttttttttttttgtttttttataaatgatattagaattgaaaagattagttaataatttttgggatttgttttgatttttaggttaagttttttttgaaaataaaattgtaatgtattgaaataaattttatgttaaaaatttttatgggaaaaaaattagtagtatgtattttggaaataaaatattagtagtattttaatttaggatatattggttaagtattgttttaagaattttataggtaaaatttgattttgagtttatataattttgtaaagtagattataatttatattttatagaagattaaatggaatttggtaaattaatgaattttttaagtttttatagttaggaagagatggagttatattttaaatttaagtttatatatttttatagtttttttttttgttttttataaagtgttaaatttagtaatatttatagtatgtaaagtatttatgtttaggtagtttttatttttgaattttttttaggaaaattttaattgggagtgaggtgggtagagaaatggatttgatttgttattttatgaatttttgtaattatttagtttttgaggtttttgttaaatatttagagaaaatttatattttgatagtttttattagtagattattttaatttggattttgtttttattttttttttgttttttttttttattttagtaataattagttaaaatagttaaaaagttttggaattttagatgtatgttttaagggtaggttaggtttatttatatataaggtattttgttttggtgttatttattggtttttaaattttttagtttttttgtgaaagggtttgattagtatgtggttgggaggaaaatattgtttttttgagttatttatttatgttatttttattttttaggagtgaatgatataggtatatatagagatttttgtttttttttgtaattaatataatgtttaagaattattgtgttgtatgtataattttgggaaggttgataatatgtagttttgttggtaagagttagtgaaaatattattatatttgagaagtagaaaagttaggtttgtttggataaggaagaatgtatttagaaggttggatagatggttagtagtagtttttgggtttttttatggtaagataatgatttatatgaatataagaattagtatgagaaatatttatttattttttaaagttagagattagagatgtaggatgaaagtaaaatgataatgttggtaattaggtatttttttaatgtaatattaaaatattagtgtttatttttagaatttgtaaaaaaaaaaattagaagttagaaaaaatattaatatttaatatattttaaatttaaaaattattatattggataaaattttaagtaaaaaatatagttatgtaagtataaatatgaaatatatattattattttaattattagtagatattagttttatttaaagaaataaattttatagagaaggaaaataattttgaaaaatttaaaatgtaatttgattttttttaaaggggaaagtttagaaatgatgttttaatagtgttttttttgagttgtgtggttattttatagaaaatgttttagttgttttgatagttttttttgtttggaagttaattaagggggatataggaagttatttgtaaattaataaatttttagatttttttatttttatattatttgattttttgtttgatgattttttaagtaagttttatgatattaatgatttagattttatattttaaaggatattaaagtaatagtaatatgttaataataataataaatttttgtattttagtattgagtattagtgagttatattagttttttgggaataagtattgttattattaattgaaaatttaaataatttttttatgtatattgtgaattttaaaattgttaggttttagttttttatttttttattggtagaagtgtttatttatagatttatttgtagaaaaataataaaatggataatttaaattaaatggtataaattaaatgtttaaatatatggatagagtggtgttgggtttttatagtttatgaggatagagttagtgttggtttttttagggttttttagttatagataaattattatttgtta

SEQ ID NO: 3577 - DNA, 2334 bp, Artificial Sequence
  chemically treated genomic DNA (Homo sapiens)
ttagattttgggaataaaattaataattttttaaatatttttaaaatatagttttgatttttattttattaaaaattttgatttaatttgaggagattttgttttattttttaaattaaatgtttttattttttttgtattgtgaatgttttgaattgattagtaagataagaataatattaaaattaatagtgagggtagttttagtattattttgtttttttttaagattttttttggttattttgtttttttttttttgttagattttgagtttttttttttaaaatatggtttgagtatttttttgaagaagttttttttatgttttttattttgttttaattattttatggttagtgtaagtagtatagattttatttgtattttagttatatgtgtttttgttgtttttttttgtttttttattagtttataagttttattgtataaggtttatatatttatatttattgtagtatttataattatgttgtataatattttgtatatagagggaatttaataatttttgtagtttgatttttgggtttttattttggtttttgggtaattatttattagtaaataaattagttattagtgaaatagttatggtttttagagttaattatttgtatttttattgttggaaaaaataatatatattattttttttgtagagaggtatgtggttagaatgttattggtagattttgtttgagagttttgatgtttgtaattttgttttggaaaggtgaattaatttttattttgatttatgtgtttttttaggtttttttagtttaaatgtataaaagttagagaaagttattattataatattgataataataatgataaagatatatatatatagttagtggttgaatatttattagtaagattgttggaaattaagttgtattatatttgttggagtatttaggattatttatttagtgtaggtttagtagttatgtttatttttgtttattttaggtatggtttttttaggtgttagggttattttttttttttttagtggttgttttttttgttggtatgtagtatttgttttttagttttaagtttgtggggtagttaggagagttttgtttttggtttttgttggttttatattttttggtgagtggttttgtatggtagtttagttttggggaattttttaagggagagggtttttttttttttttaatttttttatttttatttaattttattttatattggttttttattattgttagttgttgttttgttaggtattgtggaatatttatatttttttttattatagggtttggatatataggtgttggagttagatatgttgtgttttaatttttaattttttatattaattgttttttttttttgaattttaattttgttatttataaaatagagatagtataataatatttgttttatggtggtgttgttagaattaagtagtaatgttatttgtaatgataatagttgtattgattaagggatttgtatgtgttgggtgttatgtagtgttttgtatttttttttggagtttagtatggtgtttagtttagaataagtagtttgtagttttttttttttttttttttttttttttttttttttttttttattttttaaattaaataggatttgggggtgtagtatttggttttttatgggggtttttttttttttgtagtattttttttttttttataggttatttgagagaatttagatttttatttttagattttttgtttattagaaataggagtttttttatttttttgtttaagttttttatttaatagggtagttttatttttgtttttagttaggtttttaagttttatttttatgttggggttttgtatttggtgttttgttgttttagggaatatagatggttaatagttagagataaggttagttttgtgtttttttggattatagaatgtgtttttaagagttttttttttttattttagtatataggtaggttatttgtattaggaatgttgtaaaatattgattggatatagataattaatgtttaagtataatggtttttaatggagtaggagaaggttaggaattagtagggtatagttatttttttattttgggggaggtagttaagaggaagggtttttggggaaagagggagttgtattttgtattaggggagggggtgagtggaatattaagatttattggattttaggggttattttattgtgggttagtttttgaagaatttttagtagattttgttatatttggttttggttttggtgtatatgtttttattgt

SEQ ID NO: 3578 - DNA, 2334 bp, Artificial Sequence
  chemically treated genomic DNA (Homo sapiens)
gtaatggaggtatgtgtattagagttagggttaagtgtggtaaaatttattaaaggttttttagaggttagtttataataggatggtttttgaagtttagtaaattttggtgttttatttatttttttttttgatgtgaggtgtagttttttttttttttaggggtttttttttttgattgttttttttaggatagggggatggttatgttttgttggtttttgatttttttttgttttgttggagattattatgtttaagtattgattatttgtgtttagttagtgttttgtagtatttttggtgtaaatggtttgtttgtgtgttgaagtggaaggaaagggtttttaggggtatattttgtggtttaggaggatatagagttgattttatttttagttattggttatttgtgttttttggagtaatagaatattaggtgtagagttttaatatggggatggagtttggaaatttggttggaaatagaaatggagttattttgttaggtgggggatttgggtaggagagtgaaaaggtttttgtttttagtgggtggagagtttgggggtaggggtttgggtttttttagatggtttgtagaagaagggaagatgttgtagagaggaaaaagtttttataagggattagatgttgtatttttaggttttatttgatttagggaatgaaggagggaggagaaaagaaagaagaagagggggaaggaagttgtagattatttgttttgggttagatgttatgttgggttttaagaagaggtataaaatattgtatggtatttagtatgtataagttttttggttagtatagttgttattattatgagtgatgttattgtttaattttaataatattattataaggtaggtattattatattatttttattttgtggatgataaaattgaggtttagaaaagagaagtaattggtgtagggggttgaaaattgaaatatagtgtatttgattttaatgtttgtgtgtttaagttttgtgatagggaaagatgtaggtgttttatagtatttggtaaggtaataattggtgatggtaaagggttagtatggagtggggttgggtgagggtaggggagttagggagggaaagaagtttttttttttgaaaagttttttagggttgggttgttgtgtaaagttatttgttaggaagtatgggattaatggaggttagaggtaagatttttttggttgttttataggtttagagttgggaggtaggtgttgtgtgttagtaggaagagtagttattagaagagagagaagtagttttggtatttgggggagttatatttgggatggataaaggtaggtatggttgttgagtttgtattgagtagatggttttggatgttttggtaggtgtggtgtggtttggtttttagtaattttgttggtgggtgtttagttattgattgtatgtgtatatttttgttattgttgttattagtattatggtgatgattttttttgatttttatgtatttaggttaaaggaatttggaaaaatatatgaattaaaataaaagttgatttatttttttagggtagagttataagtgttaaaatttttaggtgagatttgttagtgatgttttgattgtatgtttttttgtaaggaaagtggtatgtgttgttttttttagtagtggaaatataaatgattaattttggaaattatggttgttttattgataattaatttgtttgttgataaatgattatttaggagttagaatagagatttaaaagttaaattgtaaaaattattaagttttttttgtatgtagaatattgtgtaatatggttatgggtattatagtggatgtgagtgtgtagattttgtataatagagtttataggttaatgagaagataggaagaaataataggaatatatatagttggaatgtagatgggatttgtgttatttatgttagttatgggatgattagaataagataagagatatgaggaagatttttttaaggaggtgtttaagttatgttttggaaaagagaatttaaggtttggtagggagaaaggagtaaggtaattaggggaagttttggaggagagtaagatgatgttgaaattgtttttattgttggttttaatgttgtttttgttttattggttgatttagagtatttatggtgtaagagagatagggatatttgatttaagaaatagagtagaatttttttaaattaaattagaatttttgatggagtagaggttagagttatgttttggaagtgtttgggaaattgttagttttgtttttaggatttga

SEQ ID NO: 3579 - DNA, 2500 bp, Artificial Sequence
  chemically treated genomic DNA (Homo sapiens)
tattaagtaatataaaaaatgttttatataaatattatattttttagatagtttaatatattaagaatttttttgtagttatttttatgtttttattttagatattttattttgttttaaaaaaaaaaaagtggagaaaaaaagtagttatattttttattttttaaaaatggtttttttggttgaaaagaaagaaaaatagtatataataaatattttgattttgaagtgtttggattatttttttaagtattgtagtgtttgagattagtaaaaaattatttttttagaaagttattgattgtttaatttttatgagtattgttatggaatttagagataatatgaggagatattttttgtttatgattatagatagtggaaagaattttgatttaagtattttaatttagtaaaatagtttagtagtttgtattttggttttatttattgtttttgtttagttagtaattaatttggagaggattttttatgttttgggaggagtatgtggaagttggtttaagttatagtgttttatttgggaaggaggtgattttgagtttgggaaaattgttgttaatattttatagttattagttttttttttaaaaaatgaattaaaattagaaattagtagtaaatattatttttatttatgttttataaattaggaaaaattagtataaagatatgtgaaatattttatttgggatatttgaaataaaattaaatgggaaaaaaaatatttttatatgtttataatatattaattttaataattaaattttaggtaaatatttttattttaagatatagtataatttttttaaaattaaaaagtaaaataaagtaaaattattgtgaagggaaaaaataattaattggttatttgagtttatatttggaaaaaaataattttttaggtatttaaatgtagagttaaagagtaatgaatatgtatatagtttaaatttataaattatataatttaatgttatatttttttttttgagatttggttaataaattaaatgttgtattttgtatatgaggaattaaagtttatttattggatttagtggttttagtgtaggatatttttgtgtgttgttatagaggtaggtatgtaatttagaaaaaattgaaataggtaatttgttatgttgatagttataagagaaagattttgtgttaatggtatgtttttaattgtgtattttttttatttatagtttgtttattagagttttgagtaggttgtttattaggttgggagtgttgatttagaagatagatgatttttagtatatgtaaattgagtattgtaaaagttattttttatttgtgttagtagtttatagttagtttttagtagttttgtgttttagttgtaaatattttattagattaatgtatttagtataggtagaaaatttgatttattatagttatagtaatgaatttttattatgatgatagttttaattatattatgtttggaaaattagttaattattggtttttaaagaatatatatattttatatgtagaaaatgaggtttttgtgtgtgtgtgtgtgtgtgtgtgtgtgtgtgtgtgtgtgtgtgtgtgtgtgtgttttgtgtttttttttttttagtagtttaagagaaatgtgtagtgtagttttttgttgatatgagttgtaaggtaatgatatttttgtttttttggtagttatatttttgtaataatttgaattatgttataatggttagaatgggtgtttttaatattttagtttttattattttttttttgttgttatagaaattagattgtaatattgtttttttgttttaattttgtagtagtgtgggttaatattaggtttataagatattggtgatttgatagagtgaatgtttgattttggataaataaaataaaaagaaatattataatagtattattgtttaggagattttgtgtgatttttagagtagtgtgtttatttaggtgtgtgtatatattatggttgtatatattaaattagtggttgtttataatatatgtgtatagtttattaaagttggttttgattttggttttaggtttgtatgtgtgtgtgtgtaagtatttttatttattttaatgtggtgggatttgtataggatagaaatagggtaagagtgattatttatttttatgttttattgtattttttgtagtaaattaatatatattggtgaagggattttttttttttttttttttttgtaaagtggagtagggttttttattgtttattttatttattttgggatattggtatatttataggtattttttataagatgaaatatttattttataaatatgtggtttatttttagggatgagtagtaaataaatttagttgggattaaatattaattagggttaatgaaggtttaggttataatttggttagttattgagagtgaaaaaaattgtaatggataatttgaggtttttt

SEQ ID NO: 3580 - DNA, 2500 bp, Artificial Sequence
  chemically treated genomic DNA (Homo sapiens)
gagaaattttaagttgtttattgtagttttttttatttttagtaattggttaggttgtggtttaagtttttgttagttttggttgatatttagttttggttaaatttgtttgttgtttatttttaggagtaagttatatgtttgtagaatggatgttttattttgtaggaaatatttgtgaatatgttaatattttagagtggatgaaatgggtaatggggagttttgttttattttataaaaagaaaggaaaagaaaagatttttttgttgatatatattgatttgttgtagaaaatgtaatggggtatgggaatgaatagttatttttgttttgtttttattttgtgtaggttttattatgttgaggtgggtagagatgtttatatatatatatatataggtttggagttaaagttagggttggttttaatgaattgtatatatatgttgtgggtagttgttgatttaatatgtataattatggtgtgtgtatatatttggataggtatattgttttgggaattatatagggttttttgaataatgatgttattgtaatatttttttttgttttatttgtttaaagttaaatatttattttgttagattattagtgttttataagtttggtgttggtttatattgttgtaggattgggataaagagatgatgttatagtttggtttttatggtaatagaggaggggtaatgaaaattgaaatgttggaaatatttattttaattattgtgatataatttaggttattataaggatgtaattattaaagaagtagaagtgttattattttgtagtttatgttgataaaaagttatattgtatattttttttaggttgttaagaggaaggaaatataaaatatatatatatatatatatatatatatatatatatatatatatatatatatatagaggttttgttttttgtatgtaaaatgtgtgtgttttttaaaagttagtggttggttggttttttggatatgatgtggttgaagttgttattgtaatggaaatttattgttgtagttatggtaaattgagttttttgtttgtgttgaatgtattagtttaatgagatgtttgtagttggagtgtagggttgttggagattaattgtgagttattaatatgggtggaagatagtttttgtaatatttggtttgtatgtgttgaaagttatttgttttttgagttaatatttttgatttggtaaataatttgtttagggttttggtgaataagttgtaggtaagggagatgtataattggaggtgtgttgttgatatgggattttttttttgtaattgttagtatgataggttatttgttttagttttttttgggttgtatgtttatttttatggtaatgtataagagtgttttgtattaaaattattgagtttagtaggtaaattttagttttttatatgtaaagtatagtatttaatttattaattagattttagaggggaaaatgtaatattgaattatatagtttataaatttgggttatatatatgtttattattttttaattttgtatttaaatatttagaaagttatttttttttaaatgtgaatttaagtaattggttagttattttttttttttatgataattttgttttgttttgttttttaattttaaaaaaattgtattatgttttgggataaaaatatttatttaaaatttggttattaaaattggtatgttatgaatatgtaaaagtgtttttttttttatttaattttattttaaatattttaggtagaatattttatatgtttttgtgttggttttttttaatttatgaggtataaataagaataatatttattgttagtttttggttttaatttgttttttgggaaaaaaattggtgattatggagtattagtggtagtttttttaagtttaaaattattttttttttaggtggagtattgtgatttgaattagtttttatgtgttttttttaaagtatgaggggttttttttaggttgattgttggttggataggagtggtggatgaggttagggtgtaggttgttgagttgttttgttgagttgaggtgtttgagttaaagttttttttattatttgtgattgtgaatgagaggtgtttttttgtgttgtttttagattttatgatggtatttatgagggttagataattagtggttttttgagaaagtggttttttattgattttagatattatagtatttgagaaagtaatttaggtattttagaattagggtatttgttatatgttgtttttttttttttttaattagaggaattatttttgaagaatgagggatatagttgttttttttttttatttttttttttttaaagtaaaatagaatatttggagtgaaagtataaaaataattataaaggaatttttagtgtgttaaattatttggggggtataatatttgtgtggagtattttttgtgttgtttggta

SEQ ID NO: 3581 - DNA, 2442 bp, Artificial Sequence
  chemically treated genomic DNA (Homo sapiens)
tgttttttttttttataattttaattatttaatttatatttatttttattgagttaatgaaagtaatgttattgttggtgagagtatatttaaggaaaaatatttttttttattttatataattatattttatttttttaaatttatattgatatatagttgaaaagttggttattattttttttttttgttatttattaatggtgaagtattgtgtttttttttgtaggtgttttaagattaggatgatatggtttttttagagtgtttttaggagggttatggtgtataattttataattttagaataaggaaataaaatatttaaaataaagatgtgaagaatatttttatagatggtatttataatttttgttataaatttaaattttgatttaattgtttagtattgtttttaataatttattgtatttatttgattttagtgttaagattatattgtttttttgaggttagattgtattttaatgttttgatattttttttaaatattaataaaaaagtggattttttgaagtttagtaattattagttggttaatttgtttggaaaattgtaatttttttttaagatttttaattttttatttaggattttaatttattttttaaaagattatttttataagtagtgttttatatggtaagtattaattatgtggatttgggggtaatagttttgtttttttattttttttttaaattttggaagttaatagatgatataaagtttagtagagttaatgattttaattttaattgttattatagtttttaataattgtatatttaaaatattaattagaaattaagagttttaatttgattttgtaaaaagtagattgagaaatgattttaggtttttattatgatttaatgggttttatgtatttagaatgattttttttttaaggtaggtaaagagttttaatagattaaatatagagaagtatgttgaaagttatggtaggttggtgttaagtaataaaattgaatttttagtttgtttggtattagttatgtgttttttagatgttggaagaggagtgaaggaggattagaaatttttttattttaatgatggtttttttttttgtgttttattttatttttttgtttttagttatttttagtttttaatttgggttttatatttattttggttttagagtatagatttttttgtagttgggttggtgtgttgtggtgttgaggagttgtggtgtgttttttttattgtgattgtttatttgttaggtgttatgtgtgggtgatgttattgggttttatgtttttattgttgttatttgtttatgtgagttgttttttttttattgtttttgttttttttattatggagaaaattttgtatgtttttttttgtgaaaagtagagtttttttttttttattattattagttgatgaggaaagaaaatgtttgtttgtatatttgtgttgtattaggaggaggagggaggttatataaggatttgggttgtttagggggtggtttgaaaaaggaggtgtttgtatttaaataagaatgtttgaattaatgtagtttaatttaaagagttaattaggagtttataggtgtttaagtttgtagtgtgttgttagtgttatgttaatgatgtattttagttatataggttgttagttttaggtttttttataaatattttatgtttttgttttttttttttgttggtaatagttttatggtgagaaaatttatgaagagtaataggaataatttttatgaaaatatgtagaatttttgatttaaggttattggttgtaagtttagtatatgtattaagtatgggttaaagatatgtttttttttttagaaggtggatgagtaataggtgtatttttttttatttatagttgtttttaaagtgaaaaggagtgaatttgtttatgatttagaggaagagagatgggttaaaagatgttaagttaaggattaatatttgttatattttggttttttgtaagttatgtaataagaggtttgagattttattaattttggagatttatttgggtataattgaaattataataaatttggtgtttagtgttatttttttttggtagtgttataaggtaattttaagggattagtatatagatattgttttagtttttttttgttgtttattttagtttatgtagtattgattaaaaattttggaatttagattgtttaatgtttatatttatatttaatattaaaatttattattgatagtttgtttttttaaatatttatgaaatttagtttttaatttgttttttatttttatatttatgtttttattatattttgtttaagttattaattggatattttaaatatttatatgtataaaatttttgtttatttatttgttttttttttttagtgttgaa

SEQ ID NO: 3582 - DNA, 2442 bp, Artificial Sequence
  chemically treated genomic DNA (Homo sapiens)
tttggtattagaaagaaagaataaataggtaggtagagattttgtgtatataggtatttgaaatgtttaattaataatttaagtaagatatggtgaaaatatgaatatagaagtgagggatagattgaggattagattttataaatatttagaaaggtaaattgttagtaatgaattttgatattggatgtagatataagtgttaagtagtttaaattttaaaatttttagttagtgttgtatgaattgaaataagtagtaaaagaaaattaaaataatgtttgtgtgttgattttttgaaattattttgtaatattgttaaaggaaaatggtattgagtattaagtttgttatagttttagttgtgtttaagtgagtttttagagttggtgaaattttaagttttttattgtatggtttatagagaattaaggtatgatggatattaatttttggtttgatattttttgatttatttttttttttttaggttataagtgaatttatttttttttgttttgaaaataattgtgaatagaagaaaatgtatttattatttatttgttttttgagagagaaaatatgtttttaatttatgtttgatatgtatgttaaatttgtagttagtagttttgggttaggagttttgtgtatttttataagagttgtttttgttattttttgtgaatttttttattataaaattgttgttaatggggaagagggataagaatatgaagtgtttatgagggagtttgaaattgataatttgtgtaattggagtgtgttgttggtatgatattggtagtgtattgtaaatttaagtatttgtggatttttaattagttttttaaattgaattatattaatttaggtatttttgtttgaatgtgaatgtttttttttttaagttattttttgggtaatttgaatttttatatgattttttttttttttttagtatggtgtaggtatgtgaatagatattttttttttttattaattggtggtaatgagaaaaagagaattttgttttttataagggaaaatgtgtaagattttttttgtagtaggggaggtgggggtgatgggaggagagtagtttatgtaggtagatagtggtgatgaaagtataaagtttagtgatgttgtttatatgtggtgtttggtaagtgaataattgtggtgagaggggtgtgttgtagttttttaatgttgtaatgtgttggtttaattgtaggaaggtttgtgttttggagttagggtaaatgtaagatttggattggagattagaaatggttagggatggggaggtggggtgaagtataggggagagaattattgttgaggtgagggggtttttgatttttttttgttttttttttggtatttggagggtatatagttaatgttgggtagattgagagtttaattttgttgtttagtgttgatttattataatttttaatatgtttttttatgtttagtttattgaaattttttatttattttaaaagagaaattattttaagtatataagatttattgaattatagtagaagtttgaagttattttttaatttgttttttatgaagttaaattaagatttttagtttttaattgatgttttgaatgtatagttattagaaattgtaataataattagagttggggttattgattttgttggattttatattatttattggtttttagaatttaaaaaaaaaatgaagagataaagttgttatttttaaatttatgtagttaatatttattatgtgggatattgtttatggaaatgattttttaaagaatgggttgaagttttagataaggggttgggagttttgaaaaaaggttgtaattttttaagtaagttagttaattagtagttattgaattttaagaagtttatttttttgttagtgtttgaaggaaatattagggtgttgaaatataatttgattttagaaggataatatggttttaatgttgaaattaaataaatatagtaaattattagaaataatattaaataattgagttaaaatttaagtttgtgataaagattatagatattatttataagggtattttttatatttttattttaaatattttgtttttttgttttagggttataaaattatatattatggtttttttaaagatattttaggaaaattatgttattttgattttaaaatatttgtaagaaagagtatagtattttattattagtaagtagtaaagaaaaaaaatggtagttaattttttaattatatattaatatgggtttaaaggaataaaatgtaattatatggaatagaaaaaaatatttttttttgaatatatttttattaatagtgatattgtttttattgatttaatgaagatgagtataggttagatggttgaggttatgagagagaagagta

SEQ ID NO: 3583 - DNA, 2386 bp, Artificial Sequence
  chemically treated genomic DNA (Homo sapiens)
ataatttaattattttttagtaatttgagtattgtgttttattaaaaaatattttaaaaaatgagttatttgtagaatttataaaggatgtttttttaaaaaatgaatatattttaaattgtttatataaatagtttttaatatatatattagaattagtaagttaaggttatttttgtaatagtttatttttgataaaattatttgtgaaataaaaaaaagaaaaagaaaaaattttatttgttgagtttttgtaaaagatattgtttaatttgttagattgattttttaattaaaatttaaaataatggaataaaaatttaatagtttaaaggttaaagttagttaatgtatatttttaaatttgtaattgatttatttataagtaaaaatatttataaagtttaattgattttttattttgtatattgagaaatagtattttgtattttttgaataatttataagtttgaattttaaggtatatatatatatgtgtgtgtgtgtatatatgtgtgtgtgtgtgtgtgtgtatatatttatatatatgttgtatttatgtttaattattttggttataaaggttaaaaggataaagtggttataagttataatgggttggagaatttggatggaatgtggatttaaattattgtgttatgttaatttgttgaaattttattgttaaaattttgtattgttaggtagtaaaatagaagaaaaaaaaataaattgagaaagtgttaatttttaagtaagtttgataaagattgagttttatatgataaatattgttagtaagataggattttgttagtggaagaagtttaaatattaataatttttgttaggttgttgatataattatggtagatattttttaagatgttgagatgattgttggtatttgttaataattttgttatagtgatagtaataaggttatgtttggaaatgtgatagttttggttttgtgtttttttgagtaatagtttaggtgtttagagaaagtgtgggaaaatttatatttttgtattgttatttgaatatagaaaatataggaggaaaatgagttgttattttaatttttatgatgttttgttgtttagtataattttatagtgtggttttgggtttattggtttatattttgatagataattaagaaagtagtagttttttttagatggtttttttttatgatttgtattttagttagaggtgattagttataaaaaaaatatgatggaaagatggtaagaagttaattagatggatggatggttgattgatagttttttggtattatgattttagattttagattatatagtttggtagttttttataagaattaatttttttgtaggttggtaaagttgttaaatgtgggattatatatagttttatataatttttgtaaagttgtatattttttttaaataagtatgtattttttttaattagggtttgtattaaataagttttaataatttaattataatttgtattattaaatttagtaatattaaaattttagataatttgtaggtatattagttgtgttagtagagaagtgattaaaaagttgagaagtattttgagttagtagagataaagtgagttaataattataatgtttgtgtaaatatgttttggaattttgaattgtatattgtttgtttttaagtaaataaaaatatagattttaaattttttttttgtttttagattttgtatatatatatttggttattatttttgtttagggtataatatatgtttgtgtgtttgttattttagttaattttgaaatttttaaaaaataaattgttagtgttaagtttttagtttggttatgatattttatagtttttagttaataggagttaattttttataatattttatagtttggaagttttattaatgttttttgtgtattgtatgttgtgtgtgtgtgtgttgtgtgtgtgtgtgtatatatatatatatatatttgttatatatatattaatatatattatatattagatatatatatattaatatatatattagatatatataatatatatattgttaaaagtaaataatttgttattagtttggtatgtttttatttgtagtttgaaataagaaattttttttttaaattgtaaagatattttagatttgattttaattttgaaatatgaagggtaggtaattattttattatatattgaagttttagtaaggaatattaatttaaggtagaaatgtgagtatatttttttattgtgggtaatgaattttttataaattgaggataattattaaattaatggtaggtttgaatgtttttagttgtttaaaattaaataatatatattttaaagtttta

SEQ ID NO: 3584 - DNA, 2386 bp, Artificial Sequence
  chemically treated genomic DNA (Homo sapiens)
tggaattttaaaatgtatattgtttagttttaagtaattaaaaatatttagatttattattagtttaatgattatttttagtttgtagaagatttattatttatagtaagaaaatatgtttatgtttttgttttgggttaatattttttattggaattttaatgtatagtgaaataattgtttattttttatattttaagattaaaattaaatttgaggtatttttataatttgaaagaaaaattttttattttaaattataaatgaagatatgttgaattaatagtaaattgtttgtttttaataatgtgtgtgttgtgtgtgtttgatatatatattaatatgtgtgtatttgatatataatatatattaatatatatatgataagtatatatatatatatatatatatatatatataatatatatatatatggtatgtagtatataggaaatattggtgaagtttttaaattgtaaaatattgtgaagagttgatttttattggttagaagttatagaatattatggttaaattggaagtttgatattaatagtttattttttaaaaattttaaaattagttaaaataatagatatataagtatatattatattttgaatagggataataattaaatatatgtgtgtaagatttaaagatggagaggaaatttagggtttatgtttttatttgtttaaaagtaaataatgtataatttaaagttttaaagtatatttgtatagatattgtaattattagtttattttatttttgttggtttaaagtattttttagttttttaattatttttttattggtatagttaatgtgtttataagttgtttagaattttaatattgttaaatttagtgatgtaagttgtgattaaattgttgaaatttgtttaatgtaaattttgattgaaaagaatatatgtttatttaaggaaaatgtataattttgtaaaaattatatagagttatatatagttttatatttaatagttttattaatttgtaaaaaagttggtttttgtagaaaattgttaggttatgtagtttgaaatttggagttgtaatattagagagttgttagttagttatttatttatttaattggttttttattatttttttattatgttttttttataattggttgtttttggttaaaatgtaaattatgaggaagagttgtttagaaaaagttgttgtttttttaattatttgttagaatatggattagtggatttagggttgtattgtagagttatgttaagtagtaaggtattatgggaattggagtgatagtttattttttttttgtgttttttgtgtttgaatgataatgtagaaatatgggtttttttatattttttttgaatatttgggttattgtttaggggagtataaagttaaaattgttatatttttagatatggttttattgttgttattatgataggattgttgataaatgttagtagttattttggtattttgggaaatgtttgttatgattgtgttaatagtttgatagaaattgttaatgtttaaattttttttattgatagaattttgttttgttgataatatttgttatatgaaatttaatttttgttaaatttgtttaaaaattaatatttttttaatttattttttttttttttgttttattgtttagtagtgtaaaattttagtaataagattttaataagttaatgtaatatagtaatttagatttatattttatttaaattttttaatttattataatttgtggttattttgtttttttgatttttgtagttagaataattaggtataaatatagtatatatataaatatatatatatatatatatatatatatatatatatatatatatatatatatgtatgttttaggatttaaatttgtgaattatttaagaggtataaaatattattttttagtgtatgaggtggaaaattaattaaattttgtggatgtttttatttataagtaaattagttgtaaatttgaagatatgtattaattaattttgatttttaagttgttaaatttttattttattattttgaattttgattaaaaaattaatttgataagttaaatagtattttttgtaggaatttagtaagtagagtttttttttttttttttttttattttataagtgattttgttaaaagtggattattatagggatagttttaatttgttaattttgatatatgtgttagaaattatttatgtgagtagtttaaagtatatttattttttaaaggaatgttttttataaattttataggtggtttattttttgaaatattttttaatgagatataatgtttagattattagaaggtagttaaattgt

SEQ ID NO: 3585 - DNA, 2300 bp, Artificial Sequence
  chemically treated genomic DNA (Homo sapiens)
attattgtttattggatttaaaagttttattttattttttatttttatttttttgggaagttttaggatatatttttttttttttttttaataggtatggatatttttattttatttttatttttttttattttttattatattttaagttttagggtatatgtgtataatgtgtaggtttgttatatatgtatatatgtgttatgttggtgtgttgtatttattagtttattatttatattaggtatattttttaatgttatttttttttattttttttattttatgataggttttggtgtgtgaagttttttattttgtgtttaagtgtttttattgtttaatttttatttatgagtgagaatatgtagtgtttggttttttgtttttgtgatagtttgtttagaatgatggtttttagttttatttatgtttttataaatgatatgaatttatttagatgtatttttatttttttatttattattttgaaatttttaaaatagttatttagtattttttttttaaatgtgtttgttttatttttatttaagtttgttgtaattatatattgaatatttttaaattttgtttaagttgattttattatttttgttttaaattttaattatgttttaaatgtataaaaattatgtattatatataattatgaattataaataattaaatgtatttatttttaaaaatatgattgaagaaattttttttttttgtaattttttttttaagattaaatgagtttttagtgtttgtttgatatatggtaggtttttaataaatgaagtatattttttatatttttttaaataaatagttgtttttttaaatttagatatgagtgtttagtaggtatgtatttttttgggttggatttattttatggatagttgttaaagattgatttttttatgttaattttttgaatattgtgtttgattgtgttgtaagttaaatagtataggattaaatgtttttatttttgagttgtgaagtgttgaaattgattaagaaatgaaggtagaatgtttgttttttgggagaataattagttagtttatgttgttgttatttttggttgttgattggaatgtagttgttaaggtagttgtttaattgtttgtttaatttgaaaggatattgttaaatggtaaatattttttataataatattttatttttgttaagaataataatagtgtattttattgagttttaatggtgtgttaaatatgatagatttattattaggtaggtttataatttggattgaatatggatgtttatttttattttttatatatttagaaaaagaataaatgggtttttaaaggaagtttttatataaaatatttttatagtttaattatttgttgaaatgatagtatattaatttgagaaaatgaaatattttaaaaggaaagatgagagtttagaaatattataggaaaaaaataaggtttaagtattttaaatttttttaatgtggtttaagagagatttaatttatatttgtttaggataggtgagggtagtagtaatataaggaaatatattatttgttgaattttttgtaatttatgggttttaggatttttgagttatgtagttaatttatattgttaattagaatgttgatattaagtatttaataaataattatgttgaatttgatagattgtgaattaggtgaggtggggtgggaggttattagttgttatttaatggtaaaattggtatgttaaatgtaggtagttaaaattaagaaaatatatttaaatgtggaagtataattttttattagaagttagtaataattgttatttatagaagttattgtgtaatttttataaatatttattaagattgtagaggtgaggggtggtggggggtgtatttttatttattaaattttatagttaaagttgaagtagagatgtttttgaaggtgaattgggttaattaaaggtatggttagtggagattttaatttattttttttttattgtttattagatgttaattaaattataaatgataatagtttaatagtaaaatgtatgtatttttataaagttgatatgattttttggataaagatagataaagtttaatatgttggataatggttattgagggtattaagatttgtgatttttttttttagggatatagaaaaatagtaaatataaattatggatgaaatttataagattatttttatagaaagggtttagttgttggagaaaaaattggttgtgtaattgattgaattgaagttt

SEQ ID NO: 3586 - DNA, 2300 bp, Artificial Sequence
  chemically treated genomic DNA (Homo sapiens)
agattttagtttagttagttgtatagttagttttttttttaatagttggattttttttgtggaagtgattttataaattttatttatgatttgtatttgttgtttttttgtatttttgaaaaagaggattataaattttgatgtttttagtgattattatttagtatgttgaattttgtttatttttgtttaagaaattatgttaattttgtagaaatgtatgtattttgttattagattgttgttatttgtgatttaattaatatttagtaaatagtagagaaaaagtaggttagaatttttattggttatgtttttgattagtttagtttatttttaaaaatatttttgttttagttttggttgtggggtttaataagtgagaatgtattttttattattttttatttttgtagttttgataaatgtttgtggggattatatagtaatttttgtgaatggtagttattgttgatttttaatagaaaattgtatttttgtatttgaatgtgtttttttaattttgattgtttatatttagtatattggttttattattaaataatagttgataattttttattttattttatttggtttatagtttgttaaatttaatataattgtttgttaagtatttagtattaatattttaattaataatgtagattaattgtatgatttagaagttttgggatttataagttgtaggggatttaatagatgatgtatttttttgtgttattgttgtttttatttgttttggataagtatgagttaagttttttttaggttatattagagagatttaaaatatttaaattttattttttttttgtgatatttttagatttttatttttttttttgagatattttatttttttaagttaatatgttgttattttaataaataattaagttgtagagatgttttgtgtagaggttttttttgggagtttatttattttttttttaaatatatgaaaaatggaaatgagtatttatgtttagtttaggttgtgaatttgtttagtaataaatttgttgtgtttggtatgttattggagtttaataaaatgtattgttattgtttttagtaaaagtaaaatgttgttatagaaaatatttgttatttggtagtgtttttttaagttgggtaaatagttaaatagttgttttaatagttgtattttaattggtagttaagagtggtagtaatatagattggttgattatttttttaaaggatggatattttgtttttattttttgattagttttaatattttatagtttagaaatgagaatatttaattttgtattgtttagtttgtaatatagttaagtatagtatttagaaaattaatataaaggggttagtttttgataattgtttatgaaatgaatttaatttagagaaatatatgtttgttgagtatttatgtttaggtttaaagagataattgtttatttggaggggtatgggaggtgtgttttatttattgagaatttattgtgtgttaggtaagtattgggaatttatttagttttagaaaagagattgtgagaaaagagaatttttttaattatgtttttaaaaataagtatatttaattatttgtaatttataattatgtataatatataatttttatgtatttaaaatgtggttaaaatttaagataaaaatagtaagattagtttgagtaaggtttgggggtgtttaatgtgtggttatagtaggtttggatggggataaagtagatatgtttagaaaagaaatattgagtaattattttaaaagttttaaggtgatgagtaaaagaatagaaatgtatttagatgagtttatgttatttgtagggatatggatgaagttagaaattgttattttgagtaaattattgtaaggatagaaaattaaatattgtatgtttttatttgtaggtgggaattgaataatgagaatatttggatatagggtggggaattttatatattagggtttgttataggatgaggggagtggggagggatagtattaggagatatatttaatgtaaatgatgagttaatgggtgtagtatattaatatggtatatgtatatatatgtaataaatttgtatgttgtgtatatgtattttagaatttaaagtataataaaaaataggaaaaaataaaaataaaataaaaatatttgtatttattaaaaaaaaaaaaagaaatgtattttagagttttttaaagaagtgggagtaaggggtgagataggatttttaaatttaataaatggtggt

SEQ ID NO: 3587 - DNA, 2441 bp, Artificial Sequence
  chemically treated genomic DNA (Homo sapiens)
gttttattttggtatataaatttaaaggataggaaatggaatagaataataaaaataaatttttaaatttagaattattataaatagagtagtataaagaggtagaaagttttattttatggtatgttgtatttgttttaaatatttgatttaaaattagatattgttggaaatattatatgatttttttattggtaggagttattttgaaatgattgtaatataaataggagtagagaagtttattaaatttttttttaaggatatttatgaattagggtattataaaattggaaatattgaaaaggtttttaaagatattgtttaatagtgaaagaaatgaagaagaggttatatttttgtttattttttggttttttttgtaggttttttttttttatattttaaagaagttgttattagttttaaaaaaaaaaaaaaagttttgggaaggtgattagggagggtgatgtagagttttgttaataggttaatttaagaatagttgttaaaattatatagaggagagttaattggggagataattatttgttgtgttgtaggagattattaagtgagttttttaaggttataaatttaattatttagttgtatgaaatagttaattggtaagaaaatagttatgattttttgtttatttatgtttttgtttataggttattttttagattgaatggttgaatatagtattatagatttttatattataggaatgaaagtaaaatgtttttattaataataaatgttttttattgtaaataataatttaaatttttatttttataaaagtttgatatataagaaaaggaaataaattagattttgtttatttaatgagataaatattttttttaagtgtgtatgttgtgtgtttttagttagtaagattttttttttaaggaatgatgaaagttaaaatattttttaaagtataattattaatagaaaataggaagttaatttatttgttttttgtgttagtattttattatttttttatttgtgtttttgttttttaggagggttaattgttgagtttaggtttttagaagggtattgaattgttttagggtttgttttagttgagttatttggtttgagaatttttgttttgaaagggttatttggttgattaggttttttaaatagttttgtgtttggaatatattgtttttttattgtttttagttggtatgtagggtttgtatttttgtgtgtatgagtttatatttattggtagttgtgttttgttttattttgggagttagtgattttattttgttgagatggtttgtattaatttttttggaatttattagtttttgtaatggaatattattatggtaattgaagagtttgtgagttatttggattgtaagtttttaattgtgtatatagggggattttgttttgttaggaagttttaataagtgtgttataaggatttagaattaatttatttgtttatttttaaattataatagtgggagttgttattatgagtgtttaaggtttatggtaaaaaaattttgagaatttttaatattttgaaatagattaaatagagattttgaaattaggtattatttgtatatgtgaaaatgtttagtgatttaagtgtttgtttgtggtggattgtttttgtgaatgattaaatttatattttttttaaagtggatgtttaagtaaataaagattgtggtagaattgtgttttgtttatggtttttatatttaatttattttttttaatagggtggtggtttaaattatatttttattttattaggaattaagtagatttattatagtaaaagaatgagttttatttgattttaaatattttaatattaagtaaatatttttgtagtatataaaatgaataatttatttatagattgatttatttaaaagtttaaagtaatttttagattgagtatatttattagtatttttttattttaaaaaagttattagaaatttaatagtttagttatagttaagttaataatttagtttgattttaaagtatataaatattgtaaaggaaaataagataaaattaaattatattgttaaattgatataattgtagtatttttgagaatagatttttttattaaaattttttttggtgaaataattatttgatgtttatatatttatatatttattgttaaaggtaggattttgttaatattattataaaattatgattttattattggattaaatagaaataaaagataattaggtataaaaatgtttaagaagaaaattaatgattaattagtaagtaaagaaatattggaatgttaagtatgaagtatgtttaataaattatgttaagtataaagtatgttttaattagtttatataatatagtttgtattttattaaattaatttgaaataaatatat

SEQ ID NO: 3588 - DNA, 2441 bp, Artificial Sequence
  chemically treated genomic DNA (Homo sapiens)
atatatttattttaagttaatttaatgagatgtaaattatattatatagattagttaagatatattttatgtttaatataatttattaagtatgttttatatttaatattttaatgtttttttatttgttaattggttattgattttttttttgaatatttttgtgtttgattattttttatttttatttaatttggtagtaaagttataattttgtaataatattaataaaattttgtttttagtaatagatatgtaaatatataaatattggatgattattttattaagaaaaattttagtaagagaatttatttttagaaatgttgtaattatattaatttaataatgtgatttaattttattttgtttttttttatagtatttgtgtgttttaagattgagttaaattgttaatttggttatagttaaattgttaaatttttagtgatttttttaaggtaaaaaaatattaataaatgtatttagtttagaggttattttaaatttttgagtaagttagtttatgaatgaattatttattttatatgttataaaaatgtttatttagtattgaggtatttggaattgagtagggtttatttttttgttgtgatgagtttgtttgatttttagtagaatggaagtgtgatttaagttattattttgttgaagaagatgaattgagtatagagattgtgagtagaatatagttttgttatgatttttatttatttgagtatttattttgagggaaatatgggtttaattatttataggagtaatttattataggtaaatatttgagttattaaatatttttatgtgtgtgaataatgtttgattttagggtttttgtttagtttgttttaggatattgaggatttttgggatttttttgttataagttttaggtatttgtgatgataatttttgttattataatttaagagtggatagatgaattgattttgggtttttgtggtatatttgttaaaattttttggtaggatagggtttttttgtgtatatagttgaaaatttgtagtttaagtgatttataggttttttagttattatggtgatattttattataggagttgatagattttagagagattggtgtaagttgttttagtagagtggagttgttggtttttgaagtgaaatagaatataattgttagtgggtgtgagtttatgtatatggagatgtaggttttgtgtgttgattggaagtagtgggaagatagtgtattttaaatgtagagttgtttggagaatttggttagttagatggtttttttggagtaggaatttttaggttaagtggtttaattggagtaggttttggaatagtttagtgtttttttgaaaatttgggtttagtagttaatttttttggaaggtaagaatatggatgaggagatagtggaatgttggtataaaggataagtaagttggttttttgttttttattggtggttatgttttaaaaaatgttttgatttttattattttttaaaaaaaaaattttgttaattaaaaatatgtaatatgtatatttggaagaagtatttattttattaaataagtaaagtttgatttgttttttttttttatatattaaatttttgtaaaaataaagatttgggttattatttgtggtaggaaatatttgttgttagtggagatattttatttttatttttatggtgtaagagtttgtaatattgtatttagttatttagtttgaaaaatggtttgtgggtaggggtataaatagatagagagttatagttgtttttttgttagttaattattttatataattaaatgattgaatttatagttttaaaagatttatttggtaattttttatagtatagtaaatagttatttttttgattagtttttttttgtgtggttttgatagttgtttttgaattagtttgttaatagaattttatgttattttttttggttatttttttgagattttttttttttttttgaagttaatggtagtttttttagaatgtgagaaagggaagtttataagggagattgaagaatgagtaagagtgtaattttttttttgttttttttattgttaaatagtatttttgaaagtttttttaatatttttagttttataatgttttgatttatggatgtttttaaaaggaaatttagtaaatttttttgtttttatttatattataattattttaaaatagtttttgttagtaagaaagttatgtagtatttttagtagtgtttggttttaaattaagtatttgaaataaatgtagtatgttataaaataaagttttttatttttttatgttattttatttataatgattttaggtttgggggtttgtttttgttattttgttttattttttgttttttagatttatgtattagaataaagt

SEQ ID NO: 3589 - DNA, 2311 bp, Artificial Sequence
  chemically treated genomic DNA (Homo sapiens)
atatttgtgtttatttatttttttttgttttttataagaataattattattgtgatttttttttatattttattatttatttttttaaaagaatattttttattgtttaaatgttatataattataaaagtagagagattatatttatttttagttttagaaattatgaattgatagttaattttttttatttatatttttatttattttttttttaatttttttgttaaattatgttatttagatgttgggtattatattataggattttttaatatattatggaaattgattattataaagtttttattgttagttttttttttttttaggttatggttgtttttttttttttggaatattttgatgttaaatgatgttttaggaattataaaattaaagtaagaagggaggtataagtttatttattttattattttaaataatgtaattgtaataaaaagtattttattttttttttttttatatttttttgaatttgtttgtattaattgaagtttattttttattttgattttgtttgtagaaatgtttatttttggggaattggttttagttttattttgttttaattaggttaaaaaggatgatagttttttttttagtttaaaggaagtagagagtagaaataaatttattgaaaattattatgttagtagattaaatttttgtgaagttggagggtttaatataaattatagtaaatatagttttagttattttagttttagatatgttagtataaaaatttttttttttatttttatttgtgtttttgtatttatatttatattggataatatgtaaagatttatatatattttttttatttttaggaatttttgttttataataaagattaagagttttttatagtagatttataagtttatgttttttgtatttgggataattattttttattattttaagaattgttaatttagaattttttatttagtagtgtagtaatttaaggaaaagtgttgtttatttttgttagtgggttagtagattttttagtgttgtttgttttttttttgttttttttaggatgtttttgtattgttgttgtagagttgtagttttttgaatataggaatttttgtttataatttttttggtattggttgagaaggtagtgattgtgttgtttagtgattttagggtttggtagagattttaagaagagtgtgagaagaatgtagtgaaagtataggagttaatgaggtttgtatttttttttgatattgattattgtaaaatatttttttttagttataataaataggaatagtattaagaatgggtataaatatatagtttgatagaagaaatgagatttagtgtttaatagattagtagggggattataggttataataatttattttatattttaaaatagttagaaaatagtttgaatgttttttgaataaataaaatataaatattttaggtgatgaaggttttaattttattgattttatttttataaattatatgaatatattaaattattatatgtgtatttttaaaaataaataagagttatatttattttaaaaggtttgtgtttatgatttgtagtaagatatagtgaaaatgagaagaaagtgattttataaatatagaaattaaaaatgaaaatggagatatttttttaaataagaatgtattgttatttatttaaaaatttttaatttttttttaataatttaggtaatttgtgaagattattagttattttatgttaaatatgtatttaaaaattttatttttaatttataaaatttatatgtaatatgttataattattttaaaaaatatatataaaaagaattatggttgaagaagttattgtttattttaatagtaataataataataataataataataataataatgatatagtgttttagaatgtggtaggttttgtattatttgttttttatgtattgattttttttatttttttgagaattttaagaggtatgttattttattatttttattttatagattaggaaattaagatatagaaaaataatttgttttaggaaatttaaatattggaaaagtagaatattagtttttttggttttttattattaatttagttgtttataaaaataattttattatattgaatttttttatttttttttattttttgtattaagaaattataaataagtaatgtaaaagtgtatttttattattaatatttaaataatagaaattttatttttttttttagatggtttttgttaatggtttgtttttt

SEQ ID NO: 3590 - DNA, 2311 bp, Artificial Sequence
  chemically treated genomic DNA (Homo sapiens)
agaaaataagttattgataaaggttatttggaagagggagtgagatttttattgtttaaatattgataatgagaatatatttttgtgttatttatttgtaattttttaatataaaaaatgaggaaaagtaggagaatttagtgtgatgaaattatttttatagataattaagttaataatggaggattaaagaggttaatattttatttttttgatatttagattttttaaagtaagttgtttttttgtgttttgattttttaatttgtaaaatgaaggtaatgaaataatatattttttagggtttttaggaagatgaaaagagttaatatatgggaagtaggtaatgtagggtttgttatattttgaggtattgtgttattattattattattattattattattattattattattgagatagatagtagtttttttagttataattttttttatatgtattttttggagtgattatagtatgttatatgtgggttttgtaagttaagaatagggtttttaaatatgtatttagtataaaatgattaataatttttataagttatttaaattgttaagggaaagttgaaagtttttagataaatagtagtgtatttttatttgaagaagtgtttttatttttgtttttgatttttgtatttatgaagttattttttttttatttttattatgttttgttgtaaattatgggtatagattttttaaaatagatataatttttatttgtttttgggggtgtatatgtgataatttaatatatttatataatttgtaaaagtaaaattagtggaattgggatttttattatttaaaatatttgtgttttatttatttaagaaatatttaaattattttttagttattttgaaatataggatagattattgtaatttatagtttttttattaatttattgaatattaagttttattttttttattaaattgtatatttgtatttatttttagtgttatttttgtttattatgattgagggaaaatattttgtgatgattggtgttaaagaaaaatgtaggttttgttggtttttgtgtttttattgtattttttttgtattttttttaggatttttgttaggttttggagttattgagtagtgtgattattgtttttttagttagtgttaggaaggttgtgaatagagatttttgtgtttaggaggttgtggttttatagtagtaatatgaggatattttaaggagggtgaaggagagatagatggtgttggagaatttgttggtttattggtagaggtgagtagtatttttttttgagttgttgtattattaaataggaaattttggattagtagtttttaaagtgatggggagtagttattttagatgtaaaagatgtgaatttgtgggtttattgtaggaaatttttgatttttgttataaggtaaagatttttgagagtggagaggatatatatgggtttttatatattatttaatataaatgtgagtgtagggatataaatgaaaataaaaggagggatttttgtgttggtatatttaagattgagataattgaggttgtatttattatggtttgtgttggattttttaattttataaaggtttaatttgttagtatgataatttttaataaatttgtttttgttttttgttttttttaggttagagaaagaattattattttttttgatttggttagagtggggtgaagttaaagttagttttttagaaatggatatttttgtagatagagttaaagtggaaggtgaattttagttaatataggtaagtttaaggaagtgtgaggaaggaaaaaataaaatgttttttgttatagttatattatttaaaataataaaataaataaatttgtatttttttttttgttttggttttgtgatttttgaagtattatttgatattagggtgttttaaaaagaagaaagtaattatgatttgaaagggagagaaattaataatgagaattttgtgatgattaatttttatgatgtgttagaaaattttgtaatgtaatgtttggtatttgaataatatggtttggtaaaggagttgaggaaaggatgggtaggaatatagatgaaagaggttggttattagtttataatttttgaggttggaaataggtataatttttttatttttgtaattatatgatgtttgggtaataaagggtgtttttttaaagaaataagtaatagaatgtagaaagaagttatagtaatgattatttttatggaagatagaaaaaaatgaatgagtataaatgt

SEQ ID NO: 3591 - DNA, 2454 bp, Artificial Sequence
  chemically treated genomic DNA (Homo sapiens)
ttttgggattaagggattgttttattttagttttttgagtagttgggattataggtgtgtgttatttagtttagttaatttttgtattttttgtagggatagggttttattattttgtttaggttagaaggattgtttgagattagtttgggtaatataatgaatttttgttagaaagggaaggggaaaagaaaggaaaggaaaagggaaaggaaaaaagaaaggaaggaagaaagagataaatataattgtgttatttagagaatagaggtattattgggtatggtgttgggagtttgtagttttagttattgggggagttgaggagggaggattttttgagtttaggagatggaggttgtagtgagttataattatattattgttttttagtttgggtgatatagagagattttgtagtaaattttaaaaattaaaaataaaaaagagaatagagatgttaaaaatttttaaggaattttattttgtgtttaaattatgagaattatttgtggttaggtgtgtttatggttgtattaattaaaagtgtgttatagttttattattggggaggttaaagagggaggatttttttgagttttggagtttgaagttaatttgggtaatatagttaggttttataattttttttttatttattttttttttttattatgtaaattttattatatagattttataatagaaaaaaaaaagaaaaagaaagaaaaaaggtgggtgtttattttgttttgtatttagtagttttaggtaagtgatagaataatttgaaaatttggtttagagggaggaaatgtagtggttagggattagaagtgtgtgagggatttatgaagtatttattttgtaagtattagtttttttttttgggagagatattgggtttgtttatgtttttttgagtttatggttaagatttttgttgggtattagtggatttttggtgtttagagtttggttttttttattgggtgtgttgggaaaagggttgtttttgatagaagggatattttaagagtagtttaggaattggtgtatttgggtggttttggaagaagttggggtttttggaggtggaggtgaggtttgggatttaataagaagggtgtggttagagaggaggggttggttaaaagtttttgaaataaggtttaggtagaattgtggttttagttttttagttttagtttggtttttgggtttgttgtggtgtttttgttttttgtaggattggttgtagtatggatgtttttaggtggtttttgatgtttgtgtaattgatgtagttaaaagtaatgttagtggaggtgtttggttatttttttaagtggtttttttggttttattttgagtttttgaagaatttgaaggtagtttgttttgaggtttggttggtggaaaagatttttggtgagtggattaagaaggggtagtttttatgtggtttttttttgttatttatatttatagtttatatattttggttgtgttttagggtgatttttattagtagttaatgttttttggttgttttttttttttattttttttttttaagatttttgggagttattggttttttatagtttttttgttatttgtgtaggttggggtggagaatgtattttgtatgtttagggtatgttttaaattttgatttatgtgaattgattggattttaatggtgaggttgagattttggtatttgggaggtttttttattaggaggatataattaagatgattatgaatttggttgattattattgttagttttaggtgaaaggtatggggttgggaatagggttatttggagtaaattttggttttgtaggagtgattttggggttttttggttgttggggtggtagttttgtttttttagttggtttgtggttggtgggtgggggagggggtggtttttgttgttatggatttagaaggttaaattgaatttttgttttgggatttttggtttttatttttgtaggttgtttgggtgattgtttttttttggagaggatatagagatatagttgtggtttttgtatattgttttttttttaggtttaggaaaggtttttgtttaggatgttgttatttagaaggttgagatttagtggtttttaatagaagtttgggaggttgggatgtagtgtttggtggaggtttgggaggttgggatttagtgtttggtggaagtttaggaggttgggatatagggttttttggtggaggtgtaggaggttgggatttagtagtttttttaggttgttaataagttggggatttagtgattttttgaagttgttagtaaggtagtgatttagtggttttgtgaggatgtttgggatttagttattagattatgaaggtattttaggttttggagttagagttagttaggggttaaagtgaaagtttgtatttttg

SEQ ID NO: 3592 - DNA, 2454 bp, Artificial Sequence
  chemically treated genomic DNA (Homo sapiens)
tggaaatatgggtttttattttaatttttgattggttttggttttagggtttgagatgtttttataatttagtaattgggttttgggtatttttgtgaaattgttgggttattgttttgttggtagttttgggggattgttgggtttttgatttgttggtagtttggagagattgttgggttttggttttttgtatttttattggagaattttgtgttttgattttttggatttttattgaatgttgggttttggttttttggatttttattgaatgttgtgttttggttttttggatttttattgaagattgttgggttttggttttttgagtggtgatattttgggtgagggttttttttgagtttggaagaagagtagtgtgtagaggttatagttgtgtttttatattttttttaaaaaaggatagttatttaagtggtttgtgggagtaggagttagaaattttagaatgagggtttaatttggttttttggatttgtggtagtgagaattgtttttttttttatttattaattgtaggttgattgggagggtgagattgttgttttagtagttaggaaattttaggattatttttatggagttagggtttgttttaggtagttttatttttagttttgtattttttgtttggagttggtggtgatagttagttaggtttatgattattttgattgtgtttttttggtaagaaggttttttaaatattaagattttagttttgttgttagggtttaattgatttatgtgaattaagatttgggatatattttggatgtgtgggatgtgttttttgttttggtttgtgtgggtagtagagaggttgtgagggattggtggtttttgggggttttgggaggggaaggtggaaggaggagatagttagagggtattggttattggtgaggattgttttggaatgtagttagaatatgtgggttgtgggtatgggtggtagaaagaagttgtatgggggttgtttttttttggtttatttattgaagattttttttattagttaaattttaaggtgaattatttttggattttttaggaatttagagtggaattaggagaattgtttagggaggtgattgagtatttttattggtattgtttttggttgtattagttgtatgagtgttggaaattgtttgggagtgtttatgttgtggttggttttgtaggagataaggatattatagtaaatttaaaggttgagttggagttgggagattagaattgtggttttgtttgggttttattttaagggtttttggttagttttttttttttagttgtgttttttttattgggttttaggttttgtttttgtttttaggagttttggttttttttgaggttgtttaagtgtattggtttttgggttgtttttagagtgttttttttgttaggagtagttttttttttagtgtatttggtaggaggaattgggttttgggtattaggaatttgttggtgtttagtgggagttttaattatggatttaggaaggtgtgggtaagtttagtattttttttagaggaaagaattaatatttgtagaatgaatattttataggttttttatgtgtttttgatttttggttattatgttttttttttttggattaggtttttagattattttgttatttgtttgagattgttgagtatagagtagaataagtgtttgtttttttttttttttttttttttttttttttgttatagggtttgtgtagtgagatttgtatagtaaaaaaaaaaaatggatagaaaaaaagttatggggtttggttatgttgtttaggttggttttgaattttagggtttaaaaaaattttttttttttagtttttttagtagtgggattatagtatgtttttaattaatgtagttatgaatatatttaattatagatagtttttgtggtttggatataagatgagattttttgaaaatttttgatatttttatttttttttttatttttaatttttaaaatttgttgtagggtttttttgtgttatttaggttagggggtggtggtgtgattatagtttattgtagtttttattttttgggtttaagagattttttttttttagtttttttagtagttgggattataagtttttgatattatgtttagtgatgtttttgttttttaaataatataattatatttgtttttttttttttttttttttttttttttttttttttttttttttttttttttttttttttttttttgataagggtttgttatgttgtttaagttggttttaagtaatttttttggtttgggtaaaatgataaaattttatttttataaaaaatataaaaattagttggattaggtggtatgtatttgtagttttagttatttggaaggttgaggtgggataattttttgattttagag

SEQ ID NO: 3593 - DNA, 4898 bp, Artificial Sequence
  chemically treated genomic DNA (Homo sapiens)
aatttatgtattttttttttgggagggttttatttttttagtgttttgattttattttttaggtattgagattatagttgtggtttagttgtagaagttagtttagtagattggttttttgttagagataggaagtgggggaagagttgtgtgttttgttggttattaaggaggggtgggtgttagaggttggagttgggttagattttgtggttttgtggaatgaattgtaagggaggagttgtgagttggtttgttttattttgaagggtattgtgaggggtagagtttgtgtaaggtagttttgttttttttgttgtttggaaggttttggggtggagagtggggaataagttttggaaggtaggaaagaatattgaggtgggagtttggaaagttgggatttggtaaggttttgttattaatttattatatgatttgtattagtttttttttttttttggtttttgttttttaatttttgaaattggaaaatgtattgtattttttgtggtagatatatttttagggaatatattagtagataagttagtttttgtttttagggttttttattttattaatagatgagtaaatatagaataggttaagtgttgaaaaagtttgggtagaataataaaatggtgttgggggtagagagtgagaagtttgggatggttttttttagaagttgatataagtagaagaaatgaggaaagggttaatgtgggtatttaggggatgtatattttgggtagaggaaagagtaagggtaaaggttttgaggtgagaaggtgtttggtaaattaattgagaaaaggaagtagtatggttggtagggaataagtaaggggagatgagggttaaggtaggtggggtttagtttatggagattgagggattttgtgttttattttgaattgattggtgggttttggggaagttgggtttgggtttgggtgtagagtttatttggtgttgtgtatatgtgtgtgtgtgatagtgttgggtgggggaatatttttgatttttttttatttattttggttttttggataggttttttaggaagagataataatagggttgggtttagggtgaggtatgtgaaatttggagtgaatgaggtatttggtttaggtttaaaatttaagggggtattaaaaaatttagtaattaagataaaataatatttttttgtaatatgtataaaaatttaaattaatgttaaaaagtttatgataaataaaatgttaatattttagataaagataggatttgattttgaatttgtgtgattaattattttaattttggttttgtttttaatataattttatttaaaaaaaataaggtagttggtttaaagaattgtagtttgtttatttggtatattaaaatattgttttaaaatattttttattagtttgggtatggtggtttatgtttgtaattttagtattttgagaggttaaggtaggtagattatttgaggttaggagttttagattagtttggttaatatggtaaaattttgtttttattaaaaaaaattagttaggtgtggtggtaagtatttgtagttttagttgttttaatttgggaagtggagattgtaatgagttgagattttattattatattttagtttggtggatagagtaaaattttgtttttaaaaaaaaaattttttattttggtatttttgaaattttgtatattaggtgagtgttttatttattttattttagttttggttttgggttttagtgtttattttttttgaggttgagaggtaaagggatttttttaaagaaatatagtagatggtgggtttggaaattgggtttttatgttaggtttttagtttggttattatattttattatgttttgaattggaatgttgattttaatgtgttgatttttaaaaattttttatttaagtataatagttatataaataagtgtttgtattataaatgtttagtttgttgtatttttataaaatgagtatatttgtataattagtatgtgtgattaaatttaaagtataatttatatttttaataaaatagatattagtattgggttagatttagaggatttttgagattaagtaggtgatttggaatagtaaggttttgggattgagttgatgtagagtttaggggttttggattgagatgagaaagtagggggaggggtgtagtattgaggtttggggtttgggagggggttttatatgtgggaggaaatggagagagatggtgaggattgtttttggaggtgggtgaggtttagtgtgtgtgtttaggtaagtaggtaagaatgtagtagttgttaggtttaggtgtgggtgtgttttgtttgggtgatttagtttgtgttaggaagtgggagttggtttagttttttagagtttttggatagtagttggattttggttggtttttggggtattaggatagatttttgtggttagtagtttggtttggggggtggaatattttttttttgttttgttttatttttttttgggttgtaattattttagtttattgttgggatgtggttgtgggtgttgagagtgttgttggtgttgtgggggttattttggttttggttttgatggtgttttaggatttgtgatagttgtaagtagtgattatgggggttaggagagtttaagaagtggggagttgggatgtttggttttttgtgttttagttttttatttttagatttggttggatttgggattagaaaaggtggtttggtgttgttgttgttttttagtgtgtttattggtttttgtggtggggagtttagatgtggtttttaggtggttttagataagtatggttgagatgttgttattttagggggttgttttatttgagtattattttatgggtttgtttagttttatttggagagttgtaggttttaaagttttttttatttttggggattaggttttggggttgtgttgagggtttttgaatttttttggattgtttggtagtggtttttttttattattatggtttattatttagatgtgttgtttggttggttttattgggagaggtttttttttttttttttttttttgaatttttattttagaagtttttggatttagtttggattttaaagaagggttgaatttggaggatttttttttgtttttaaagttggttttttgatatatatttttatgtatagttggtaggggtaggagggttgaggatgttttgggttgttgtggtatagggtaggttggttggttattaattggattttttggatagataattttggtgttgtgggtgggtggtttgggagtttagatttttgtttttggtttaggattttgggaggagattgagggggtgggtaaaatgtgattgagaaatttgattgtgtttatttttggggtaaagagatttggaggttgtaattatttagatagttttatgaagtggttgaggttttttttttttttttgattttttagaaatttttgtagagtttggataggtaaaggaaaatgtgtagtttgtggatttttgggttttagagagtagggagttggggagattgaggttttgttttgagagtgtggaggaagtgtgtttagttggttttttgtgggggtttgggttttgggtgttttgtggatagatgtgtttggtttttggttgggttaagtttggtgtgggggaggggatttgtagaggggtgattgagaaggtgaggagggggtggggagagggtgggttagggaagaggggaggggagaggtgagtaggggaggagtgaggggggttggagggagagaaggaagaaggaaggggtgaatggtgtgagttggtgttgaaatgggagaaagtagtgagtgagaggggaaggggtgttaggtgagtatttgggagttagtgggatttgggtaggggtgtttggagtaggtgtgtatggtgggttttgtgtggggatttggttggaagagagtgtagtatggtttgtatgagtgagtggatgtgggaggtgtgtatttgtgggggaattgttttttgtttgtttttggtgttgtttgttgagttttgttttttgtaggtttggggttgatgtattaggtgagtggttagtgtttttttggttgtgatgtgttttatggagtttttagtgtagttttgggtttaggtaggattgggagtggtgagtgaagttggataggggtgggtgggtggttgaaggggttagttattagtttttttttttgtttttagatgtggggagattgttttagggagtttggtgggggtagggatgaaaagtttgggtttgaggatttggtttaaggagagtagggggttgggtgagggaggtagggttttgaatagaggttgtggttgtgttaagttggttttaattttttgtaatttttgatattagatatatatatatatatatataaatatatatatatatattttgtggtgtttgtttgtttgggatttgtgttttaattgtttttgtttagtgtgtaaatatttgtgggggtttggtgtgggggagggggtgttgtttgaatttttttttatttttttttttttagtttaattagagtttagtgttttttgaaaatttttgtttgttgtgagtggttgtaggatttagtttttttttttttttttgttatttttttttttttgtttttttttttttttgtgttggttagtttttgttgtttttgttttgtgtatatatatgtattttaatttagtgtttttagtttaagtgaaatgttttgttttgtgtttggtgttgtttgtaatttatttgtgatttttgggggagttttttatgttaagtatggtttgtgattttttg

SEQ ID NO: 3594 - DNA, 4898 bp, Artificial Sequence
  chemically treated genomic DNA (Homo sapiens)
tagggagttataaattgtatttggtgtgagaggtttttttaggaattgtgggtaggttatagatggtgttaggtgtgggatggggtattttatttgggttgaagatattgggttggggtgtgtgtgtgtgtatagggtaggggtggtggggattggttggtatgagagggaaggaaggtgagggagaagggatggtaagaaagaggggaggggttgggttttgtagttgtttgtggtagataaaagtttttgggaagtgttgggttttggttgggttgggggaagggaagtagagaaagatttagataatgtttttttttttatattaggtttttataaatatttatatattgggtagaaatagttgagatataaattttagatggatagatattgtggagtgtatgtgtgtgtgtttgtgtgtgtgtgtgtgtgtgtttggtgttgggagttgtggggagttggagttaatttggtgtagttgtagtttttgtttagggttttgttttttttgtttagttttttattttttttggattaagtttttaaatttagattttttgtttttatttttattaagttttttggaatggtttttttgtgtttggggatggagaggagaattaataattggtttttttagttgtttatttgtttttgtttagttttgtttgttatttttggttttatttgggtttggggttgtgttgggggttttatagggtgtgttgtagttagaggggtgttggttgtttatttggtatattggttttggatttgtggaaaatagggtttagtgggtggtgttggaggtgggtaaggggtgatttttttgtagatgtgtgttttttatgtttatttatttgtgtgagttgtgttatgtttttttttagttggatttttgtgtggggtttgttatgtgtgtttgttttgggtgtttttgtttaggttttgttggtttttgggtgtttgtttggtgttttttttttttttatttgttgtttttttttattttggtgttagtttatgttgtttgtttttttttttttttttttttttttttagttttttttgttttttttttatttgttttttttttttttttttttttggtttattttttttttgttttttttttgtttttttagttgtttttttgtgggtttttttttttgtgttgggtttggtttagttaggagttggatatgtttgtttgtggggtgtttgaggtttgagtttttataggaagttggttgggtgtgttttttttgtgtttttggagtggggttttagtttttttgattttttgttttttgaggtttggagatttgtgggttgtatgtttttttttgtttgtttaaattttgtaaaagtttttggaaaattaggagaaagagagaaattttaattattttgtggaattgtttgaataattgtggtttttaaatttttttgttttaaagatgggtgtgattaagttttttagttatgttttatttatttttttggtttttttttggggttttaagttagggatagggatttgggtttttaggttatttgtttatagtgttagagttgtttgtttgggaaatttggttagtgattaattagtttgttttgtgttgtagtagtttagagtatttttgatttttttgtttttattagttgtgtgtgggaatgtgtgttagaaaattgattttgggggtaaagagaggttttttgaatttagtttttttttgggatttagattgaatttgagggtttttaagatgagggtttggggagaaaggggagggagggagttttttttggtggggttagttgggtggtgtgtttggatggtgagttgtggtggtaggaagaagttgttgttaggtagtttaagagggtttaggggtttttagtgtgattttggaatttggtttttgagaatggggaagattttggagtttgtggttttttaggtggggttgggtgggtttgtgggatgatgtttaggtggggtagttttttggggtgatagtgttttggttgtatttgtttagggttgtttaggagttgtgtttgggttttttgttatgagggttagtgagtatattggaaggtagtggtggtattaggttattttttttagttttgagtttagttgggtttggaagtggagagttgggatgtaggaggttgggtgttttagttttttattttttggatttttttagtttttatagttgttatttatggttattgtaggttttggggtgttgttggggttaggattgggatggtttttatggtgttggtagtgtttttggtatttgtggttatgttttagtgatgggttggggtggttgtggtttggaggaaggtggggtgggataagaagagagtgttttgttttttaggttgggttgttagttgtgggggtttgttttagtgttttaggagttggttgggatttggttgttgtttgggagttttggagagttgagttaatttttgttttttggtatgggttgagttatttggatgggatgtgtttgtgtttgggtttggtggttgttgtatttttatttgtttatttgggtgtgtatgttgggttttatttatttttgaaggtaatttttattgtttttttttgtttttttttgtgtatagggtttttttttgaattttagattttagtgttgtatttttttttttgtttttttgttttaatttagggtttttaaattttgtattagtttagttttggagttttattattttaagttgtttgtttgattttaaaagttttttgaatttggtttagtattaatgtttgttttgttggaaatgtaaattatgttttaaatttaattatgtatgttggttatataggtgtgtttattttgtaaggatgtagtaagttgaatatttatgatgtaggtatttgtttgtatgattattatatttgaataaaaagtttttaaaaattaatatattaaaattaatattttagtttagagtatgataggatatgatggttaggttggaggtttggtatgggagtttagtttttagatttattatttattatatttttttggggaaatttttttgttttttagttttaggagggatgagtattggggtttaggattaggattggggtgaggtaagtgagatatttatttggtgtgtaagattttggggatgttaagataaggaattttttttttggaggtaggattttgttttgtttgttaggttggagtgtggtggtgagattttagtttattataatttttattttttaagttaaagtagttgggattataggtgtttgttattatatttggttaattttttttagtagagatggggttttattgtgttggttaggttggtttggaatttttgattttaagtgatttgtttgttttggttttttaaagtgttgagattataggtatgagttattgtgtttagattgatgaggaatattttaaggtaatattttaatatattaaatgggtaaattatagttttttgggttagttgttttgttttttttaaataaagttgtattggaaataggattaggattaaggtaattaattatgtaagtttagggttagattttgtttttatttaaaatgttggtattttgtttattatagattttttggtattaatttggatttttatatatattgtaggaaaatattgttttattttaattattgagttttttgatgtttttttaagttttgaatttgagttaagtgttttatttattttaggttttatatgttttattttagatttggttttgttattgtttttttttgaaggatttgtttaggaagttagggtaaatgaggggagattaaaggtgtttttttatttaatattgttatatatatatatatgtatagtattaagtgggttttgtatttaagtttaggtttagtttttttggggtttattgattagtttagaataaagtgtaaagttttttagtttttatgaattgggttttatttgttttggtttttatttttttttatttattttttgttagttatgttattttttttttttggttaatttgttaggtatttttttgttttagggtttttgtttttgtttttttttttgtttagaatgtgtattttttagatatttatattggttttttttttgttttttttgtttatgttagtttttaagagaggttgttttagattttttattttttgtttttaatattattttattattttatttagatttttttagtatttggtttattttatatttgtttatttgttggtagagtgaaaggttttgagagtagggattggtttgtttattagtgtattttttagagatgtgtttgttatagagagtgtaatatattttttaattttagaggttggaaaatagaggttagagaggggaaagagttaatgtaagttatgtagtgagttagtggtaaaattttattaaattttaattttttagatttttattttagtatttttttttgttttttagggtttattttttattttttattttagagttttttaggtaataaaggggatagaattgttttgtatgggttttgttttttataatattttttaaagtggagtaggttagtttataattttttttttgtagtttattttgtaagattataaggtttggtttagttttagtttttggtgtttatttttttttggtggttagtagaatgtatagttttttttttattttttgtttttggtagagggttagtttgttgggttggtttttgtagttggattataattgtggttttagtgtttggagaatggggttaggatattgggagaatgggatttttttggaagagggatgtataaatt

SEQ ID NO: 3595 - DNA, 2417 bp, Artificial Sequence
  chemically treated genomic DNA (Homo sapiens)
ggttgagatgggtagattatgaggttaggggattgagattattttggttaatatggtgaaattttatttttattaaaaatataaaaaaattaggtaggtttggtggtaggtgtttatagttttagttatttggtaggttgaggtaggagaatggtgtgaatgtgggaggtagagtttgtagtgagttgagattgtgttattgtattttagtttgagtgagagagtgaggttttattttaaaaaaaaaaaaaaaaaagatatttgattttatttttatttaatgttaaatgaggttggaggtgaatgttttttttattatatttaatttattttttttttgaattgattattttttaattgtgtatttttttttttgtttaggaaattattgtatttaggttaatttaatttatggggaaggtggtaaggagggtagaaagtgtgtgggtttaatattagagtttaaattttttttttattgtttattagttgtgtaattttggatagattttttagtttttttaagttttagttttttttgtttgtttgtttgtttgtttttgagataagagttttgtttttgttgtttaggttggagggtaatggtttaattttagtttatggtaatttttgttttttgggtttaagtaatttttttgttttagttttttaagtagttgggattataggtttttgttattatatttggttaattttgtatttttagtagagatggggtttttttatgttggttaggttggttttaaatttttgattttaggtgatttgtttattttggttttttaaagtgttgggattataggtgtgagatattatgtttggttgtttgttatgaaatgggggtaaaaattgtttataggtttgtggagagaagattataaatttgtaaagtttttagtattgtgtttagtatgtggtaggtgtttattaaattgtggttgtttttattatgatgttaagtatgggaatatggaggatatagttggagaggagatttgatgatttttttggtggagggtggttagggaaggagtggaagagagagttggggagaggaaattgtggttataaagaggaagagagaggtagagttggaggtgatattaggggagagagaggagtgggtttggtgatggttatgttgggtgaggtgtggagagtatagttgtgttatttattagttgtttttagtttagataatttttgtgtttattttatttttgtttgtttattgtttttgttgggttggatatttttattattatggttattgttgttatattgttggttgttattttttgttttatttttttttttgtttatgatatggtagaaggtggtaagggaagtagttgttttttgttagtagtttttttgttattgaaggttgaagttgtttataggtatgggtaaagagtttaggttttaaagatagatgagttgggttttgtttttagttttagtatttaggagtgggatgattttagtaagggagatgatttagttaaagttttagtttttttatttgtatagtagggataatagggttgttgagaagaaggaatgagattatgtgtggtaagtatttagtttagtataatgtttggtatatagtaagtgtttaatatatgtttgtgtttgttatttttaaggttaaataggtttgtgatttgtgtagttatatagggttttatgtttaggatgggttttaaatttggttaatgttttgttattattattttgaaatggttttttttttttttttttaagagatagggttttattttgttgttaagattgtaggattgtagtggtatgattatagtttattgtagttttgaatttttgagtttaagtgattgttttattttagtttgttgagtagttaggaatataagtaggtattattagttattttattttttaattttttttttttttattattttttagagatagggttttattatgttgtttaggttggttttgagtttttggtttgaagagatttttttgtttttgttttttaaagtgttgggattataggtatgagttattgtatgtagttttgaaatttttaatagtttttgaataagggttttgtaaattatgtagttagttttggttattattaatatatatttattgagtttgttggttggtagtggttatagaaggggatatttgtttagtagtttgttaaagatgtgggatattagatggttttgggagttttaaaggagggatttaaatatagtgatgtggtattatgttaggttgttagtaattagagattaagagggtagtgagatttttatatatatttttattggggttgggtatagtggtttatgtttgtaattttagtattttgggaggttgagatgagtagatta

SEQ ID NO: 3596 - DNA, 2417 bp, Artificial Sequence
  chemically treated genomic DNA (Homo sapiens)
tgatttgtttattttggttttttaaagtgttgggattataggtatgaattattgtgtttggttttagtgagagtatgtgtgggggttttattgtttttttagtttttaattgttggtaatttggtatggtgttatattattgtatttaaattttttttttgaggtttttaaggttgtttaatgttttatatttttaataaattattggataggtgtttttttttatagttattgttagttagtagatttaataaatatatgttaataatagttaggattagttatatagtttgtagagtttttgtttaaaaattattaagaattttaaggttgtgtgtagtggtttatgtttgtaattttaatattttaggaggtaaaggtgggaggatttttttaggttaggaatttgagattagtttgggtaatatagtgagattttgtttttaaaaaataataaaaaaaaaaaaaattaaaaaataaaatagttggtggtgtttgtttgtatttttagttatttagtaggttgaggtgagataattatttgaatttaggagtttgaggttgtagtgagttatgattatgttattgtaattttatagttttggtaatagagtgagattttgttttttaggaaaaaaaaaaaaaaattgttttaaggtggtggtgatagagtattaattaagtttgggatttgttttgagtatgggattttgtgtggttgtataggttataaatttatttggttttgaaaatagtgaatatgaatgtgtattgaatatttgttgtgtgttagatattgtgttgggttgggtgtttattatgtataattttattttttttttttaatagttttgttatttttattgtgtagataaggaaattgaagttttagttgagttattttttttgttgaggttattttgtttttaagtgttagagttgggaatggaatttagtttatttgtttttggagtttgagttttttatttatgtttgtggatagttttagtttttagtggtagggaggttgttggtggagggtagttgttttttttgttattttttgttatattatgagtaggaaggaagatgaggtaagaaatagtagttgatagtgtggtaatggtgattgtggtggtaagggtgtttaatttggtagaggtgatgggtagataaaaatgagatgggtataggaattgtttgagttggaggtagttgatagatagtatagttgtgttttttatattttgtttagtatggttattgttgaatttattttttttttttttttgatgttatttttagttttgtttttttttttttttttatggttatagttttttttttttagtttttttttttattttttttttggttattttttattagggaggttattaggttttttttttagttgtgttttttgtatttttatgtttagtattatagtaagagtagttatgatttagtgagtatttattatatgttaggtatagtgttagggattttataagtttgtaattttttttttataaatttgtaagtaatttttatttttattttataatgggtggttgggtgtggtgttttatgtttgtaattttagtattttgggaggttaaggtgggtggattatttgaggttgggagtttgagattagtttgattaatgtggaaaaattttgtttttattaaaagtataaaattagttgggtgtggtggtaggagtttgtaattttagttatttgggaggttgaggtaggagaattgtttgaatttaggaggtggaggttgttgtgagttgagattgagttattgttttttagtttggataataagagtaaaatttttgttttaaaaataaataaataaataaataaaaaaaattgaggtttagagaggttaagagatttgtttagggttatatagttggtgagtagtgaggaggagatttgggttttggtgttaagtttatatattttttgttttttttattattttttttatgggttgggttggtttgagtatagtggttttttgagtagggaaggagatatgtaattgagaaatggttagtttgagggaggaataaattgggtatggtgagagagatatttatttttaattttatttggtattaggtgggggtggagttgggtgttttttttttttttttttttgagatggagttttgtttttttatttaggttggagtgtagtggtgtgattttggtttgttgtaagttttgttttttgtgtttatgttatttttttgttttagtttattgagtagttgggattataggtgtttgttattaagtttgtttaatttttttgtatttttagtagagatggggttttattgtgttagttaggatggttttgattttttgattttgtgatttgtttgttttggtt

SEQ ID NO: 3597 - DNA, 2464 bp, Artificial Sequence
  chemically treated genomic DNA (Homo sapiens)
atttttgttataaaaatttagttttttaagtatggtatattttttttttaagggttagaaatgaattttaaattattttgttgtatttttttattagaggaagaattgtttttttttttttttttttttttttttttttttttttttttttttttttttttttttttttgagatagagttttgttttgttgttttagttggagtgtattggtaaaattttggtttattgtaatttttattttttgagtttaagtgattattttgttttagttttttgagtagttgggattataggtgtatgttattatgtttagttaatttttgtatttttaatagagatagggttttattatgttggttaggttggttttgagtttttgattttaagtgatttatttattttagttttttaaagtgttgggattataggtatgagttattgggttaggtaggaattgtttttttttttttttgttatttagaaattagtaaattttatgatggttatttatttataatttatttttaagaatattttgttaatgatattttaagtaagatgtgataatagttatataaagtagtttatagtatgtagtgtgttttaatgtttttgagaagtagtaataatttttgtttttagatggtttttagtttttttttgtgttatttttttgttttagattgtggtttaattgtttataaggatttaatggtatgtaaatagttgttagttggtttttttaaaagaggtattgttgattggaaagattggtttatatttaaattttgttttttttgtaaatgttagatttttttaatagtattttagaggaaattttgttttgaatatagttattgaatttgattagattatagatatagtattatttatattgtttaatgttaagatatagtatttttgattttttgtatgttataatgttttgaagattgagttattgatgagaaatttttgtagttatatatttttttatagtttttgttttttatttaagtaggttttagggtttatggtaagatgatttttttggggagaaagagtttgagatttagaaatttaatttgtataatgaattttggtttttttttttttttagggatttgattttttttttttttttttttttttttttgttataggattttatgttttattttagtgtagtttggttgattgatgttttattttttatatgtattgatatgatgtgtgattgtttaggtatagttggagaagttggagaagatagtattttatttttttttttagaattaattattgattggagggttaatgttttaattttgatgtgatttagtaggttatgtgagggttgtttttaataggagtagtgtttttttttttttgtgtagtttttgatttagtttggtatgttttttggtgatattgttgtttgttatatggtttagtgttgtaaatatttttatataattatatttgtttatttaatttttaagtgtttttttaatagagaaaataattattttatgagtttaaaatttgtaaattttttgtattttttaaaagattttttttaattataaaaattttttttatgttttattttaatattttataaattttgtttagtttgttgattttgtatttgaaatttatattataataaaataaagataaaatttaatatttttttttagatgtattgttaagtattttaatatagtttgttgaatattttttttttttttgttgatttgaaatgttaatttttttatatattaaatttttatatagatatatggttgtggttttgtttaatatttttttttattgatttgttggtatatttttatgttattatttatgtttaattattgtaggatgaatatatatagatatatgtatatttatttgtttatattagagtagtttttttttattgtttttgttttttaaaattattatagttatttttgtttatttattgtttagtatattttgtttttagtaattgattgtaagaaatgaatgtaataatttttttaaatggttttgatgttgaaaagattgtaaaaaaatgaagtatatattggttaatttagtatattttttgaaagatattgtttaagattttatattgattttgtaagattattttagggaaataagtgtgttattgtggtggatatatttattataattttattatttgaggatgtattttattattttgatgatggttttaaatttattttattttaatataaagtggattttgtaattatagtttttgtttattaattgtgatatgtggattttattattttgttgtttttgaggtattttttgtatttgtttttattaggtttatgaaatttgtgaattgggtatttttattgaatttttaattttttattatttttaaatgattgaataggttaaaaatgttgtagattg

SEQ ID NO: 3598 - DNA, 2464 bp, Artificial Sequence
  chemically treated genomic DNA (Homo sapiens)
tagtttgtagtatttttagtttatttgattgtttgaagatgatgaaagattaaaagtttagtaaaaatgtttaatttataaattttataaatttaatggaagtaagtgtaaagaatgttttagaaataatagggtgatggaatttatgtgttataattagtggataagaattatgattgtaaagtttattttgtgttagaataaggtggatttggagttattattaaaatgatgagatatatttttaaatggtgagattgtggtgggtgtatttattataataatatatttatttttttggaatgattttgtaagattaatatggaattttaaataatattttttaaaaggtatgttaagttggttaatgtgtattttatttttttatagtttttttaatattagagttatttaaaaaaattattatatttattttttataattgattattggaagtaaaatatgttgaatagtaaatgagtaaggataattataataattttaaaagataagaataatgagagagaattgttttgatatagatagatagatatatatatatttatatatatttattttatagtaattgaatatagatggtggtatgggaatatgttaatagattagtggaaaagaatattggatagagttatagttatgtatttgtatggaaatttggtgtatgagaaaattggtattttaaattagtagagaaaaaagaaatatttaataaattatgttgggatatttggtaatgtatttgagggaaaatattaaattttatttttattttattgtaatgtaaattttagatgtaaaattaataagttaaataaaatttataaagtattagaataaaatataaggggaatttttgtaattgaagaaagttttttagaaaatataagggatttgtagattttgagtttataaagtgattgttttttttattaaaaagatatttaaaaattgaatgaataaatgtaattatataaaaatatttgtagtattgggttatgtggtgagtagtagtgttattaggaaatatgttgagttgggttaggaattgtgtaaggaggaggagatattgtttttgttgaaggtagtttttgtatgatttgttgaattatattaaggttgaagtattggttttttaattaatgattagttttgggagaggggatgaggtgttgttttttttaatttttttaattgtgtttgaatagttatatgttatgttagtgtatatagagaatgaagtattagttaattaaattatgttggagtggagtatagagttttgtgatagaagaggaggaggaagagaaagaagaattagatttttaaaggagggaaaaagttaggatttattatataaattaaatttttaagttttaggttttttttttttaaggaaattattttgttatgagttttagggtttgtttgaatggagagtaagaattataggaggatgtgtagttgtaaaaattttttattaataatttaatttttagaatgttatgatatatagaaaattaaagatgttgtgttttagtattgagtaatatgggtggtgttatgtttgtagtttggttaaatttagtaattgtgtttaaaataaaattttttttggaatattattgagaaaatttggtatttgtaaaaagggtagagtttaaatatgagttagtttttttaattaataatattttttttaagaaaattaattaatagttgtttgtatgttgttgaatttttgtgagtagttaggttatagtttaggatagaaagatgatatggggaaggattgagggttatttgagaataaaagttgttgttattttttagaggtattgagatatattgtatgttgtagattgttttgtgtaattgttgttatattttgtttgagatgttattggtagaatgtttttaaaaataaattatagataaatagttattatggagtttgttggtttttagatagtaaaagagaaaagaagtagtttttgtttggtttggtggtttatgtttgtaattttagtattttgggaggttgaggtgagtagattatttgaggttaggagtttgagattaatttggttaatatggtgaaattttgtttttattaaaaatataaaaattagttgggtatggtggtatgtgtttgtaattttagttatttaggaggttgaggtaggataattatttgaatttaggaggtggaggttgtagtgagttgagattttgttaatgtattttagttggggtaatagagtgagattttgttttaaaaaaaaaaaaaaaaaaaaaaaaaaagaaaaagaaaaagaaaaaagaaaaaaaaaagaagtagttttttttttaatgaaaagatataataagatagtttgaaatttatttttggtttttagagaagaagtgtgttatgtttggaagattggatttttataatagagat

SEQ ID NO: 3599 - DNA, 2443 bp, Artificial Sequence
  chemically treated genomic DNA (Homo sapiens)
agaggttgtagtgagttgagattgttttattgtattttagtttgggtgatagtgtgagattttattttaaaataattaaataaataaatatatatatatatatatatatatatatatgggttgggtattgtagtttatatttgtaattttagttttttgggaggttaaggtgggtggattttttgagtttaggagtttaagattagtttggttaaattttatttttataaaaaatataaaaattaatttagtgtggtggtgtgtgtttgtggttttagttatttgagaagttgaggtgagagaattattagagtttgggaggttgaggttgtagtgagttgtgtttatgttattgtattttagtttgggtaatagaatgaaattttgttttaaaaaaaaatattttatagtaatagaagggaatttttatggaaattatggattttgggtgataatgataaatttgtgtagatttattgattgtaagaaatgtgttattttggtgagggttgttgataaggggtgtggggtaggggtagggggtagtaagtgggggtagggaatttttttttttttttttttaatttttttgtgaatttaaaattgtttttaaaaattaagtttttaatagaaataaatatataataaattttaaaaatattaagatttgaatgttgaaaaaatttgtaattgttttaataattatagataataatagtatatagattatattataattggtggtttttttgtatgtagtttgttttatttgtagtgtgaaagttttattagttttgattttaagtagtgtgttttttttaatttttttttatgttttggtttttattttatttttgaggtttatagttgtttaagttatggtatgtgtagagagagatttttttttgttgattgtatgaaaaattgtgtaaaaggggttgttatttaaaaaagtgtgtgatattgggagagattttgtatagtgagtagggttttttatgagtttattttggattttttattgagaataggatgttttgttaaggatgggtaaagaggggtatagtagaaagataaaaggatgtgttagttataaaaattatgtgggttaaggatagggggttgtaatgtaaagattggaatttgtagtatggtaaattagagtgtggtaagattagtgttttagattttagataaggttatttttttttttaggaaagatgatttttttattaatataagtgtttggtgttttttttttttgtttaggtgttttggttggaatgaggaaatttaaaagtgttatgaaagaataaaagtggtttaaattttgaaaatttttaaaattaaaagattgtaatttaaaggaagataaagagtatgatttttaatttttttaagttattttatttatttttagtgttaaaaatttaatgttagttttatatagtaatttatttattgtagttgaaatttgaggtgtgaaaagttttgtgttgataaagatttgtattagttgttgttgttaaataatatgtaaaaatttgtagtttaattttagttttagaataaataagtgtttttttaaatttatttaggagtgtaggttgttattaggtttataggtgtgttttgaaattagatattattaagaaattttattgtgttaaaatgaataaggagttgggatggtataatttattattttttaatgtgttttgggaattgttttaataagtgtggaagtgttttagtgagatgttgtatttagtttttattgtgtatatattaagttagtgtgtgtgtgtgtgtatgtatatatgtttgtgtttgtattttatattagaaggttttaggaaaagagtgataaataagatgaagtggtaagagggtattaaagattataattaaaggtgtttgagagtagttagttggttttagtttatttttttaattagttttatttattttgttgttttggtgtagtagatattgtgtagggttttggtagagatataggggttatggagatataagttatttttggggaatttttagtttaattaatatataaatagtagtgatatttggtagaagtgttataaggtagggtaggttataaggtagggtaggtgaagtgttttggtggttttgggtgatagttattgttatatattattttttaggagttttggggttatttgaaaaaaaaagagatttgatgaattagttttttttttaggggtgaaagttgtttagttttttgtggtaaagaaatataaaatgaatggaaaaaagaagaggttatatgggtgaattattaaatgtaaggagtggaaagatattatatttgtgtaaggaatatataaagatttttttaatttttagttataatatttataatgataaattatatattagttttgtgaattttatgtgtaat

SEQ ID NO: 3600 - DNA, 2443 bp, Artificial Sequence
  chemically treated genomic DNA (Homo sapiens)
gttatatataggatttataaggttagtgtgtaatttgttattataaatgttatgattaaaaattagaaaaatttttgtgtgttttttatatagatgtaatatttttttattttttatatttaataatttatttatataatttttttttttttttatttattttatatttttttgttataagaaattgaataatttttatttttggaagaaaaattagtttattaaattttttttttttttagatggttttaggatttttggaagatgatatgtggtaataattgttatttagagttattaaagtattttatttgttttgttttgtagtttgttttgttttgtagtgtttttgttgggtgttattgttatttgtatgttaattagattgggggttttttgagagtggtttgtatttttgtgatttttgtgtttttgttggggttttgtatagtatttgttatattggagtagtaaaataaatggggttggttgaaggagtaagttaaggttagttaattgtttttaagtgtttttaattatggtttttggtgtttttttattgttttattttatttattattttttttttgagattttttaatatagaatgtagatatgaatatgtgtgtatgtatatatatgtatgttggtttaatatatgtatagtggaagttgaatataatattttgttgggatatttttatatttgttaagatagtttttaaaatatattaaaaaatgatggattgtgttgttttggttttttgtttattttagtatgatagaattttttgatagtgtttgattttagagtatatttgtagatttagtgatagtttgtgtttttgggtgggtttggaaaagtgtttatttgttttgaagttaaaattaaattgtaagtttttatatgttgtttagtggtagtagttgatgtaaatttttgttaatatggaattttttatattttaggttttaattatagtaagtggattattatgtaagattggtattgggtttttggtattgaaaatgaatgaagtagtttggagaaattaaaagttatgttttttatttttttttgagttataattttttaattttaagaatttttagaatttgggttatttttgtttttttgtagtatttttgagtttttttgttttagttaggatgtttggatggaaaagggaagtgttaagtgtttgtgttggtgaggagattgttttttttggagagggaagtggttttgtttggagtttgaaatgttaattttgttatgttttagtttgttgtgttgtaagttttagtttttgtattgtagttttttgtttttggtttatgtggtttttgtagttggtatatttttttgtttttttgttgtgtttttttttgtttatttttgataaaatattttgtttttagtgaaagatttaggatgaatttatgggaagttttgtttattatataaggttttttttagtgttatatgtttttttagatgataattttttttgtataattttttatataattagtaggaaaaaatttttttttgtatatattatgatttagatagttatgggttttaaaaataagatgggaattagaatgtaggggaagattaaaaaaaatgtattgtttaaaattgaagttaatgagatttttatattatgaatgggatgagttgtatgtgggaaaattgttgattgtaatgtggtttatgtgttgttgttatttatggttattagaataattataaatttttttgatatttagattttagtatttttagagtttattatgtgtttatttttattaaagatttaatttttaagagtaattttaagtttatagaagaattaagaggaaggaagagagagttttttgtttttgtttattgttttttgtttttgttttgtattttttattaataatttttattagaatggtatattttttataattaatgaatttatatagatttgttattattatttaaagtttatagtttttatgagggtttttttttgttgttataaagtatttttttttgaaatagggttttattttgttgtttaggttggagtgtagtggtatgaatatagtttattatagttttaattttttaggttttagtgatttttttattttaattttttaagtagttgggattataggtatatattattatgttgggttaatttttgtattttttgtagggatggggtttggttaggttggttttgaatttttgggtttaagggatttatttattttggttttttaaagagttgggattataggtatgagttatagtgtttgatttatatatatatatatatatatatatatatgtttgtttgtttgattgttttgagatggagttttgtattgttatttaggttggagtgtggtggggtgattttagtttattgtaattttt

SEQ ID NO: 3601 - DNA, 2189 bp, Artificial Sequence
  chemically treated genomic DNA (Homo sapiens)
tgttattgtattttagtttgggtgatagagtgagattttgttttaaataataataaaaattaaagtatttattagagtttttggaatatattatttgtggataaggggaattattgtatatatagatttttgtgaagaatattgttaataatttaagagtaattatttatttagggtttataatgagtttagtattggagttttttgtttatttttggaaattttttgtttagatgtaaatatagttgaatttttatttttttttgttgatagttatttatttatattttttttattagagatagaaagaaaagaataaagattaaaaaattttgttgattattttttttttttattttttgagaagtgttaatagaattgaaaatattagtaaggaaaaatgtttttgaggaatagagttaattggatttttaaaatgttgttatgaaaggtgtatttttgggatatgaatttgattttttttttttttttttttttattttttttttttttttttttttttttttttgttttttaaaattatttgtattttttttatgaggtatgtagattttggattatttttttattttttagttaattgtattttaaaatagttttaataaggttgggtatggtggtttagtttgtaattttaatatttggggaggttgaggtgggtggattatttgaggttaggagtttgagattagtttgattaatatggattttgtttttattaaaaatataaaattattttggtgtggtggtgtatgtttgtaattgtagttattagggaggttgaggtaggagaattgtttgaatttgggaggtagaggttgtggtgagtggagattgtgttattgtatattagttagggaaatgagagtgaaattttgttttaaaaataaataaataaataaataaaaaatgttttagtaatagtgtttttaagaatttggttttttagttttttggtagagaagatttattgttgttgttagtttttaagatggtatttgttggaggtggtaggtagaggttttaagtgtggattttaatttttgtggggattgaatttttgtggttgttgtttgtttaggtatgtttgttttttatgaattttttttatttatagggttttaaattttatgttggtgggaggaggaaggagattgggtataatttattagatttttgattgtaagagttggaggttgtttgtgggtttatttgtatttgggtttgtttttatttttttagaatgtaaattttttgagggaatgtgttgttgttattttttagttttttgagtgtatttagtttttttttaatttaaaattttttatttatggtaattgtgagaatgataagaattttttttattttttatattgtaaatagttgtaatgtttagtgggatttatttttgttgttattaattttgttattttagttatgtgagttttttgtttgttagttaagtaaaatggtttttttgtagttgtatggttttttggtttttgtttagggttttggggattttttttagttattgttttgtatttatttattagattgttgttttggtgggtgtttttggttttgttttttgtgtttagtttgttattgtgtgtttagatttggaattttagttttgaagtttttggtggttgggaataaagttggttttgtttattgttgtttggtaaagtaggtgtttgttagtatttattgaatatgtttatgtgtttagaaatggttttattggttgggattattttttttgatgtttatttgtttagaattttttttttgggatgttgatttttttaatatgtgttaggagtttttttttggtttggaatttttagagtgtttatagtggatagggtatttggatatattttagattaatttatgtttttttggaggattttagaggttggaagtttttttaagattaggggtgtagtgtttttttggtttgtggaagagttagaggagtggggataatatttaatattagtttttattattgttagtgtgattttttgttgttgttttatttatttgatgtgtgtagtggattgtgatttaggggtatagggttttttggggattagtggttggagtgttttggttgagtatttgtagttttggtgttgtggttttgttttggttttgtt

SEQ ID NO: 3602 - DNA, 2189 bp, Artificial Sequence
  chemically treated genomic DNA (Homo sapiens)
ggtggggttggggtggggttgtggtgttgggattgtgggtgtttggttggagtgttttagttgttggtttttgggagattttgtgtttttaaattgtggtttattgtgtgtgttaggtgagtagagtggtggtggggagttgtgttagtggtagtagaggttgatgttgaatgttgtttttatttttttgatttttttgtaggttaggggagtattgtgtttttaattttggaggggtttttaatttttggggttttttggggaaatgtgggttagtttggggtgtatttaggtgttttgtttattgtgggtattttggggattttgggttgaggaagggtttttggtatgtgttgaaaaagttggtattttagaaggaagattttgggtagatgggtattggggaaggtagttttaattaatgggattgtttttgagtatataagtgtatttagtgggtgttaataagtgtttgttttgttaggtaatagtgagtaaaattggttttgtttttggttattggaagttttgaggttggggttttggatttgggtgtgtaatgataaattaagtgtgggggatagggttaggagtgtttattagggtggtgatttggtgggtaggtgtagggtaatggttggaaagggtttttgaagttttgagtagagattaaagggttgtgtgattgtaggaaggttattttgtttggttgataggtggaaaatttatgtggttggagtagtagggttggtgatgataagggtgaattttattaagtattgtaattgtttgtggtgtgaggggtgagggggatttttattatttttataattgttgtggataaagggttttgggttggagagagattgggtgtatttaaaggattgaaagatggtgatgatatatttttttagaggatttatattttggaagggtggggataggtttgggtatagataagtttgtaggtggtttttagtttttatagttgaaagtttgatgagttatgtttagttttttttttttttttgttggtatgaggtttggggttttgtggatgaaggaagtttatgggaggtaaatgtgtttgggtaagtaatagttgtagagatttagtttttatgggggttagaatttatatttagggtttttgtttattgtttttagtaaatgttattttgaggattagtggtagtagtaggttttttttgttagagaattggaaggttaggtttttgagggtattgttattaaggtgttttttgtttgtttgtttgtttgtttttgagatggagttttatttttgtttttttggttggtgtgtaatggtgtgatttttgtttattgtaatttttgttttttgggtttaagtgatttttttgttttagtttttttagtagttgtgattataggtatgtgttattatgttgggataattttgtatttttagtagagatgaggtttatgttggttaggttggttttaaatttttgattttaggtgatttgtttgttttggtttttttaagtgttgggattataggttgagttattgtgtttagttttattaaggttgttttgaagtgtagttggttggaaagtggaagaataatttaagatttgtatgttttataaaaggagtgtgaatggttttgaaagataggaaaggaaagggagagagaggaaagaaatagagaggaagaaaggaaggaaattaaatttatattttaggaatgtattttttatgataatattttggagatttaattaattttattttttgagggtgtttttttttgttggtatttttagttttattaatattttttaaaaagtgaaaggaaaaaatagttaatagggttttttggtttttatttttttttttttatttttagtaagggagatgtgggtgagtggttgttagtaggaaaaggtgagagtttagttatgtttgtatttgagtaggaaatttttaaggatgagtagggaattttagtgttgggtttattgtgagttttgaataagtgattgtttttgggttgttagtagtattttttataaagatttgtgtatatagtggttttttttatttataggtgatatgttttaagagttttagtggatattttggtttttgttgttgtttgaggtagaattttgttttgttatttaggttggagtatagtggta

SEQ ID NO: 3603 - DNA, 2367 bp, Artificial Sequence
  chemically treated genomic DNA (Homo sapiens)
tggtttatagttttgtaggttgtataggaagtatggtgttggtgtttgtttttggtgaggttttaggaagtttttaattgtggtggtgggtgaagggggttaaagtattatatggtaagagtgggagtaggagaggagggggtttttagatgtttaaatatttagagtttaggtgaattgattgagtgagaattaatttatattaaggggttggtgttgaattgtttatgatatgattgatttatttttgtgatttagtattttttattaggttttttttttaatattggggattatattttatatatgttttggagggatatatatttaaattatattagtatatatggtttttaaatgttatttagtttttttttatgtgatgttagaaggttgatgtttgggggtgtgtagttttttaggatattttttttgaagggttgtagtaatattttaagtgttatatatttatgtgttatgttagtgttagttttaaggatgtgtaatagttaagggttgagttatttgggattaaatatttgttttgtatagatagtgtttatggtgtggattaatttgtttttgtttgttgttgggattgggtgttggttgttgttgtttttattttttgggagtttttgttggttttatagggtagtattatatgaaggttgttttttgatgtttagtgttgaggtgtgaagattgtattgtgtttgagatatgagttttatgtggttgttgttttttttatatgttttgtgatggatttttttttattaggtggttttttgtttgtggttagtatatatatataggatatgaaagatatagggtatgattataagttatgtatttttttagggattaggatatatagagagagttttttttgttgttttttgtttatattataatgaatatttagttggagagttaagagaggggttagggttgagaggttaagagttttggggtttttgattattttttgttgttgggagaaagaggaatttgtaaggtttaagtggatggtatggatgtatgtaatgaagattgggaagtagattttgggtgggagagttgttttaagtagaaaaatagttaatttaaatttatttttggttgagtttgagtgttagagtaaggtagggaagagtgtttggaatgttgagttagtttaggttgttgtaggttgtattgtatggattttagtattagtaatgtgtgtatagaaaagttggttttttttgttgttattgattgtttattaaagtgaatttgggtagtgttgattttgttgttgaaagtatttgattttttgttgtatggattttttttttagggttaattgtgattgtagatttaattattgagaaaatttgtattttataggataatttttttggttttatgtttatattaattgaaatattagatagatttttgtaagtattataggtatgtttggtttttaagttttagtagagatttttttttttattaataatatgaaatagatttaaaagaaatataataaagtaatgtttttttgattttttttgtgttgattttgtatttttttaaattgatattaatttttaagtatatttaattttaagttttttaataaataatatatttagtagaaatttatttatatgttatttataatttggagaatttttgtttatgttgtttttgttgtaatggggagttatagtattttgattatagaaatatatattaaaattatgattagaatgtaagtaaaaaaataatgtggtatgtagttgtttaatagtattggatgtaaaagaattaaatagtataatatataataatataaaagataatttttaagtatgtgttaggttttttttgatgaattgtaaagaagggataataatatatattattattatttgttattattttattaaagaagtttggttttggtttttagtggatagaggtatagataggtggagttgtatttgtggatgtatatgtatgtatatatataagtttgtatgtttagattggtagttttgagtatttaggttagttaatattattttattttttatgttttagttgatattatttttgaattataaaataaaatgtttaaatattagaaaataagtattttatgttttttttggaggtaggaatatttttttattggttgataaagtgtattttatatttgaagttagatttttatttttttatgatgaggattgtgatttaatatgttagttggttttggtttttttgatttaaggatatataatattttaagagtatttggaatgtttagtttaattaagatggttttagtatgaatgggaaattgggata

SEQ ID NO: 3604 - DNA, 2367 bp, Artificial Sequence
  chemically treated genomic DNA (Homo sapiens)
tgttttgattttttatttatattgaaattattttagttaagttaagtattttaaatatttttgaaatattgtgtgtttttagattaagagagttaggattaattgatgtattgagttataatttttattatggaagaataaaaatttaattttagatatgaagtgtattttgttaattaatgaaaagatatttttgtttttaagagagatatagaatgtttgttttttgatgtttagatattttattttatagtttaaaaatagtattagttgaaatataaaaaatgggatgatattaattggtttgagtgtttaaggttgttggtttagatatatggatttgtatgtgtgtatatgtgtatatttataggtatagttttatttgtttgtgtttttgtttattggaggttagaattagatttttttaatgggatagtagtaaataataataatatatattgttattttttttttgtaatttattagaagaaatttggtatatatttgggagttgttttttgtattgttatgtattgtgttgtttaatttttttatatttagtgttgttagatagttatatattatattgtttttttatttatattttaattataattttggtgtgtgtttttatagttaaagtattgtgattttttattgtaataaaagtaatataagtaaaaattttttaaattatgaatagtatgtgagtggatttttattgaatatattatttattaaaaagtttaaaattaagtatgtttaaaaattaatgttagtttagggaaatgtaaaattagtataaaaaaaattaggagaatattattttgttgtattttttttaagtttgttttatattgttaatggaaaaaaaaatttttgttgaagtttaaaaattagatatgtttgtggtatttataaaagtttgtttggtgttttagttggtatgggtatgaaattaagaaaattattttatagggtataagtttttttggtgattaagtttgtaattatagttggttttagggaaggaatttatgtagtagaaaattagatatttttaatagtagagttgatgttatttagatttattttggtaagtaattggtgataatggaaaggattggtttttttgtgtatatattgttggtgttaaggtttatgtagtgtagtttgtagtagtttgggttggtttagtattttgggtatttttttttgttttgttttgatgtttaggtttagttagaggtagatttgagttggttgtttttttgtttagagtagtttttttatttaggatttgttttttggtttttattatatgtatttatgttatttgtttaggttttatagattttttttttttttgatgatggaagataattagggattttagaatttttgattttttaattttgattttttttttagttttttagttgagtgtttgttatgatgtgggtggagggtagtagggagaattttttttgtgtgttttgatttttgggaaaatgtatggtttgtagttatgttttgtgttttttatgttttatgtgtatatgttaattatagataagagattatttgataaaaagaaatttattataggatgtgtgaaggaggtagtaattatgtggaatttgtgttttgaatatagtgtagtttttatattttagtgttgggtattgggaggtagtttttatgtgatgttattttatgaggttagtaagggtttttgggaaatgaaaatggtagtagttggtatttagttttagtagtagataggagtaggttaatttatattatggatattgtttatgtaaagtggatatttggttttagatggtttaatttttggttattatatatttttaaagttgatattggtatagtatatgggtatgtaatatttaaagtattgttgtaattttttaggaaggatgttttggaaagttgtatatttttaggtgttagttttttgatattgtatgaggaggggttaaatgatatttggagattatgtgtgttgatgtggtttggatgtgtgtttttttaaaatgtatgtgaaatgtgatttttagtgttagaggggaggtttggtgggaggtattagattatagaagtgaattagttatgttatgaatagtttagtattaattttttgatatgagttagtttttatttagttagtttatttgagttttgggtgtttaaatgtttgggaattttttttttttttgtttttatttttgttatgtgatgttttggttttttttatttattattataattggaagttttttgaggttttattagaagtagatgttagtattatattttttgtatagtttgtagaattgtgagtta

SEQ ID NO: 3605 - DNA, 2309 bp, Artificial Sequence
  chemically treated genomic DNA (Homo sapiens)
atataatttgttggttttgttgttagttttaatttattgattttattattgttttggggttagttttttattttttagttgtttaaattttttattttatatatttgaattttatgataaattatttttaatattgttttgtttgtaattttattatttttggatttttgtttattgaatttgtttggttaaattttatttttttttatttttgtgtgtaattatataattggttattattggtaaaaattttaaaattatttatagagatagtttagtaggttgtattatgttattagttagttttatgtgttttttttatggttttttatttattttttggttgatattggtgttttttttttttttttaatttgtattagtttgggttttatttttttgttgagtattagttttgtttttttttggtttttggtaaggtgggggtgatttgaaggaagttttggttttttttttttgttttgtttatgggtgttttggtttttgtatttagggttttgttttttatattggggattatgatgtatatttttgttttgtagagttagtttgtggtttggtttgtttgttttgtgtgtagttttttgttagtatagttttgtttatttttaattttattgttttttttttggattttttttattagtaaatatatatgttgttatttgttttattttaaaatataattaaaataaaatagagtattttggattgtattttttgttagttattatttttgagtttttggtttgtgtagttgattttatggttaggtttttttttatgtttttgttattttaaatgtgggtattgtggtgttaaatttgttttttttattgttgttaataattgtagtttggttgaatttagtgatttatttttgttttaattttttttggttttttggtagtgtttaatgtgtgtgatttttttttttttttgtttttagttttttttgggatttgtgaggtgtttttttttttattttttttttaggagtgtgtttttagttttgtatttgttttttttatttttagtgtatttttgttgtaggtattattttttgatttgttatgttatttgtttttttttttattgtatttatgttttattatttgttttggtttgtataatgttagttttgtaaggggtttttttaaggttttatttttaattgattaatgttgaggatggggagtaatgtgtgtattagagggggttgggtatatgtaggtttgttgttggatggaggagaggtagtattttttgtatgtttgggtggtttttatttttaggtttgtgataagtattttttatttttttattttttgatggagttagttttatttattatgtggatgtgggtgttgtttgtggattaaggttagtgttttgttggttttttttattgtttggtattagtattatatagattaatagattttgttgttttttgtttggaggggttggtgttgtggttggggtattgttttgggtaggttttgttttaggttatgtagtttttaggtttttttttgggaggggttggtttttataaagggggaaaattatgaaatggtaaatttgagttatggtagtatagaggatagtttttgaaggtataagtaggaagggtataatgttttttaaaagagaaaattatatggattttattgatttattattgagttttgagattattgatatttatatatgtgtttatgttgttgtgagttatggggaaaaatggaggagtaaaatgattaagtggtagggtttgtaagagttttttattgtagggatgggttgttttgaggagatattgtttaggtttgggtgttttgggttaaagttttgatttttgtagggttgtgttttgtggatgatatgtggtattggattgtttattgataggtaggaattatgtattgagaggtgggaattgttggttggggggtgggaattgttggttgaggggtgggaattgtttgttgaggggtgggaattattggttggggagtgggaattgggtattgagaggtgggaattgttgattaggaggtgggaattgttggtttgggggtgggaattatgtattgagaggtgggaattgttgattaggggatgggaattgtttgttgaggggtgggaattgtgtattgagaggtgggaattgtgtattgagaggtaggaattgttggttagggggttggaattgtttgttgaggggtgggaattgtttattgagaggtaggaattgggttgagtgtttagtttttttgttttgt

SEQ ID NO: 3606 - DNA, 2309 bp, Artificial Sequence
  chemically treated genomic DNA (Homo sapiens)
gtagaataggaaaattgagtatttagtttagtttttgttttttagtgggtagtttttattttttagtaggtagttttaattttttggttagtaatttttattttttagtgtatagtttttattttttagtgtatagtttttattttttagtaggtagtttttattttttggttagtagtttttattttttagtgtatagtttttatttttgggttagtagtttttattttttggttagtagtttttattttttagtgtttagtttttattttttagttagtagtttttattttttagtaggtggtttttattttttggttagtagtttttattttttggttagtagtttttattttttagtgtatagtttttatttgttagtgagtagtttagtgttatatgttatttataggatatagttttgtaagggttaggattttggtttggggtatttaggtttgggtagtgtttttttagggtagtttatttttatagtgagagatttttatagattttgttatttggttattttgtttttttatttttttttatgatttataatagtgtggatatatgtgtaagtgttagtgattttagaatttagtgatgagttagtaaagtttatgtagtttttttttttggaaagtattatgttttttttgtttatgtttttaggggttgttttttgtgttgttgtgatttaggtttgttattttatgattttttttttttgtgagaattaattttttttagaaaggagtttgggaattgtatggtttggggtggggtttatttagggtggtgttttagttatagtattagtttttttgggtggagaataataaggtttattggtttatgtaatgttggtgttaaataataagaaaaattaataaaatattgattttggtttatagataatatttatgtttatgtggtgggtgggattggttttgttagaggatgggaagatgagaagtgtttgttgtaggtttggagatggggattatttaggtatgtaggggatgttgttttttttttatttaataataagtttgtgtgtgtttagttttttttggtatatgtattgttttttatttttggtattgattaattgaaaataagattttggaagaattttttgtaaagttgatattgtatgagttaaggtaggtaataaagtgtagatatagtgagggagggggtggatggtatgataagttagagggtgatgtttgtggtggggatgtattgagaatagagagggtaggtgtggggttggagatatatttttgagagggagatgggagagagggtgttttgtggattttgaggaaggttgaagataggagaagggaggggttgtatatgttaaatgttgttgaaaggttaggagagattaagatagaaatgaattattggatttggttaggttgtggttattgataatagtgggaagagtaggtttggtgttgtggtgtttgtatttggggtggtgagaatgtgaaggaggatttggttgtggggttagttgtataggttaggagtttgagggtggtggttggtagaaagtgtagtttaaagtattttgttttgttttgattgtgttttaaaatgggataaataatagtatgtgtgtttgttgatggggagaatttaggagaaaaatagtgaagttgagggtgagtagagttgtgttggtagaaagttgtatatggggtgggtaggttaggttatggattggttttgtggggtggggatgtgtattgtggtttttagtgtggagggtagggttttggatataggggttggggtatttgtggatagggtagggggaggagattgagattttttttagattatttttattttgttagggattaggagagagtaaggttggtgtttagtgggagggtgaggtttgagttggtgtaggttgaggagagggagaaggtattagtgttagttaggagatgggtaggagattatgagggaggtgtatgaggttggttggtggtatgatgtggtttgttggattgtttttgtgggtggttttgagatttttattagtgatgattagttgtgtaattgtatatagagatggaagagaataagatttaattaagtaagtttaataaatagaaatttaaaaatggtgagattgtaggtaaggtagtgttaaaaatgatttgttatggaatttaaatatgtaaggtggagagtttggatagttggaggatgggagattgattttaaaatagtgataggattaatgggttagagttggtagtagggttagtagattgtat

SEQ ID NO: 3607 - DNA, 2697 bp, Artificial Sequence
  chemically treated genomic DNA (Homo sapiens)
gttggtggggtttgtttttttttttgtttttatttggagaattttgggggaattgttggttagagtttttaggtatgtttagaatggattattttttttagggtttatggaattgtataagttatttaggtttttttggatttttgtagagttggtggtgggtatagtaaatatttaggttttttgtatttttttgagttttgttttttttattttttatttttttttagatttttttttttattgagtttttttttgttttggtgaggagggggtgttgagggggtggggtgttgtgtgggggttggaggggagggggtgttgtggggtggggtttggtggtggtggtggtggtgtgtggggatttggaggtattgggtgtgtgtggttttggtttgggatgttttgggatgttttggggttgggttttggttgtggttgttgttgtggtgtttgtgttttggtgtgttttgttttttgtgtttgttgtggagtgtagtttgtgtgtttgttgtgtgtttttagtttttttttttgagtttgttgtgatgggagttgtgtggggatttttggttagattttgttggttgtttttgtttagtgttttgttgttgttgttgttgggtggtgagtatttgagagttgggggtatagagtttgggaagtgtgggagttttgtgggtaaaaggttgtgtttggggtggtgggtttgggtggttggaatggttttggagtagtggagaggtttgttgggggtgtaggtttgtggtggaagggtgtaaggagtttgggtgttgggaggttggtgaagtttttagggatgtggttagggtattttttttatttgtgttgtggggatgtatttttagtttttttgagtttttttggtttgagttgagagtttgtttgagaattgttgagagttgttggtttttgggtttagatggggagttttttgttgggggagaaaagattatttgtatttattgtggggagtgtgatggagaaaaaggaattttttattttatttggtagggttggtttaggtaagagttgttggtttggggtttgatgttggatagatttgtggtgtgtaaagtgtggagttttgttatttatgttgatttgatgtttttggttttttttttttgagtttttgggtaaagttgagattttagatggttttgtgggtgagggtggaagaagggaagagttaggggttgtttttatttatggtttttagttattggtttggaattttgtgtttattttgtgttagggttgaatttggggatttgagggttttaggttgttgtggtgattaatgtgtgaaggttgttgttaaaattgggtatggtttggttgtaaaggtgtggatggggtttgttttgtttttttttggatttttattttgattgtttttatagaggaaaggaagtatttttaagggaagaaaggtaaaaagagtttattttggttttttttgggggggggttttagtattttaatgagggtgtggtttttattattagggtagatagtattgtttttttaatttttgtagtttttattttttggtttggttatatttaagagttattattgaggtgttgaagtgttttataggaaagtattaagttatttgtatattttaaatagtttggattggaaataaagtttttgattttttataatattttttggtggtttttgaagtagtttttttttggggagttttgttgaggagatttgttttaggtgattattttttattttttttgaaggtggtaatgggaagggtatgggtaaggaattgtttttttaatatttttttggtttgttagttgtggaggggttttggtgttggtggaattaatattttttttgtttttagttgtaaaaggagaggtaaatgtaatttaggaaagagattaatttttagggatttggaggaggtgtttttggagttgttttgttttttttgtgatgtgtgtggtggttattgtttgtggtagaatttatatttgtttttagaggaagtatggaagtttttttgtatagttaggatgggggtttagttatttgggtgagtagtttaagtttataggttttttggttgttttggttgggttttggtgtgtgggtttgtttaatgaggttgtttttattgttgttgtttagggtattagagttaaggggagtttttggtgaagatggggtttttgtttaataaatgttgaatttttaaattttttttatgagaagatgattttgatgttaattgatttaatttggtgattggttggtgtttagtgtgtgtgtgtgtgtgtgtgtgggggattttgttgggggaagttagggtaggttgagggtttaggataggaggtttgtagtttttttaggggtggggggatgttttgtgtttaataaaggaatattttaatgagagttttaaattaattttattaaatgtgttttgttgtggaatttgtttatgtgttgtaaataattttagtggaggttgaggtgtttgttgttttttagtgaaattttgggatttaatttatttttagatgtatgattttaggggtaatggttttttaatagattatagtagatgtttgtattttattgtttaattgtgtaattaattggagttgtagtgagattttattgttaataaggttggagtaagga

SEQ ID NO: 3608 - DNA, 2697 bp, Artificial Sequence
  chemically treated genomic DNA (Homo sapiens)
tttttattttagttttattaatagtgggattttattataattttagttaattatataattaaataatgagatgtaaatatttattgtgatttattaaaaaattgttgtttttgaagttatgtgtttgggggtgggttgagttttaggattttattagaagatagtaggtgttttggtttttattgaaattgtttatagtatatggataggttttataataaggtatatttggtggaattgatttaaggtttttattaaaatgtttttttgttgagtataagatatttttttatttttgaggagattatagattttttgttttaagtttttagtttgttttaattttttttaataggattttttatatatatgtgtgtatatatattaaatattaattagttattagattaagttaattaatattagagttatttttttatggaaggaatttaggaatttagtatttgttgagtaagagttttatttttattagaaattttttttgattttagtattttgaatagtagtagtgaaggtagttttattgggtagatttatatattaaaatttaattaggatagttagggggtttgtgagtttgggttgtttgtttagatggttgggtttttattttggttgtgtaaaaaaatttttatattttttttgggagtagatgtggattttgttatgagtaataattattatatatattataagaaaaatggggtaattttagaaatattttttttaaatttttggagattggttttttttttgggttatatttatttttttttttataattgggggtaggggagatgttgattttattagtattaaaatttttttatagttggtaggttagaaagatattagaaaggtaattttttatttatgttttttttattgttatttttaaaggagatggaaggtgattatttaggataggtttttttgatagagttttttaagagaaagttgttttgaggattattaaggagtgttgtggagggttgggggttttatttttagtttgggttatttgggatgtgtgggtggtttggtgtttttttgtaaggtattttaatattttagtgatgatttttaggtgtgattaagttaggaaataaaagttgtgggagttgggggggtggtgttgtttgttttggtgatgagggttatatttttgttaaaatgttaaggtttttttttaagaaaagttagaatgagttttttttgtttttttttttttagaaatatttttttttttttgtgaggatagttaggatggaaatttaggaaggagtagaataaattttgtttgtatttttgtagttaggttatgtttgattttggtagtggtttttatatattagttattgtgatagtttgggatttttggatttttggatttggttttggtatggagtgggtgtagggttttagattagtagttagaggttatggatgggggtggtttttaatttttttttttttttgtttttatttgtagggttatttggggttttagttttgtttaggaatttggaggagggaagttgggaatgttgggttggtgtaggtaataaagttttgtgttttgtgtgttgtaggtttgtttggtattgggttttaaattagtaatttttatttgggttgattttgttgggtggggtggggaatttttttttttttattgtgttttttatggtgggtgtggatggtttttttttttttgataagaaattttttatttgggtttgagagttagtaatttttggtagtttttgagtaaatttttggtttagattagaaaaatttagggaggttggaaatgtgtttttgtggtgtgagtgggaggggtattttgattgtgtttttggaggttttgttagttttttgatatttgggttttttgtgtttttttgttgtaagtttgtatttttagtgagtttttttattattttagggttgttttagttgtttaaatttattgttttgggtgtagttttttgtttatgggatttttgtgttttttaagttttgtgtttttaatttttgggtatttattgtttagtagtggtagtagtaggatgttgagtagaggtaattggtggggtttggttggggatttttgtgtagtttttattgtggtgggtttaggaaaaggagttgagggtgtatggtgggtgtgtagattgtgttttgtggtgggtataggaggtggagtgtattggagtgtgggtgttgtagtagtagttgtagttggagtttgattttgaggtgttttgaggtgttttgagttggagttgtgtgtgtttagtatttttgagtttttgtgtgttgttgttgttgttgttaagttttgttttatgatgtttttttttttttggtttttgtatggtgttttgtttttttgatgttttttttttgttgaggtggggaggagtttagtagggggaggggtttggagagggatggagaatagagagagtaaggtttagggaagtgtaggggatttgagtatttgttgtatttattattgattttgtagggatttgggagaatttaagtgatttgtgtgattttgtggattttggggagaatggtttattttgggtatatttggaggttttggttaatagtttttttagaattttttaggtgggggtaggggaagaggtgggttttgttaat

SEQ ID NO: 3609 - DNA, 2405 bp, Artificial Sequence
  chemically treated genomic DNA (Homo sapiens)
tgtgtaagttttgattaaatatagagtttttattttttgtgtaagttatttaagagaaaggattttattttttaatttttatttttttagtagaagttattattgttagtttaattttaaatttatatataaattatgaagtttaataattttttaaaaataagttttttaaaaatattttttttgaaataatgttttattgattttgaaaattttttttagttgttgttatgtttaatattttttattgatgatatatgtggtgatgatggtagtgtaaagaaaaagtttgaggaaatatatatggtgttgatattttattaaaatgaatgtagtatttatttataattgtaatttaatttttaagtaaaaatttgattttttattattatttttttaagtttggtttattataggtttaaagtttgtatgaatttatatagttgttttgaggttttgtatatttttttgtttttgattgtttgatttttttttaaaggggtatttttgtattgaagtaaaatataattattaatattagttttgggggaaaaagaaattaataaatttatagtttgaaatgttttaatattttgtatttaaaattttgtgtattttttagaagttataaaaataaaagttattttttgtaaaaaaaaaaaagaaaaaaagattgagaataaattgttatgattttagaaaatgatagtagatgtgtaggtgttaatattagagagtttatttttgaataaaatggtgttttttaaatagtgattatttatatgttttagaatttttttttgggtatgggtgtttttatattgttttattattataagatgtaagttgtgtagtagaatgttttttgtatggtatttagttaaaagtgaaataagttgtttattgatagagaggttatttatagaatatatttatttatattagtgttaggtagtaattgaaaggtaatgtaaagaagtaatttttttttattttgtttggagtaattttgatttggagagttatgtatatattttatgttaaggaggtgatgaaagttttattttttatagtgatgatatttggaagaagatataattgttattgtgagttttttaattatttttggagattaagtgtgagatgtagtagtgtaggatgattggattatgtaaaatgagatagatgttatttgtgagttatgtgtaagttgttaagtgttaaaatgaatatttttattaaatgatggagtttttatattatttgtagtttggttagatttgaaagatgagttgattgtttttagatagtgtggtaaataggtagggatttggaattttttttggttgtatgagtaattattgttttatatttaaattagaaatatgggtttttagttaggttttgagattgtttttaaaggatgttgttgtatttatgttgaagtgtggtttgttttttttgttttatttataagggttatagagttttgagaaagaaattattagttttttttatattatggtaaagaaatgtaaaatttatgattttttgttaggaaataaaagggtttttatattttaaaataatggttataatattgtgggtagaatgtttttaagaattgttaggaggtagtattggagttttgtttttttgtgttttgaggttttagaattaattttttatttataatttatttttttatttttttattggtattaattttattattatttttattttaatttttaattgttgtgattatatagtaatatagtaatatattttatagagtttatggggtatatgatatattttgatataggtatttaatatgtaatgattatattaaggtaagtgggatttttattattttaagtatttattttttgtgttataagtaatttaattatatttttttagttatttttaaatgtataattaaattattattgattatagttattttgttgtgttattaaatattagattttatatatttttttttttttttgtatgtattaattatttttatattttttttttttttttattattttttttagtttttggtaattatttttttattttttattttaatgagtttaattgtttttatttttagtttttataaataagtaggaatatatgaagtttgtttttttgtgtttggtttattttatttaatataaggatttttagttttatttatattgttgtaaatgataggattttatttttttttttggttgaattttattttgtatttgtattatatttttttatttatttgtttgttgatggatatttaggttgttttttaattttggatattgtgaaatatgttgtaatatatatgggtatgtagatatttttttgatagattgatttttattttttgg

SEQ ID NO: 3610 - DNA, 2405 bp, Artificial Sequence
  chemically treated genomic DNA (Homo sapiens)
ttaaagaatggaaattagtttattggagaggtatttgtatgtttatgtatattgtagtatgttttataatatttaagattaagaaataatttaaatgtttattaatagataagtggataaagaaatgtggtataggtatagaatagaatttagttaaaggaaagaatgaaattttgttatttgtaataatatggatggaattggaggtttttatgttaagtgaaataaattaggtatagaaagataaattttatatgtttttatttatttgtgggaattaaaaatggaaataattgaatttattgagatggaaagtaaaagaatggttattagaagttgggaagggtagtgggagaaaagggggagtgtggggatggttaatgtatataaaaaagagagagaatgtataagatttagtatttgatagtataatagagtgattatagttaataataatttaattgtatatttaaaaataattaaaagggtataattggattgtttgtaatataaagaataaatgtttgaggtgatggaaattttatttattttgatgtgattattatatattagatgtttatattaaaatatattatgtattttataaattttatggggtatattattatattattatgtaattatagtaattaaaaattaaaataaaaataataatagagttggtgttagtaaaaagatgggagaatgaattgtaaatgaaggattggttttggagttttaggatgtagagagatagagttttaatattgttttttggtagtttttgaaaatattttatttataatattgtggttattattttagagtatgggaatttttttgttttttaataaaaagttataagttttatatttttttgttatgatgtgaaaggaattgatgattttttttttagaattttgtggtttttgtgagtgaaatagagaggataggttatgttttaatatgaatgtagtagtattttttggaaataattttaagatttaattgaaaatttatgtttttaatttaagtatgagatagtaattatttatatagttagagaggattttaagtttttgtttatttgttgtattatttaaaaataattaatttattttttaaatttgattaaattataaatggtatgagaattttattgtttaataaggatgtttattttggtatttagtagtttatgtgtggtttatagatggtatttgttttgttttgtgtaatttaattattttgtattattgtgttttatatttagtttttaggagtaattgaaaagtttatggtgataattgtgtttttttttagatgttattgttataaggagtggggtttttattatttttttgatgtaggatgtgtatatggttttttaggttagagttgttttaagtaaggtaaagagaaattatttttttgtattgttttttagttgttgtttagtattggtgtaaatgaatatgttttataaatggtttttttgttagtgggtaatttgttttatttttggttgggtattatatagaaaatattttgttgtatggtttgtattttgtggtaatagggtaatataaaggtatttatgtttaagaaaggattttaaaatatgtaaatagttgttgtttagaaggtattattttatttggaggtaagttttttggtattagtatttgtatgtttgttattgttttttgaaattatgatagtttgtttttaattttttttttttttttttttttgtagggagtggtttttatttttgtaatttttaaagggtgtgtaaaattttaaatgtaaagtgttgaaatattttaagttgtaggtttgttagttttttttttttttgaggttagtgttaatagttgtgttttattttagtgtaaaaatatttttttaaaaaaaaattaaataattgaaaataaggaaatatgtaaagttttaaagtagttgtgtaaatttatataggttttaggtttataatgagttagatttaagggaatgatagtggaaaattagatttttatttaaaaattaaattataattatgagtgagtgttatatttattttagtaaaatattagtattgtgtgtatttttttaagttttttttttatattattattattattatatatgttattagtgagaaatgttgagtatgataatagttaagaaaaatttttaaggttagtaaaatattattttaggaaaaatatttttaaaaagtttatttttaaggggttattaaattttgtaatttatgtatagatttgggattgaattagtaataataatttttgttgaagagataaaaattagaagataaaatttttttttttaagtagtttatataaagaatgggggttttatatttagttggggtttatata

SEQ ID NO: 3611 - DNA, 2393 bp, Artificial Sequence
  chemically treated genomic DNA (Homo sapiens)
attaatattattagatgtgggattttttaatagtagagattaaagttgagtttttaatatagtattatttttttgggaatattagttaattatttggtgatagattgattatattaggttttttatattatagaaggagaattgatttgttttttttggaatagatattattttgaatatggattagttttttttgttagaatatgtattagttagtattatttgtatttataaaattgatggattgattttttagaaatttattggttttattaggtaatttatgattatgaaatatgtgggttatggtaataagttggtaagaggtttattaaaaatttagttatagatggtattaattaggggataatattttaaaaggatagattttattttatagaatgttagagggagagagggagatagggagagagggattgatatatgggtattgttttttttattagtttaggattaaggaatggttgtgaggtgattttttttattattttatagttaataatttaattgtaggatttttgttttttgttttaattttgagttttgttggttgtgtgttttagtgttaataataatggagtttttgaattggtagttgaaataagtatttggttttttggggttttttttgttattgaaataaagaatagtatttaattgttgtagttatagattttgattataaaagggaaattagattgttattaaataatagggttagggaagtttgtgtttaaatttaggagattttttgagatgttgtttaatatttttatgttttatattaaaagttaatggaatatgtagggggtggtttgagaatttagaatatgttttgttttttattatttttattttatttttttttagggaggtagtggatgttggagttttttaggttagaagtttaggggtaggggtatggtgggggtgttttttttattttgagaaaatgtagtggtggttatggggaggggtgttattatgtagtatttaggtttggattttagttagtagtattagtttttttttatttttgggtagtgatattgttggtgtagattgttttaggtgtgtttttgtttagttttattgtttttagttttagtttgggtttgtttttagtttgttggagttgttggatgtgtttaggtttttaggtattttggtttttttttatttgttttgtgaagattgagggaaagtagatgtgtttttgtggtaatttggagtttgtagtttgtagggattttattgttttaggtgtaggtgtgtatatgttagttgtagaaaatattatattaaattagtttgagggagttaaagtaaattataatattttaggtgttagagatttttttattatagaatttgtttgtttggatagtatgatattttttttataagattttattaataagttgtataaatagtttataggtttagtattatatatttgagaaaagagtttttttaatgttatattaaaattttttttagttaatagaaatagaggttagaatattatagagtaaaatttagaaagtttgaatatggaaggaaattttatatattaggttttgaatggtttggtgttagttatttttataaattttttgtgtttttattatataatattttttggtgtttttgtttttgatgttaatattagagatgtatgaattgaattgtgttaaagttagaatttggttttggttatattaggtatggtttaggtaattttagttatttaggaggttaaggtaggagaattgtttgaatttgggaggtggaggttgtagtgagtagagattgtgttattgtattgtagtttgggtaataagagtaaaattttgttttaaataaataagaaaataaaaaatattttttaagtgtattgttttttaatagaattaatggagttgttagttttttttagaaattttttttttatggaaatgtgttttttttgttaattaggaagtttgttgaatagattttttggttataaatttttaagagtggttaaagtattttaatggatagataagaaaggtaaagatgaattttttattttttttggtttttgtatagtagttgatttagttatatttaaatttttatttatattgaaatttatattaaaaataaataaataaaaaataaataaaaaataaataaaaaataaataaataaaaaataaataaataaaaaataattttaaaattaaatataaattagattttatatttatagtttgggatgttaaaaagaaaagttgttttgggatatgttgaagtaaaattgtgtgtatgggggatttggttgttaatatattttgttgagttaaaaattgtgtttagatgagtaag

SEQ ID NO: 3612 - DNA, 2393 bp, Artificial Sequence
  chemically treated genomic DNA (Homo sapiens)
tttatttatttgaatatagtttttgatttaataaagtgtattagtagttagattttttatgtatataattttgttttagtatattttagaataatttttttttttggtattttaaattgtaggtgtaaaatttagtttgtgtttagttttagagttgttttttgtttgtttgttttttgtttgtttgttttttgtttgttttttgtttgttttttgtttgtttgtttttggtgtaggttttaatatgaatggaggtttaggtatggttggattaattattgtataaaagttaagggaagtggaagatttatttttgttttttttgtttgtttattaggatattttaattatttttgggaatttatggttaggaagtttatttagtagattttttaattggtagaggaagtatatttttataaaagaagagtttttggaggaagttagtagttttattagttttgttggaagatagtgtatttgaaaggtgttttttgtttttttgtttgtttgagatggagttttgtttttgttgtttaggttatagtgtaatggtataatttttgtttattgtaatttttattttttgggtttaagtgatttttttgttttagttttttgagtagttgggattatttgggttatgtttagtgtggttgaagttgagttttgattttggtgtggtttagtttatatatttttgatgttgatattagaagtagaaatgttggagaatattgtatagtagaaatataaaagatttatagggataattaatattaagttatttggagtttgatatgtgaagtttttttttgtgtttaggttttttgagttttgttttatggtattttggtttttatttttgttagttgggaaggattttaatgtaatgttaagaaaattttttttttaggtgtgtgatattgagtttataaattgtttgtgtagtttattaataaaattttgtggaaaaggtgttatgttatttaaataggtaaattttgtaataggagagtttttgatgtttgaaatattatagtttgttttgatttttttagattggtttggtgtgatattttttgtaattggtatgtatatgtttgtatttggggtggtggggtttttgtgggttgtaggttttgggttgttgtggagatgtgtttgtttttttttggtttttgtggggtgggtggggggaggttagggtgtttggaggtttgaatatatttaatagttttagtaggttgagggtgagtttaagttggggttgaggatagtagagttgaatgaagatgtatttgagatggtttatattagtggtgttgttgtttgaaagtgagagaaggttgatattgttagttggaatttaggtttgggtgttgtatggtggtgtttttttttgtgattattgttgtgtttttttggggtgagaaaggtgtttttattatgtttttgtttttggatttttggtttaagaagttttagtgtttgttatttttttgggagggagtggggtgggggtggtggggagtaggatatgttttggatttttaggttgttttttgtatgttttattgatttttagtatgggatatggagatattaagtggtattttagagaattttttgggtttagatatagatttttttagttttgttgtttagtagtaatttaattttttttttgtaattaggatttatggttgtagtaattgagtattgttttttgttttagtggtaggagaagttttaaaaggttaggtgtttgttttagttgttaatttaagggttttattgttgttggtattaagatatatagttagtagggtttagagttgggatgggaagtaaaagttttgtaattgagttgttagttatggaataataaggggaattattttataattattttttgattttgggttggtggaagaaatagtatttatgtattaatttttttttttttgtttttttttttttttttggtattttgtaagatagaatttatttttttagggtgttgttttttaattggtattatttgtagttgagtttttggtaagttttttattagtttgttattatgatttatatgttttgtggttatgggttatttggtaaggttagtgaatttttagggaattagtttattagttttgtgagtgtagatggtgttggttagtatatattttggtagggagagttaatttatatttagaatagtgtttattttaaggaggataaattagttttttttttatgatgtaaggggtttgatgtaattaatttgttattaggtggttggttgatgtttttgggggaatggtgttatattggagatttagttttggtttttgttgttggaagattttatatttggtaatgttggt

SEQ ID NO: 3613 - DNA, 2378 bp, Artificial Sequence
  chemically treated genomic DNA (Homo sapiens)
attggttttgaatttttggttttaagtgatttttttgttttagttttttaaagtgttgggattataggtatgaattattatatttggttatttaatttatatttttaagaaaatattgagattagtagaagtagttatattatttttgaaaatataaaagttataatatatttttttttttaaaaaaaaaatttgtaaaaattttgtaataaatttattttatgggtatgttttgattgagatagttggaaatttataattatttttatttaatttaatattgtaaatatttattgtatgtttattatgtgttaagtattatattaaaagttgggaaaataaataatttatgtatttgtttttgagttattattagatagggtaagtgtggaggttatttggatttaagaaaggaattttagtatttttaagtggatttagtaagtgtttttttttgttgtaaaatttttaaatttttatgtttatttgaaatagaatttaatttataaatatataatttttagaatatatttattatatagggaaaagtatttaagtgtatttgttgtttagtttaaaagtatgagatttgatttgtttgttatatagataaaatatatttagtataggagagtttatttttaatttggttatgtgattttaatatttttttttaatgtttatttttaagtttagaataatagaaataaatatttgtatattggtttttttaaaattttatatttggaattgtattttttttatgttaattataaatgtaattttttattagtttatttattaattttttttaaaaataaatttagattttttttattttttataattaaaattttttaattatagaggagagttgtgtgtatttatttagttatgtttttgttttttttttttttttttttttttttgtttttattttttttttttttttttttttttttttttttagttttttttttgggatattgagggataaagttgtaaggtattattatagattttttattttttttttttgtttattagaatgttaataagagatataatatttagaaaatagagagtagagatttttttggattaaatagtattttttttttttgtttttgtttttttgtgatttaagggagaaatgattttttttttttaagtgattttatttttttttgttaagaatttgtggatatgttatttggttagagtttagtttgtagttattatgtaggtaatttatttatgttagattataatttatttaatttgtttgtgttttagttaaatgtgtattagagtaaaagtttagatttgattatgggtaagtttaatgattaatataagttatttaggttttttttttagggtttgttagtaatgattaaaggaaaagtgttttatatttttttttatttattgtatgtgttttagataagaattttaagtaaaagtttatttagtgagataaataggtatttaatattgaaagaatttgttagtaaattagtgattgaatagagggtttaagagaaaggattattagagggtagatttttatttatgaatagttttttattttttattttgaagagtgatttgtaaatattaggttatgggttgttatttatatatttattgtaggggtatgggtttaaagaagtatagaagggaagtaatttggtttaagttttgttgagaaagggttgattgattttttttatttttttattttttatttttttttttgattttgtttttttaattaagaggaggtttttgatttgtatttattattttttagttgtatttagattatgggttttagttattggttgaattggtgggtttaggaaggttaataatatttttttatttggtttatgtttgatttttttgtttttgttttattgtttattttgatttatattttttaatttttgattatgtttgtttatgtttggtgatatttgattagaagatgtttttattttttatttttttttttttttttgagggagaagttattttggtaaaatttgatagttttgagtttttatttttaaggattagtagtagatttggagaagtatttttagtaaaattagattaaagttatggaaatatgattataattttgatgatagtagtaaaattattttttagaaagtgtggaagtttatattaattttgttgtatattatagtttggtaatttgtgataagttgaaaaatttttgtagttttgaagttagtggtgtagagagagggtgtttggttagattggggtaggtagggggttagttattttattattttgtttgtttgttgaattttttttagtttttattttggattttttttatg

SEQ ID NO: 3614 - DNA, 2378 bp, Artificial Sequence
  chemically treated genomic DNA (Homo sapiens)
tatggaagagatttagagtggaaattgagagaggtttagtaggtaggtagggtggtggggtgattgattttttatttgttttaatttggttaagtattttttttttatattattagttttagggttataaaaattttttagtttgttatgggttgttaaattgtgatatatagtagagttgatgtaaatttttatattttttagaggatagttttattattgttattagagttgtggttgtatttttatggttttaatttggttttgttggagatgtttttttaggtttattgttggtttttgaaggtggagatttagggttattaaattttattaaaatgattttttttttaaaggaaagggagaggatagaagataaggatgttttttggttaggtattgttagatgtagataaatatgattaggaattgggggatgtgaattagaatgggtagtgggataggaatagagaagttagatatggattaagtaagaaggtgttgttgatttttttaggtttattagtttaattgatgattgaggtttatggtttgggtatgattggagggtgatgagtataagttaaggatttttttttggttaaaaaagtaaggttaagagggaggatgaggagtagaaaaatgaagagaattaattaatttttttttagtaagatttggattaagttattttttttttgtatttttttagatttatatttttatagtgggtatatgaataatagtttataatttggtatttatgagttattttttgggatgaagagtgagagattgtttatgaatggggatttgttttttagtggtttttttttttgagttttttgtttaattgttgatttgttggtaaatttttttaatgttgaatgtttgtttgttttattgggtggatttttatttaaaatttttatttggggtatatgtagtaagtggagaaaaatgtaagatattttttttttggttattattaataagttttgaggaaaaagtttgagtggtttatgttaattattaaatttatttatggttaggtttgaatttttattttggtatatatttggttgggatataaatgagttaggtgagttatagtttaatgtgagtgagttatttgtgtggtggttgtaggttgagttttaattagataatatgtttatggatttttgatagagagaaataagattatttagaaagaaaggattattttttttttgagttataaggagatagaaatagaaaaaaaaggtattgtttgatttagaaaagtttttgttttttgttttttaggtgttgtattttttgttaatgttttggtgaataaaaggaagaaatgggagatttatagtagtgttttgtaattttgttttttgatgttttaaaggagaagttgagagggaagggaggaagaagggaagagggagtgagagtagagagaggagagagagagaggagaataaaaatatgattaaataaatgtatatagtttttttttgtggttgaaaaattttagttatgagaaataaagagagtttgagtttatttttaggaagaattagtggatagattaataaaaaattatatttataattgatatgaaaaagatgtagttttaaatgtagggttttaagaaaattagtgtgtgaatgtttatttttattgttttgagtttgggagtaggtattaagaagaaatgttaaaattatgtagttagattgaaaatagatttttttgtgttgagtatattttgtttgtgtaataagtaagttagattttatgtttttggattaagtagtaaatatgtttgggtatttttttttatgtggtagatgtattttgaaagttgtatatttataagttgaattttattttaaatagatgtaaaagtttgggaattttgtaatgaaaaggaatatttgttgaatttatttgaaaatattagaattttttttttaaatttaagtagtttttatatttattttatttggtaatgatttgggggtaggtatatagattgtttgtttttttaatttttagtatagtgtttagtatgtagtgggtatataataaatgtttgtagtgttgaattaaatagaaatgattatagatttttagttgttttaattagaatatgtttgtaaggtgagtttattgtaaagtttttgtagattttttttttgagggggggagtatattgtagtttttatatttttagaaatgatgtaattatttttgttaattttagtgtttttttaaaaatataaattaaatggttaggtgtggtggtttatgtttgtaattttagtattttgggaggttgaggtagggagattatttgaggttaggagtttaagattagt

SEQ ID NO: 3615 - DNA, 2351 bp, Artificial Sequence
  chemically treated genomic DNA (Homo sapiens)
gattttttattgtgtttttgatatttgggtttaggttttttttattatttttttaattttttttttttttaaggtatttttaattattttattttgtttaaaattttgtaatatttttttattgtttatagggtataatttaatagttttatatagtaaataaagttgtttgtaaattagatgttttttatgtgttaggttttattattttttttattaatatttttattttgttttgattatttaagggttttaaaagtattatattgttttttattttttttttttttttatattttttttgtttaaaatgttttagttttttttgtagggtttttttagtattatttttgttttttagattttgattttaggaattttaatgttgtattatatgatttgtttgtttgtttttgtgtttatttttttgttggattgtaagttttttgagagtgagtttagtattttttattttggaatttttatatttgtgatattgtataagttaaaatagatatttagtgagttagtagttatgttttataaagttttttttatatttattattttatttgatatgtttagaaatggtgttttttagaaattaggtgtaattggtagagtaggtttgaggtatttttatattgttaaatgataaaattaaaattaagaaatatttagaagtggtagattagggttatataaagaaaaatagtagaagattttttttaaatttttgtattatttttatattattttttttgttagattatgtgatttttgagtataggattaaaagtaaaagaaattggaaaataaaggtaaattatatagtaagaaagtagaaggatttttagatgtaatataataaatgaatttattttattatttttttgttagttattttttaaaaaatttatttttataaaagaattttttgaagtgttttttatttttaaattaaataaaaaaatttttaaaatttatgatttatttatttttttgttttttatagtttttagttttaaatttttaaaatgttattaagtattatatttaattttataataaatttatattttaggtaggatgttgtttataggatttatgttgggtgatgtttgggtgatttaaatagggaaataatatttttttaagttatattagtttttaatggtgttattggttatgtgtagagaggtaaatttatgagtagtattggggagttaatgaatggttggttagatggtgtttgttagaaggtgttgattttttagataattgggattgttttttgggagtaaatgagaggtgtagtagggatggattgtattttaattatatagaaatagatagatttattgttaatgaaaataattatatagttaggtatatttttttttttttgattttgtttgttttatttggtagatatagatgaggatttagttgaaattataatattatattaaatgatgtaatggagtaaatatgaaaagttatttataaattattagtatttttaattaggaaaaattaaatagaataaggaaaaataatgtaaattagtggtaaattaatttggaattaataagggtattttgattgttatagtatgaattatttgaaaataaataaaatttgaaatataatagtgatttgtagatgttattgaaatatttaaattggtggagtttattaaggatattttggtatttttgattttttagtataatatatttgaaatgaattatttttattaatttgattatttttatttgttgttttgttgaattgtggaagtttttttattatatgtttagtgatatttttggtaggtaaattttgatatttaatgtttatattttagtagatataataagtagaaaattttattgatttttttgttgttattagagaatattatttaaatatttgtttgtttgttgtggttatttttaggtattgtataaaattagttaaataaatgttattataaaattatggatagtttgtttggttatagtaatagatttagtagattgggtaattttattttttattagttatgtgattttaggtaagttgtttagtttttttttgttttggtgttttggttaaagtgaagattttatgaaatgaatgtaaagagtttgatatagtagttagtatgtagttaatttttgtaatgttttttttttttgattataaagagtttttagtttaggttatttatttattttttttttatgtttttattttttttgattgtatatattgggtttgtttttaattttgtgtttattttaaataggtttttagaaatttagagtgatgtatttgaaaatttg

SEQ ID NO: 3616 - DNA, 2351 bp, Artificial Sequence
  chemically treated genomic DNA (Homo sapiens)
taaatttttaaatatattgttttgaatttttagaagtttgtttaggatggatataaggttgaagataaatttagtgtgtgtaattaaggaggatggaaatataagaaggaaatgaatgaatgatttggattgagagttttttgtagttaggaaagagaagtattatgagagttgattatatgttagttattgtgttaaattttttgtatttattttatagaatttttattttaattagggtgttaaggtaaggagaggttaaataatttgtttgaggttatatagttggtaagaaatagagttgtttaatttgttgagtttgttattgtgattaaataggttatttatagttttgtgatggtatttatttaattgattttatgtaatatttaagagtaattataataggtagataaatgtttaggtaatattttttgatagtaataaaaaagttaatgaagttttttatttattatatttgttgaaatgtgggtattgagtattaaggtttatttgttaaagatgttattaagtatgtaataggaaaatttttgtagtttagtaaagtagtaagtgaaaatggttaaattagtaaaagtggtttattttagatgtattatgttggaaagttaaaagtgttagaatatttttaatggattttattagtttgaatattttaataatatttgtaggttattattgtattttaaattttatttatttttaagtagtttatgttatagtaattaaaatatttttattaattttaggttagtttattattaatttgtattatttttttttattttatttgattttttttaattaagaatattaatagtttataggtagttttttatatttattttattgtgttgtttaatatgatgttatagttttagttagatttttgtttatgtttattaggtaaaataaataaaattaaaagaggaaaaatatgtttggttatgtgattatttttattagtagtgaatttgtttgtttttgtgtgattgagatgtaatttgtttttgttgtattttttatttatttttaggaaatagttttagttgtttaaaaagttaatattttttgataggtattatttggttagttgtttattaattttttaatgttgtttatgaatttgtttttttatgtgtgattagtgatattgttgagagttaatgtggtttaaaggaatattgtttttttgtttggattatttaggtattatttagtatgagttttatgggtaatattttatttgggatgtaagtttgttataagattaaatgtaatatttgataatattttggaaatttgaagttgagggttgtaaagagtaaaaaaataaataggttataaattttgaaagtttttttgtttggtttgaagatagaagatattttagaaaatttttttgtgggagtaaattttttgaggagtgattaataagggagtgatgagatagatttatttattgtgttgtatttgaaaatttttttgtttttttgttatatgatttatttttattttttagttttttttgtttttaattttatatttagaggttatatagtttagtaggagagataatgtgaagataatgtaagagtttgaggaaaattttttgttatttttttttatgtaattttagtttattatttttgaatattttttaattttggttttattatttgataatgtaaaaatgttttaaatttgttttattagttatatttggtttttaaaaggtgttatttttaggtatattaaataaggtaatgaatgtgaaaaaagttttgtaaaatatagttgttggtttattgggtatttgttttggtttatataatattatagatgtagagattttaaaataaaaggtattaaatttgtttttaaggagtttataatttagtggagagatggatataaaagtaaataaataaattatgtgatgtaatattaggatttttaaaattaaggtttaaagagtagagataatgttggaggagttttataaaggaggttgggatattttgggtagaggaaatgtggaaaaaagagagaggtgagagatagtatggtatttttgaaatttttaagtagttaaaatgggataaaaatgttggtagaagaaatggtgagatttgatatataagaagtatttggtttgtgaatagttttgtttgttgtgtaaagttgttgaattgtattttgtgggtaatgggagggtgttgtagagttttgaatagaatgagatgattggaaatgttttgaaagaagggaaggttgaaggaatgatgagaggggtttaagtttaggtgttagaggtatagtaaggagtt

SEQ ID NO: 3617 - DNA, 2435 bp, Artificial Sequence
  chemically treated genomic DNA (Homo sapiens)
atttttttaaatatatttggggtagaggtattggaaaaaagtgaaaatgtgaattaaaggaaagaaatattgtaatttaggagaatgttttttgttaggtatttatagttaaggtagtagggtgtgtgtgtatatatatatatatatatatatatatatgatgttatttttgttttagtgtgagatagttttatgggtgttgggtatggtgatatataatggatattaaaattgtatagttagttttagtaaattaggtaaattagagattatttgatggtattttattgttgttattgtaattattgtaattttttttggtaatggtgttttgtgatgaagtgttgtttttataggataattgtgaaagatattgaaagatttagggatgtagtatttggttttaaaagttttttagatttaaattggtattttattttattttgaaaatttatgagagatttagattatgttggtttaaatggaaaggtgaaagtagggtaattttaatttatgaattatttaattttagtttggtgaaattgttatttatgaattgatgttttgatagtttttttgtagagtttttattatgtttgttatttttatttttttatttatgattttttttttagttattgagtttgttttttagggtttagttttataaattaagtattttaaattggtaataatttaaatgtgttgttgttttgaattgttgtttttataggttgtttttttttgttttttttaaattattaaaaattatatttatgatgatatttgttgggttttttgattagatgaattaaaatatatatatatatatatatatatatattatatataagggtattattgtgaagaagagttatgttttgttaatattataagagaagagaaagtgatgttttttgtttttttttttgttgttagtatgatttattttagttgtatagtattatgtagaaaggagttagggttaaaggtggtttgtttggtattttgatttttagttagagttgatgaggattgtatggtaggtaggttaatttagataattgtatatttagtgagtatgattatttaggaaaataaggaaaagttgttggatgattgaaattagattgttatttttttgggttttatttgtatatagattgtagttgtaatgattttttatttgatggttggttgtgttattgttagttgatagttgttttgtatttagagaggattgggagtgatttaggttagggagtttggttttttttttaaattgtgtgttaattgaggagtggggatttgtgttagttttgtgattagttttaaatgtgagttggggagttatatagtattagtgtggtgagttgtttgtataggttttagttagataaattatagtaagtatttttttttttgttttagtttttatttttgtaggtagagtagtgtggtataagaagtttttaaattatttatatatatggtgggagattagttgtgttttattagaggtggtttggttataagtttttgagtagtatttgtttagttgaaaatttatgttgttaagttagaagttattgtgtatatttaggatgtatttttgtttttggttaaataaaggtaaatattttttatgtaagatatgttaagtagtagtaggagaagaaaattttaaaattttgttgttttgtgtttagttgtttgtttttgttttgttgtattgtgattgggaaattgtaggagttggagttggtagttgtgataatgtagaaagtagtagttttgatatagtagttagttgatttgtggggtgttattatttaatgttttttgtagaattagattagtttttaaggtggtattagatagatgatttttaatggaaagagaggtttaaggagtgtagtttttttttatttatatttggtagggatattttatattgttttttttttaagtagagtttttaatttatagtttttaggatttaattatttttgttttgtttgttaagatggtaggtaatttttagggtgattattttaatgtgaatataagttaaagttattgttgttttttttgttttggttggttttagtgttgtgagaatgattgtgggagaatttttgtttatattttgtttgaaaaatatattttttttttaataggtagaaatggttttaagttatttgtatgttgtaatgaattagttaattgtatttaatagaatggtaagagtaagagggaaaatttgaaggtaaattagtttagtattagttttaaattatggtttagttgttgtaaggtagtgtgtatgttttattgtgaaatgtaggttgtataatttaattaatttgataatggagtaaaagttttatatggtattattttagtggtttgaggaattgttaaaataagaaggt

SEQ ID NO: 3618 - DNA, 2435 bp, Artificial Sequence
  chemically treated genomic DNA (Homo sapiens)
gtttttttattttagtaattttttaaattattggggtaatattatataaggtttttgttttattgttagattaattgggttgtataatttgtgttttatgatagagtatgtatattgttttatagtaattggattatgatttaaggttagtgttgaattaatttatttttgagtttttttttttgtttttgttattttgttaggtataattgattagtttattatagtatataagtagtttaaggttatttttatttgttaaaaaagaagtgtgttttttaaataaaatgtgggtaggaatttttttgtaattatttttataatgttgaaattagttaaagtgagaggggtagtgatggttttaatttatgtttatattggggtggttattttaagaattatttgttattttagtaagtaggatagaaatagttaagttttaaaggttatgaattaaaaattttgtttgagagaaaagtaatgtaagatgtttttgttaggtgtggatggagaaaaattgtattttttaagtttttttttttattgaaggttatttgtttggtgttattttagaaattggtttgattttgtagaggatattgaatgataatattttgtaagttagttgattgttgtgttagagttgttgttttttgtattattgtaattgttagttttagtttttgtagttttttagttgtaatgtagtaaagtagaagtagataattaggtataaagtaatagagttttaaagttttttttttttgttattatttagtatgttttatatgaggagtatttatttttgtttagttaggagtagagatgtattttgaatgtatatgatggtttttaatttggtagtgtgaatttttagttgagtaggtattgtttggagatttgtaattaaattgtttttgatggagtatggttggttttttattatgtgtgtgaatagtttgggggttttttatgttatgttgttttatttgtaggaataaaggttaggataaaggagaggatgtttgttatggtttgtttggttggggtttgtgtgagtgatttattgtattgatgttgtgtgattttttagtttatatttaaggttggttatggggttggtgtagatttttattttttagttagtgtatggtttaaaggagaaattagattttttgatttaaattatttttagttttttttggatgtgggatagttgttgattagtagtgatataattagttattaagtggagaattgttgtgattgtagtttgtgtgtaggtggagtttgggagaatgatagtttaattttggttatttaatggtttttttttatttttttaaataattgtgtttgttaagtatatagttgtttggattagtttgtttgttatgtagtttttattaattttggttggaaattagggtgttaggtaagttgtttttagttttggtttttttttgtgtgatgttatgtagttaggatgggttatgttgataataaagaaggaagtagaaagtattattttttttttttttgtgatgttagtggaatataatttttttttgtagtgatgtttttgtgtgtggtgtatgtgtgtgtgtgtgtgtgtgtgttttaatttatttaattgaagagtttaataaatattattatggatgtgatttttaataatttggaaaaaataaaaaaagatagtttgtggagatagtgatttgaaatagtggtatatttaggttattgttaatttgaaatatttggtttgtgaagttgagttttaagggataagtttggtaattgaggaagagattgtagataaagaaataaaaatgataagtgtaatggaggttttgtgaagggattgttagagtattagtttatggatggtaattttattaggttgagattgaataatttatagattgaaattattttgtttttatttttttatttaagttggtatgatttgaattttttataaatttttaagataaagtaaaatgttaatttgaatttgaagagtttttaaaattagatgttgtatttttgaattttttggtattttttataattattttatgagaatagtattttattatgaagtattattattagggaaaattatggtgattataatagtaataatagaatattattaaatgatttttaatttatttaatttgttaagattgattgtatggttttgatatttattgtatgttattatgtttggtatttgtgaagttattttgtattggaataaaagtggtattgtgtgtgtgtgtgtgtatgtgtgtatgtgtatgtatattttgttattttaattgtgaatgtttagtaaagaatatttttttaggttataatattttttttttttggtttatatttttgtttttttttaatgtttttattttaaatgtgtttggggaaat

SEQ ID NO: 3619 - DNA, 2423 bp, Artificial Sequence
  chemically treated genomic DNA (Homo sapiens)
gtatttgttattatttatttataatagtaaagatatggaattaatttaaatgtttattaataatagattagataaaatatggtatatatgtattatggaatattatgtagttataaaaaaaaataagattatgttttttgtagggatatggatggagttagagggtattatttttagtaaattaatgaaggaatagaaaattaaatattatatgtttttatttataagtggaggataaatgatgagagtatttggatatatagaggggaataatatatattggggtttattagagggtggagggtggaaggagggaggggattaggaaaaataattattgggtattaggtttaatatttgggtgatgaaataatttgtagaataaatttttatgatataagtttatttatataatatatttgtatatgtatttttgaatttaaaataaaagttaaaaaaaatagaaaaaaaagaggaatgtttgtaatttttgtaaatatattattttttaaaagttatttatttttttaaagtattgtatttagaatgttagattattgtttagaaagttggtaatattagtatttgttatttttttatttattgtgtaagagatttttatattagatggagtttaggttgggaattattattttttttaatttttgttaatttgataagtgtggaatgtgtttttttgtatttatatttttttgattattggtgagagagaatattgtattttattatagatgttatttgattttttgttttatgtttatttttttttgttggtttggtagtttttttttattgatatataagtatttgaaattatttttaaggatttgtattaatttgttgttttttgtatatattgtgattattttttttttttgagttagtttttttttaattttttttgagagattttagatggttggtttattttttgatttatttttaagtttaaataatattagaaataatatttgaaatgtttagattaatttttttgtagtgattttattgggaggttgtattagtatttagatatttttatatattgaggaaaaatagatagttgtgtttaaggattttagagggtttgttattatttatttataatttttttagaatttatgagttttaggtttttattgtagtggtaagtgttgagtgtttatgggggtgtgtgtgggataggatgtggtttgagttttgtgatttttattttgattttatgtgttgggaatttttgtagttttgtgattggtttgtgggggtttgggttaagtttttgttaagatattaaaagattgtagaggtgggtaaagattttaggtttttagattagtaatttataaatattagttatgattatatagttaagggttgtttatttgttttttttttttttagtttgttttgtgtaaataagttttaagtaggagaagatgaaggtgagtgagttttagagagggtatggtagttatttttttgttttatttttagattttgttttttatttttttttgtaagattttaatttttgttttttttttttttgttagtttttttaaattttgtttttttttttttttgaattttttttatttttatggatgggtattttttgtgttgaatatgattagggaagaaagggtttttatatgattagggaagaaagggtttttatattttttttaggtggaggttttttggagatttttttggttatattagtttttgttttagagttgggtttgaggttgggatagtgatgggttttagagtaggtggggattggggtttggaggagaagttgagtggatttgttttagatatagtttagtaataattttttgaagaggaggaaaaaatgaatgtggaagttttaaggatggataaaattagagagttattagagaaatataaaatatgaaaaaaaaaattagagttttaaaataattggatttggagttaggtattttggattttggttttagttttatgtttaatttatggtttgttattttattgataagatatatgtgtttggtagtagaaggggtagtttaggaaaggataataatgaatgtgataatttggaggtagaaaataattatgaagttaggtaaaggtaaatttttatttatataatgggttattatttttgattttggataaattaatttttgttattttattgtaaatttatgggtaatagtaattattttatgggtgggtgaataataattattatgtatataatatattttataaaatgtagttttaataatatttttttattttttgtttttaaaattaattagataatattttgggtgaatttttattttgagaattgatatggtttttatgttatttgtggtgtttaattgagtgtggagattttgggt

SEQ ID NO: 3620 - DNA, 2423 bp, Artificial Sequence
  chemically treated genomic DNA (Homo sapiens)
gtttagagtttttatatttaattaagtattataggtaatataaaaattatattaatttttaaaatagaagtttatttaggatgttatttagttaattttagaggtgagggatggggagatgttattagaattgtattttgtagaatgtattatatgtataataattgttatttatttatttataaggtagttattgttatttataaatttataatgagataatagaggttaatttgtttaaagttaaaagtggtaatttattatgtaaatgaaagtttgtttttatttaattttatgattattttttgtttttaagttattgtatttattattatttttttttaaattgttttttttgttgttagatatatgtgttttattaataaggtaatgagttatgaattgggtatagaattgaggttagaatttaagatgtttgattttaaatttagttgttttagggttttgatttttttttttatgttttatgtttttttgataattttttgattttatttatttttaaaatttttatatttgttttttttttttttttaaggggttgttgttgagttgtgtttgagataagtttatttagttttttttttaaattttagtttttatttattttaaagtttattgttgttttagttttagatttagttttgaagtagagattgatgtggttagagaggtttttaggggatttttatttgaagaaggtatggagatttttttttttttagttatatggagatttttttttttttagttatatttaatgtaaggaatatttatttataggaatgaagaagatttaaggagaaaaaaaagtaaggtttaggggaattggtaaagaagaagaaagtaggagttggagttttataagaaggagtggagggtagggtttagaagtaggatagaagagtaattattatgttttttttgaagtttatttatttttatttttttttgtttgggatttgtttgtataaagtaggttaggagaaggggaagtagatggatgatttttaattgtgtagttatgattagtgtttgtagattgttagtttgggggtttgaggtttttgtttatttttgtagttttttggtattttggtagggatttagtttaagtttttataggttagttatagggttgtaaggatttttgatgtatgaggttggggtgaggattatagaatttaaattatattttgttttatatatatttttgtgagtatttagtgtttattattgtaatgaggatttgggatttataagttttgggaaaattataaatgggtgatagtaagttttttgaggtttttaaatatggttgtttgtttttttttaatgtatggaagtgtttagatgttgatgtaattttttagtaaagttattgtaaaagggttggtttagatattttaaatgttatttttaatattatttgagtttaaaaataaattaaagaatgggttggttatttaggattttttaaaaagagttaggaggaaattggtttgaggaggggaaatagttataatgtatgtgaaggatagtaaattaatataaatttttagaaatgattttaagtgtttatatattagtaagaaaaaattattagattaatagaaaaaaatgggtatgaggtagaaaattaaatggtatttgtggtaggatatagtgtttttttttattaataattaaagaagtataaatatgaaaagatatattttatatttattagattggtaaaagttaaaaggaatggtgatttttagtttgggttttgtttggtataggagttttttatatgatgggtgggggaatggtgaatattaatgttgttaattttttggataataatttgatattttgaatgtagtgttttaaaaaagtaaataatttttaaaaaataatatatttataaaaattgtaagtattttttttttttttttattttttttaatttttattttaagtttaggggtatatgtgtaggtgtgttatataggtaaatttgtgttataggggtttgttttataaattattttattatttaggtattaagtttagtgtttagtagttattttttttgattttttttttttttttattttttattttttaataggttttagtgtgtgttgtttttttttatgtgtttaggtgtttttattatttattttttatttataagtgagaatatgtggtatttggttttttgtttttttattagtttgttaaggataatgttttttagttttatttatgtttttgtaaaggatatgattttgtttttttttatgattgtatagtattttatggtgtatatgtattatattttatttagtttattattggtgggtatttaggttgattttatgtttttgttattgtgaatagatagtggtaagtat

SEQ ID NO: 3621 - DNA, 2464 bp, Artificial Sequence
  chemically treated genomic DNA (Homo sapiens)
tattgttttttattatttttagatgaggttattaagttgtaggaaaataagtttagggtttttattgattttatattatgatgatttgtataattgttttattatatattataatgtaataataatagaaataaagtgtatgataagtgtaatgtatttaaattattttgaagttatttttttttattggtttatggaaaaattattttttatgaaattggtttttggtgttaaaaagatttggaatagttgttttaatttttttattatttttatttattttttgtatgttgttttgggttaagggttgtggaaatgtttatggggtttttgttttattattttaaattatgtgtaaattttaagaaatttgtgagataaagtatttggttagtgggaaaaaaaaaattgataatgtttttaatattaattggagtgatagtttggtaattggttttttgagaaagttttagtatattttgaaaattggtaggtagttttagagtgagttaattagttaggaatgatttttaatatttattatttttaatagtttatttttggagaaaagatagataatgaatattgggaaatttatggtgttgtaatttgatttttgtgttatttgggggaaatgaggaagatgagttataatttattatttaaagttttttttttataatgtgttgttgtgaaagatttgataaataatgattgtttttttagggattaatttaattaaagaagtagaaaataggaagaatagaaaatttgtgtgattaagtaatgtttaattttatttgaaattggttttattattttggtgataggaatagaaggttttatggagtttttttatagtaagaaattaggtttgtaatagggtgtaatagagtgatattttatatttgatgttttgtaaatgtagagtttgtaaatgttttttttttgatgtttttttaaggtaagttataaatgaagttttattgttttaaaaaagtagtttgttaatagttgtttaggttttttatgggattgtgttttattgagtatttgaagaaagtatttattggaaatgggtttttttgggagattgtttggattttgagtgtttggtgtttatgtttttatatttggttgttgttttttgtttttttttggttgtaggtgtgagtgtttgtttgtttaaattttgtttagtattgtttggaaaaataaaataatatggttatttgtttgggtattgaatgttttttttgaattttggttttgtttattggtttagaggtggaatgggtggggtaagttttggtgtgagtttgggaagttttgagaagatgttatgggttgggtttgttaggttggggttgtttttggttttaatttttttggaatgttttgagggttaggagtgttgttattgatggttatgggagttgttaggttgtggtttttttttttatagagaatgttagaggtatttgggaaggtatttgttagggttttgatagatgtaaagtaagttttatttatgttgtgtttttatttggatatttggaaggtgtttagtatagaaaagttatgagttagatgagatattagtttgatgttgattttttttttaataatggttgtttgtttttgttttgatgtttgttagtaggtaaagggggtgtgtttttgggatttgggtagtagtagtttttgggaaatttagggtttgttatttgtggttatttgatttttggtaaattatttaatttttttattttatattttaaggatagtaaatttatgtagtagttaggttgttagaagaaatgatgttgataattaaatgtgaagttttgatatggtttttttttggtattatagttatttgttttttaaagaattggtataatgttgggggtagaaaaattatattatgtagtgatgttgtttagttaggtatataggtagagaagagttgtttttatttttagttttttaggtttgtttagggttgtttagtgtggttgattttgttttgtttattgttatgtaatttggaatttataatattattgtatgatgtgtagatttggaatttattgtagtattttttttttgaaggttgtattgtgtagtagtttttaaatttgagtatgtattagaattttttggtggtagtgttaaagtagattgttggattttatttttagagtttgattttataggtttggggtggggtttaagaatttgtatttttaatatgttttgaggtgttgttgttgttattggtttagggaatatatttagagaattattgttttagtgtgttggaaggagtaggagttttggagttaagtagatttaaatttagttatggtatttatttaatgttgtgattttgagaggttttttttaatttttttaagttttagtgaatttgtttgtaaaatgggaataatatttattttaa

SEQ ID NO: 3622 - DNA, 2464 bp, Artificial Sequence
  chemically treated genomic DNA (Homo sapiens)
ttgaagtaagtattatttttattttatagatgagtttattaagatttggggaaattaagaaaaattttttaaggttataatattaagtaagtgttatagttggatttaaatttgtttaattttaaagtttttgttttttttagtatattagagtagtggttttttaagtatgttttttgaattagtagtagtagtagtattttagaatatgttagaggtgtaaatttttaggttttattttagatttatggaattagattttgagagtggggtttagtaatttgttttaatattgttattagggggttttgatgtatgtttaagtttggaaattattgtataatatagtttttaagaaaaagatattatagtaggttttaggtttatatattatgtagtgatgttgtaggttttaggttatatgatagtgagtaagatagggttagttatattgagtagttttggataaatttaaggagttaaggatagagatagtttttttttatttgtatgtttgattgagtaatattattgtatgatgtggtttttttgtttttaatattgtattagttttttaaagagtaagtagttatgatattggaaaagaattatattagagttttatatttggttgttaatattattttttttaataatttaattgttatatggatttgttgtttttgagatgtggaatgaaaaggttaggtaatttattaagggttaagtgattataggtgataaattttgggttttttaaggattgttgttatttaggttttaggggtatattttttttatttgttggtaggtattaagatgaagataggtagttattgttggggagggagttgatattaagttggtattttatttagtttgtgatttttttatattgagtattttttaggtgtttaggtgagaatataatatggataaggtttattttatatttgttagagttttggtaaatgtttttttgagtgtttttggtattttttgtgagaaagagagttatagtttgataatttttatagttattaatggtaatgtttttgatttttaagatattttaaaaggattaaaattaagagtaattttaatttaatagatttagtttatagtgtttttttgaaattttttaaatttatattgaaatttgttttatttattttgtttttgggttaatgggtaggattaaaatttaggaagaatatttaatgtttagataagtaattatgttgttttgtttttttaagtagtgttgagtgaggtttaaataaataagtatttatatttgtagttaaggaagggtaagaagtagtagttaggtgtgggaatatgaatgttagatatttgggatttagatagttttttaggagagtttatttttagtgaatattttttttaggtgtttagtgaagtgtagttttatggggagtttgggtaattgttggtaagttatttttttaaagtagtaagattttatttatgatttattttgagaaagtattaaaagagaggtatttgtagattttgtatttatagggtattaggtgtggggtgttattttattatattttgttataagtttggttttttgttatgggaagattttataggattttttgtttttattattagggtggtggagttagttttaaataaaattaaatattgtttagttatataagttttttattttttttgttttttgtttttttgattaaattagtttttaaaggagtaattattatttgttaaattttttataataatatattataaaaggaggattttaaataataaattatgatttattttttttattttttttaaatggtataaaggttaagttgtagtattatagattttttagtgtttattatttgttttttttttaagggtaggttattaaaggtagtgagtattaaaagttatttttaattaattagtttattttggagttatttgttaatttttagaatatgttgaagtttttttagagagttaattattaaattgttattttagttaatgttaaaaatgttattaatttttttttttttattagttaaatattttattttataagttttttaggatttgtatatagtttgagatggtagaataaagattttatgaatatttttatagtttttagtttaggataatatataagaagtgagtgaaggtggtgggagggttagagtagttgttttaaatttttttggtattagggattagttttatggaaaatgatttttttatggattagtgagggagggtggttttaggatgatttaagtgtattatatttattatgtattttatttttattgttattatattataatatgtaataaaataattatataagttattataatgtagaattagtgggaattttgagtttgtttttttgtaatttgatggttttatttgggggtgatgggagatagtg

SEQ ID NO: 3623 - DNA, 2499 bp, Artificial Sequence
  chemically treated genomic DNA (Homo sapiens)
atgattttatattttgtttttttaggaaaaagaatgtttaaaaaattaaaatatgaagaaatttgggtataaattattgaaggttttagagtttgttgtatttatttaaatattattgtttttatatatgtataattattttttttgagtttaaaaaatgggtggaaaatttaatttttttattttaatttgagattttttttataaaagtttattgaagaaattttttttatttttgggtagtaattaaggaatattttagttaagtttttaaagagtgggtttatttttttaattgtattttaatttatatttatttttggttaaaataaaagtataaataagatttttttaatttaattataagttagatttgtagtaaatttttttgttttagattatttttttttttatagtttttagataaattgattttgatttagttagtaatttaatgaaatttattagttgattgtaagaagtttgtttatatatattagttatttttttagtaaatatttatggaaaataaaagtaatgttttttttataaataaattttattttttttttgtaatttaaggtgggttgttagattggttgtataatagatattggggagtttattggttgggagttttaagaggagagtagttattttagttttttttatttaattttggttttatgttagaagttgtgtagtagtgtagtagaatagggtttggtaaaatttttgttagtaaagtgttttttgtgttgggttgtggtttgttattgatattttgtttgttattaaggttgggttttttattgatttttttttttttttgtttttataggtttgtgtggttggatattgtgggtgtgtgtgttggattttttttggatgttttttgattaatatggatgttttattattttttgtagtggaaggttgttttttggtgtagtgagtgaagaatatgtagtgattgttaatgggtttgggaagtggagatttttttttttttttatgattatgttgtgattgtgtttgtggttattatttgatgtatttttatttttatttgaatttaggagttgaatgttagattggggaagtgggtgttgtgtgtgtgggtatagaaatattatgaagattatttttttgattttaagtaatttagtttttaggtgtattgttaaatttttgttttgtttattgtggattggatatttttaaggaattatatatgtattaagatttggtaagattttttattttttttggttgtttggtatttgtttttaggtagttggatgtaaataggtggtttgttttgtttggtggtgggttttgtggattttgatttgtttattgttttgttgttttttggggtttttaaagaattttttgtgtttttatttttttttttttttatttttatttttagttgtgggagggtgaagggagggttaatgtgtggtagtggtttttgtattatttttttatagtagtttgttatggagatgatgatgatgatggaggtatggttagttgttatttttgtttgttttttttggtgttttgtgagtttggaggggtgtgtggtttgtgtaaaagtgtgtgttggggttgtatgttttttagtttgtggggttggtgagttaatatttggtaattttttggtgagttgtgtttgtttgtttttgttagtgattagggtagtttttatgtgtaaatgaaaggtattaatttttttgatttttttttttagagagtttttttgattgtttttattgtttttttagtttttggtgtttttattgggatgtagagttttaaaaaatgttttaagatttgaggttttatttaatatagggaggttgttatttagttggaatgaaatagtgttaaaattagaatggtattttgtttgtttttaatttgttgagttttttttttatagttttttggatgttatggattaattaatgaaggatagtatttggggtggtggggaagagtagttgtttaaggagggttgattaagtttgtattttttattttggtaagatgaaagatgttaggtagttatatttttttatggaaatgtattgtttttttaagaattagggtttttttggagtttgaaggaaaatttaaatgtgggattttagtggaaattttggttagagggttagagtgattgtttggagaaaatgaagtgtgggtgatgtttaggttttttggatggttaaaggagttttagtaggagtagaattagttagggaaagttttttaaagtagataagaggaagaaaggagaaagttaataggataaatgtttttattgtaggtattttttttgatagtttaagtggatttagattaaagagtgtaggatattatgtaattttgagtatttgtttttgagataaaagtagatatattaagttatttggttaaatttaaattgaagagtgattgtttgtattttttattatgttaatagta

SEQ ID NO: 3624 - DNA, 2499 bp, Artificial Sequence
  chemically treated genomic DNA (Homo sapiens)
tgttgttggtatgatagaagatgtaggtaattattttttagtttaaatttgattgagtgatttaatgtgtttgtttttattttaaagatagatgtttaggattatatggtgttttgtattttttggtttgaatttatttgaattgttagaggaagtgtttataatgggagtatttattttgttggttttttttttttttttttttatttgttttagggaattttttttgattagttttgtttttattaaaatttttttggttatttagagaatttgagtattgtttatgttttattttttttaagtaattattttgattttttgattagggtttttattggaattttatgtttagatttttttttaagttttaaagaaattttgatttttagaaaagtaatatatttttataaaaaaatgtaattatttaatgttttttgttttgttaaagtgaaagatgtagatttagttaattttttttaaataattatttttttttattgttttagatattattttttattaattagtttataatgtttagaaagttgtgagagggggatttagtaagttaaaaataaataaaatgttgttttaattttgatgttattttgttttagttaagtagtagtttttttgtgttaagtagaattttgaattttagaatattttttaaagttttgtattttagtaagggtattagggattggaaaagtggtgaaaataattgaaaaggttttttggaaaaagaaattaaaagggttagtattttttatttgtatgtgagaattgttttggttattggtggaagtggataggtgtaatttgttaaagagttattaggtgttaatttattagttttgtaagttgagaggtgtgtagttttggtgtgtatttttgtgtggattgtgtatttttttaagtttgtagggtgttgggggagataggtgggagtggtggttgattgtgtttttattgttattattatttttgtggtaagttattgtggggaggtaatgtagagattattattatatattggttttttttttatttttttgtggttaaaaataaaaataaagaagagaagaaatgaaagtataaggagttttttaaaagttttaggagatgatagagtagtgagtagattagaatttatggagtttattgttaggtagagtgaattgtttgtttatatttggttgtttgggagtggatattaggtaattaagagagatggggaattttattaaattttaatatatgtgtggttttttgagaatatttaatttatagtaaatagagtaggagtttaatggtgtgtttgaagattggattatttagaattgggaaaataatttttatggtgtttttgtgtttatatgtatggtatttatttttttgatttagtgtttggtttttgggtttgggtagaaatgaggatgtgttgagtggtgattgtagatatgattatggtatggttatagagagaggaaggagtttttgttttttaaatttattagtaattgttgtatgttttttatttattgtgttaaggaataattttttattgtaaggaatggtgggatatttatgttagttggagagtatttgggagaaatttagtatgtatatttataatgtttggttgtgtgagtttgtgaaagtagaggaggagggaaattagtaggaaatttagttttggtaatggatgagatgttgatagtgagttatagtttggtataaaaggtgttttgttagtaaaggttttgttaggttttattttattgtattgttgtatagtttttgatgtgaagttaagattaagtgagaaagattgagatagttgttttttttttaaggtttttggttagtgagttttttaatatttattatgtaattgatttgatagtttgttttgagttgtaagaaagaagtaggatttatttatggggagaatattgtttttattttttatgagtatttgttgagagaatgattggtgtatgtaagtggattttttataattaattgatgaattttattaaattattagttaaattaaagttagtttgtttgggaattgtaaaaaagaaagtgatttaagatggaggaatttattgtaaatttaatttgtggttagattgaaagagttttatttatatttttattttgattaggaatgaatatagattggaatgtaattggagaggtaaatttattttttaaaaatttgattggggtattttttgattgttatttagaagtaggagaaatttttttagtgaatttttatgggagaaattttaaattaaaatggagaagttaaattttttatttattttttaagtttaaagaaaataattgtgtatatataaaaataatgatgtttgaatgggtgtagtaaattttaaagtttttaataatttatgtttaaatttttttgtattttggttttttgaatatttttttttttaaagaggtagaatatgagattat

SEQ ID NO: 3625 - DNA, 2422 bp, Artificial Sequence
  chemically treated genomic DNA (Homo sapiens)
tatggtgtttttgaatttattattttgaaggataggtttattgtttatttagtgttttatttttggagtttttaaattttttattatgatgtagaataaattttggagtaattttgtttgataatagaggattgattgtaattgtttgaaaggatagagttttataatatattttttgaaatgtttttttatgaaggaaaagttgatagggaatttgagttaaagtagataaaatagaataaaataaaattaaaattaaaaaataggtgttaaaaggatgttttaaataggttgaagtattaaattattatagagagtagttttagtttattttgaaatttgtttttatttttttattattttttatatattttgttttgttgtaaaatatagggagaattatttattattaagttgtttaattaattttttttaaggtatgtaatattttttaaagaaatttgaaagtatttgttttattgaaaaaaatgagatttattttttatattataattttgtttttagtgaaaaagttaggataatgaagaataaaatttatttttgtgaaggaaaatatttttattttatggtatttttaaatattattttgttaattttttatggaataaagttgataatattttttgaatatatatttgtatgtttttatagttttaatttgttatatttttgttttttttttttaagtaatattttgaaaaatttataaagtaatataaatatatttatagtattaggttgtaaattggaatttggaagtgttagatttgttgattttatttgttatttgattattatatttgttttttttaattgatttattaggtttgtattttagagtatattttattttgttgtaatagttattaatgaattttttgattgtggatttttgttatatatatttgtattggtttagggagtttaatttgttggaatattttgttgaagagtttgtttttatatttagggatatttattattatttaaggttagttgtttgatttttttttagtgttttgtttatagggtttgaatatttataaatggaaatattagttaattagaaattattgttagggttttttgatagtgttttaggtttttataatttggaatgttttgtaatatttaatatgtaagtatgttgaattattttttagatagaatttgaatttttgtgttttttagttttttttttttttttatttttttttaatatggaatttgaaaagtgtgaaaaaagaagtttattaaataagaatttagaggagaaattgatggtaagatatgagatttagtatatatagatttataatgaaattgatagggtagtagagtaattgttatagattggaaaagttgtgttagttggtttttgtttttatgttttgttggttaataattttaaaattaatgagttttatgggtttttttgaaaataatgtaataaagttatatataaaatgttattatataaatgagggtaaatttgatttagttaaatgatgtggtttattgttattttaaaaattggaatttatttattttgattttttattgtgattgttttagtattggaagattgttttatttatgtatgtgaagtttagtgagtgtttaaatttatttttttttagagatattaggaatatatgttaagaaaaataagtattatagaatatattaatgttttattaagtttaatgaatttttggtataaggataaagttttttgttatagaagttatataagtaattttgttttgatattaagtaattaaatgttaatgattaatatggtgatttatatttgtttaaatataaaatagattataattttgagttaaatgtgttgtttatggtttatttgatgagtataggttattaattatgtttgtaaatttattgtggttatagagttaatattggaataggttataattaatgttaatattagtataaataataaaaagtaagataatatagtttataataagattaaatttatgggaatatattgttttagatgtatgaagttgaggtttatggattatttaagatattaaaattagaaaaatggaaaaaagaattatattgggttgaaaatttttgaagtgtattagaattttaaggttttaaagtaatatatttaataaaatatataatttttttttaaaggaattaggttattatttttagtatttattttgtatttttgttttaggtgattgtttagatatgtaatggttatagagtatttttttttttgattatttggaaaggttatgtgtttttgtagagttaattagggattttgaattagaaagggtttggtgaaaatttttgtttataattattaaatataagattatggttttgtttaatttttttgagtttt

SEQ ID NO: 3626 - DNA, 2422 bp, Artificial Sequence
  chemically treated genomic DNA (Homo sapiens)
gagatttagaaagattaaataaaattatggttttatatttggtagttgtgggtaagaatttttattaagttttttttgatttaaaatttttggttagttttataaggatatatggtttttttaaatagttagaaaggaaaatattttgtggttattatatgtttggataattatttagggtagaggtataaagtgggtattgaaaatgatgatttgatttttttaagaaaaggttgtgtattttattaaatatattattttaagattttgaaattttaatatattttaagagtttttaatttagtatggtttttttttttatttttttagttttaatattttgaatagtttataaattttaattttatatatttagaataatgtatttttatgaatttggttttattatgggttatattattttattttttgttatttatgttgatattaatattagttatgatttgttttaatgttaattttataattatagtaaatttataaatataattagtgatttatgtttattagatgagttatggatagtatatttaatttaaggttatagtttattttgtatttgagtaaatgtaagttattatattaattattgatatttaattgtttagtattaaggtaaaattatttgtataatttttatggtaaaaaattttatttttatattagaagtttattaaatttaataaaatattaatatattttataatatttattttttttggtatatatttttggtatttttgagaaaaaatggatttgaatatttgttaagttttgtatatgtaaataaaataattttttagtgttgaggtaattataatgagaggttaaaataaatggattttagtttttaaaatgatgataaattatattatttaattaaattaaatttgtttttatttgtgtaatggtattttatatataattttattatattatttttaggaaagtttatggaatttattaattttaaagttattgattagtaaaatatggaaatagaggttggttagtataatttttttagtttatgatagttgttttattattttgttaattttattataaatttgtgtgtgttaaattttatgttttattgttagttttttttttaaatttttgtttaataagtttttttttttatgttttttaagttttatattgaaagagaatgagaaagagagaaagattgagagatatagaggtttagattttgtttagaaaatgatttgatgtgtttatatgttagatattgtaggatattttaagttgtgagagtttaggatattattagagagttttagtgataatttttggttagttagtgtttttatttatagatgtttaaattttataaatagagtattgaagagaagttaggtagttggttttagataatgataaatgtttttagatataaaagtaaattttttagtagaatgttttaataggttaggttttttgaattaatatagatgtatgtgataaaaatttatgattaaagaatttattaatagttgttgtaatagaataaaatatattttagaatatagatttaataaattagttaaaaagaataaatgtgatagttagatagtaaataaaattagtagatttagtgtttttaaattttaatttgtaatttagtattgtagatatgtttgtattattttgtagattttttaaaatgttgtttaaagaggaagagtaaaagtataataaattaaaattataaagatatgtaaatatatatttaaggggtgttgttaattttattttatggagagttgataaaatgatgtttaaaaatattatgaaataaaagtgtttttttttataaaaatggattttgttttttattattttggtttttttattgggagtaaagttatgatatagaagataaattttattttttttagtggaataagtatttttagatttttttagaaaatgttatatgttttaaagaaaattaattgggtaatttaatggtaaatagttttttttgtgttttgtagtaaaataaaatatgtggaaggtaatagaagaatagaaatggattttagagtaaattaagattgttttttatggtgatttaatattttagtttgtttaaaatatttttttaatatttgttttttggttttggttttgttttgttttgttttgtttattttaatttaaattttttattagttttttttttataagaaaatattttagaaaatgtgttgtggagttttgtttttttaaatgattgtagttaattttttgttgttaggtagggttgttttagaatttattttgtattatgatggaaggtttgaagattttagaagtgaaatattgagtaggtaataaatttattttttaggatgataaatttagaaatattata

SEQ ID NO: 3627 - DNA, 2662 bp, Artificial Sequence
  chemically treated genomic DNA (Homo sapiens)
tatagtatatttatttgaaaaataatggttatatatagtaatatttttgtttatagaaattttaaatttttttttattatgggttttatagttatttattattttttatttttttttatagttattaaatatttttagttttttagtattttttttgtaaaattgagaggagggaatttgttatatttatttttgtagtaggatgttgatttgtaaatgaagtgttgatgtattgttgatgttatttatttaataaaggtataatagatattagtagggtagataggtattttaagaaaatggtttgatataagagttgaaagaatttgtttagaattttagaattattaaagggttttatgtttattttattttgttagggagaggatatttttttttgtttagagtatgttttaattatttagagttaaaatggttgttttagtttagtaaatgggaaataaatttgagttttattgaaatgggttaagggttttaatttttgtttagtgtgttggttatattgggaaggaatatttgtttagttataatagttaagagtattggtatgataaatttgggtaggttttagagtgtttgtttatagttagtaaggaggatttaaaaaagatgtagaaagttgtgtaaataattgtaattgtattgatatttttatttatatgtttagaagagatatatttgaagaaaattttttttaaaatagttttttagttgagattatatttttttagtgtgtagtttataggaagttttagttgttaagagtatgtttgatatgagtagatttttatttaatttttatgtataatgaatttaatttttattttttttagaaagatattgaaaatatgtgttgtgattttaatgttataattatgtagttttattttttataatatggtataattattaatgaagtttaaattttatgtttggtatttaaggtgaatatttttatagaaagtaggaaatatttagatgtttgtttgttgtggtggtggtgtttttatatattttttgtgattttaaagatataataatgtttgatatttttgttagttagtaatgtggatttaagatattttaattatattgttgattttaattttttaatagatttttatgtagtttttgagttttattgtaggttttagtgttagttttggaggaaattagaaaagggttgaaattattgatatagttatttttttagttttttttaatgtaggtgtatagttttttgtagtgagtagattggggtttatagggatattgtatgtttgtattgggttgttattagttttatggaaatatgtattaattgtgttattgtgtttttttgttatattgttttttttttaggttgttttggtattgtttatttaaattgtgtaattatttggtttaggtgttgtagagattgattagtagtataaggttattataagtataattgttatttggttattttagttattttttttagtattttagatattatggtgtttgagggtgggtttaatgggttttgagtgtttgggagataatgtatattttgtagtggatttttttggggttttgagtgttgtttgtttattaggtggtgttggtttttttgaataggttgtttaataatttttgtttagtagttgtttttattgtgtgtgtgtagattttggtgtttatttttggtgtggtttaggtggggtttgtagaattagttatgttggtttatggtatgtttatgtataagagtggggatttggtgtttgttaagttaaagggttatgtttattggttggtgaggatagagtatatgatttagtttaattgttattaggtgtttttttttgggatttatgagatggtttttttgagttttaaatgtttgtttttgtataaggagtgtaaggagaagtttggtaagtttaataagaggtgtggttttagtgtggggttgtgggaaattgagaataattttatggtttaggtttttgattgtttattagttttagagaagggtagtggagatgggttttggttggagtttgaggttgtagagggtgatgaggataagttgatttatgttggtggtggtggtgatgaattggggaagttggatgatgataagtttattgaggaggagaaggggttgttgaagaggagtgtgggggatttgttggaggatgtttttaaatgatttaaggaggtagtttttgattaagaggaggaggtggaggtggagagggtggtggaagtggagagggtggtggtggtggtggtggtgatggttgttgatgaggagagtttgttttttgtggtggtggagaatggtagtgtttttagtgagttgggtttggtttgtgagttgttttagttagaggaggaggagttttgggaggaagaagttgtggatgaggaggttttttaggagtggtatgttgaggtattgggtggtggagattgtgatagtttgtagttattagtgtttttagaagagtttttgttttgtttttgttgtggtttggttgtttttggggaatttgattatggtgtgtaaattgggattgtttttttttttttttagtttgtttttttttaatttgtgtttttttgttttgttgggttttaggatggtagg

SEQ ID NO: 3628 - DNA, 2662 bp, Artificial Sequence
  chemically treated genomic DNA (Homo sapiens)
tttgttattttggggtttggtagggtaaaggagtgtgggttggaggaggatgggttgaggagagggaaaggtagttttagtttgtatgttgtggttagattttttaagaatggttaggttgtagtaggaatggggtaggggtttttttggaaatgttggtaattataggttgttgtgatttttgttgtttggtgttttggtatgttatttttgggaggtttttttgtttgtgattttttttttttggagtttttttttttttggttgaggtggtttgtagattaggtttggtttgttaggggtgttgttgttttttattgttatgaggaatggattttttttgttgatggttgttgttgttgttgttgttgttgttttttttgtttttgttgttttttttgtttttgttttttttttttggttgggggttgtttttttgggttgtttgggggtgttttttggtgggttttttgtgtttttttttagtggtttttttttttttttagtgggtttgttgttgtttggtttttttaatttgttgttgttgttattagtgtgggttggtttgtttttgttgttttttgtggttttgggttttggttaaggtttgtttttgttgtttttttttgaggttaatgggtagttggaggtttggattgtggggttgtttttgattttttatagttttgtgttgaagttgtgttttttgttgggtttgttgaatttttttttgtattttttgtatgggaataggtgtttgggatttaggaaggttgttttgtgggttttgaagaaaaatatttggtagtggttgggttgggttatgtgttttatttttgttggttagtgggtatagttttttaatttggtaaatattaggtttttgtttttgtatatgggtatgttgtaggttgatatagttggttttgtggattttgtttgggttatattggaagtagatgttgaagtttgtgtgtgtgtagtaagggtggttgttgggtgggagttgttgagtgatttgtttgaggggattggtgttatttaatgggtgggtaatgtttggggttttgagaagatttattgtgaagtgtgtattattttttgaatatttgaagtttgttggatttatttttggatgttatgatgtttagaatgttggaggaaatagttgggatggttgggtggtggttgtgtttgtggtggttttgtgttattgattaatttttatggtatttgggttagatggttgtatagtttaaataaatggtgttagagtggtttagaaagggggtagtgtgataagaaaatatagtgatataattagtatatatttttatgaaattagtaatagtttagtgtaagtatgtagtgtttttgtaggttttgatttgtttattataggaaattgtatatttgtgttaggaggagttaaagagatggttgtgttagtggttttaatttttttttgattttttttgggattagtattggagtttgtagtgaggtttaagaattatgtgaaagtttattaaagggttagagttagtagtgtggttaggatgttttaagtttatattattggttaataaaaatgttaaatattattatatttttagggttataaaaagtatataggaatattattattatggtaaatagatatttaaatattttttattttttatggaaatgtttattttggatgttagatatgaagtttaaattttgttggtgattgtattgtattgtgaaagatgaggttatatggttgtaatattgagattatgatatatgtttttagtatttttttagaagagatgaaaattgggtttattatgtataagaattaggtagagatttatttatattgaatatgtttttggtaattagaattttttgtgagttatatattaaaaaagtataattttagttgagaaattattttaaaaagaattttttttagatatgttttttttaaatatatgaatgaaagtgttagtgtaattgtagttgtttatataattttttgtattttttttggattttttttgttagttgtgagtaagtattttgaaatttatttaaatttattatattggtatttttgattattataattagatagatgtttttttttagtgtaattaatatattagatgagaattagagtttttaatttattttagtaaaatttaaatttgttttttatttgttgggttggaatagttattttaattttgaatggttgagatatgttttaggtaaaaggagatattttttttttaataaggtgaaatgaatatgaagttttttgataattttaaaattttaaataagtttttttagtttttatgttaagttatttttttagaatgtttatttgttttgttaatatttattatatttttattaaataagtaatattaataatgtattaatattttgtttataaattaatattttgttataaagatgaatatgataagttttttttttttagttttatagggaaagtgttagaaaattagaaatgtttagtggttgtagaagaaaataggaaataataggtagttatggagtttataataggaaggaatttggaatttttgtaagtagagatattgttatatgtggttattattttttaggtaagtatgttgta

SEQ ID NO: 3629 - DNA, 5352 bp, Artificial Sequence
  chemically treated genomic DNA (Homo sapiens)
aatataagaagttttgagttttttgaagttgggtattaaagttaaagatttattttttgtattttttatggtttttttttgtagtttagtttggttttgagtttttgaaatgttttttgaggtgggggtttttttgttaaggggtgataggtgggttattttgaggtgggaatgattaggtaggtgttggttggtttttttttgggtgagtagttaggggaattgtttttttaggggatttagatgatattaaattattttattatataaattttttgtggaggtttgtttttaggagggtaattattggattaatttaattatgtagataggtaatatggattattttgtttttaaaataattgaaaattaaatgttttttttgtttattgtagaaatttttttattaaggatggggttgaattggagggattgtgttgataaattttttatttgaaaattttttagttaaggagtatttgtttaaggttgtggttatttagatgtttggtttttatttttttttttgttgaaaagttgtattgatgattaatgttgtttgttggtttggtggtttgaaaatgaatgttgggtattgatgtaaggatatttttttttatttttgggattttggtttaagtaaaggaggttgaatggagaattaagataattatttaagtaatttaaaaagtttaaagatatttttaagtggattttgttttagtggtttgtgatggtagtttagtggatagttttttagtggttttttggggttaattgttttaattttttattttgtttgttttagtaaagggaaagatgttaaagtagttgtggatttgtagttttttttttgtgtgtgtagagtttttaggaattattgttttagtgtagtaggagaagtgtttttttttatgttttaagtttgttttttttgttgttttttagtttttgggttaggtggagttttttttgaagttggtttttatttgtttttgtttttttattgtagtttatagtttggtttttagggttgaatttagagtttagaggatggagaagttagaaagtggggaggtaagggagagggtgtttaggtatattatagaggtgattgggttgtgatggggataatttgtataatatgagttaagtttatatttttagggagtgatttttttggattgtttttattttaatttttattttttttgttttatttgaaaaagaaaaagaaaaaagagagttttttttggtttttggtgatttatatttaggatattattttattttttagtatatatatttttatagtgttatttggtttttaatttgagtattttttggagtgtttgttatatttttttttttggtgtttttttatggtggggttaggggaggttttgttttgaatattgttgtgatgttatttttttttttttgagttaagtattttttggtgggttttgggaattgttgtttggtttgttggggaggggtggagtgtgggtttagggagggttttattaaatatttattattgttgttgtttgtggggtttttaggttgtaagtatgtgaggtgttagaaaagaagttgaagggtttttgtgggggtttttttgttaaatgagttaagagatgtgtggaagtggatgattgaagtattttgtggagtagtagaaaggggtattaaaaattgtaatttgaaaataaaagttttaatttgttttttaaaagattttatgtttgtgttttaatgtttaaataatattattaataataaaaatgaaataagaaaagtgtttgaaatataattaagttgtttattggaggtttgtttttgagtaagtttataaaatataaatgtaaatatttttttttggtgaatatttagagttaaattagtggaaagttgattttgataaaattatgtttttttatttttttttgtatgttagatattaattttataatggtgatttttatatttaaaatggagagttgagaatattgttgtaggttgatttgtaatttatataataagttgtttatattttattgggttgatggagggaggaggtagggaagagtaggaggtgataggttggtgggggagggggtagtggggtattattgtttgttgtaaaatttggggttgaaggtgttttttgtatttggaaaataaagtatttgtaattgttgtgtttatttttgtgtattgttagtagtgtaaaaggtagttttaagattgaatttattatttgttgaggtgtttagggagattatttaaattttttttaggttgaagttatagtattttttaaagttttgattaggtgggttgataagatttttagggtgttgggttgggggttgaataggaattaagtgtttaggttttggggttttattattatttttgtttttgtttagtgtttttggtaattagtaagtgttgagttttttgttggtgtttttttaatttattagtgatttggtttgtaaattatttggaaaaggagtttttagagattttggtgtatagtaggttaggaggtagttgttttgggatttagagtaattttggggtaatttttttttttttaaaggttaattttagaagaggtaggtttttttttttttgatgttaatgtttattatgaaatagtaatttttaaatatttaggtgatatggagatgtgtttgttatatgttagtgttttttatatgtaatagttgaagttgtaatttgaatttttttgttaatgtgaggaagttgggatttgaattggggagataaaaggggttttgaatatgtttttggatttaatagatggttggaaattaggggtagtggagttgttaaatgtgttatgtatgtttttttgtagttttttgagtttgttattttttttagtttttagtgaatgatttgggatttagtttttgggagggtttttttttaagttgttaaaatgtagaattgttgtgttgggggagggaggtttggtttttttttgtttttttgttttttttttttattttttttttttttgttttattttaattatttagtgatggtgaattttaggtgtgtgtataatgagtgggggtttttttgtgtgtgtttttttagaatttttgaattgttttttaggtgtgattttggatgtttttttagatatatttgttgtttttgtgagttggtagttttgtgtatgtggagatggagattggtttggggaagtgttaagtttttagatatatttatttgttttttgttattatatttgttaatgttattgagtttgtagtttgattttttatttgagttgaaatgggtttgatgggattagagggggtggtggtgtggtgagttggtgggatttttgtgggtgggtaggggagtgtggggtagtagttgggttttggtagtttttgttgtttgtatttttaggttgttaagggttggttttttggggaggggggtgagaagtagggtggtttgtagtggggtgggtttattttttgtgggtgaatggttgttggaaatttttagtagggttttgtattttttgtttttattttggttggggaggggttatggaggggggttagatgggtgatgaatttttttttttattgtgagtagggtttggttgtgattgagtttttaaaattatgttttttgtagttgagtttaggataggagaatttttaagtggagaaaagttggagatgttagtgatttgagtgagattggtgttggagaagggagggaaggggttgtgggaggggagaggtggtggggaggagaggttggggtaattttagtgttggtgttggtggggttggtgaaggaatgagagtgagttagtatgaggtggggtggagatgttagggttatttgggagttgtgggtgaaggaagggtttgtatggggttttgggaggatttaggaagtttgtgtgaatggtgggtgtgggtttggagggtttggggtgggaggtttgttgggtgttggtggtaggtaggtggattgtggggggtgaattgatggtgggttgggtgttggtgtgggtgtagggttggggtttgggttagggtggttggtgtgtgtgtggttagttttgtggttttttggtttttgggagtgggttggtagggtttggtttttggtttatttggaggtggtttttattttttattggttgttgttgttggtggggtggggttttgttgtttggaaaaaagtgtaattgtgtaaaaaagtttttgtttgggtgatggatgtttaaaagtttagaagtttttttaatgtttttttaagtggttggtgtgtgagagattgagaaaaggtgatgtggggtttgggtaggtggttggtgtgtggttttttttttttttgttttggttatttggttgtttttgttggtagtttagggtagagttttttggaaggtgtaggtagtgtggtgagaagggtgtttgtttgttttttttttttgtttgtttttttttgtttgtgtttggaagttgtgttgtgagtttttgtaaggtggtttgttgtggttgggtttggttttttttttttgtagtgattttgttttgtggttgtgtgggttttgaggtagtttgaggtgttggaggagttagttttagtgagtgttgggagaggtggtagtgtagttggatgtatagtgtagtgggttggtattagtttggttgggtttggatttggatttggtggttggtgtggtgtggtttggtttgagtgagggtggggggtggtgggtggtgtggggtggtggtgagtgggggttatgtaggtgtgttattttgtgtttagttttaattttttgggagtggtgttttattttggtggtgagtagagttattattgtgtggtggttgtggtggttgggggtggttatattgttatgttggtttttatgagtgtgtatttgtattttgtgtatgttgagtagtatttgggtggtatggtttgtgtttatgggttttatatgttgtagttgtagtttaaggatatggtgaagttgttttatagttatattgtgtttattattatggttatttagaatgttttggataagaagattattttgaatggtatttattagtttattatggattgtttttttttttattgggataataagtagggttggtagaatagtatttgttataattttttgtttaatgagtgttttgttaaggtgttgtgtgatgataagaagttgggtaagggtagttattggatgttggatttggatttttataatatgtttgagaatggtagttttttgtggtggtggtggtgttttaagaa

SEQ ID NO: 3630 - DNA, 5352 bp, Artificial Sequence
  chemically treated genomic DNA (Homo sapiens)
tttttgaagtgttgttgttgttgtaggaagttgttgtttttgaatatgttgtaggagtttgggtttagtgtttagtagttgtttttgtttggttttttgttgttgtgtggtattttgatgaagtatttgttgagtgagaggttgtggtggatgttgttttgttagttttgtttgttgttttggtagaaggggaagtggtttatgatgaattggtagatgttgtttagggtgatttttttgtttggggtgttttggatggttatggtgatgagtgtgatgtagttatagggtggttttattatgtttttgggttgtggttgtggtgtgtagggtttgtaggtgtgggttatgttgtttgggtattgtttggtgtgtgtagggtgtgagtatatgtttatgggggttggtatggtggtgtagttgtttttggttgttgtggttgttgtgtggtagtagttttgtttgttgttgaggtagggtattatttttagggagttggggttggatatggagtagtgtgtttgtatggtttttgtttgttgttgttttgtgttgtttgttgttttttatttttgtttgggttgggttgtgttgtgttggttgttgagtttgagtttgggtttggttgagttggtgttggtttgttgtgttgtgtgtttggttgtgttgttgttttttttggtgtttgttggggttggtttttttggtgttttgggttattttggggtttgtgtggttgtgaggtggggttgttgtgaggggagaaggttgggtttggttgtggtagattgttttgtaggaatttgtggtgtagtttttaggtgtaaatgggggaaagtagataaaaagaaagaataagtaggtgttttttttgttatattgtttgtgttttttaggagattttgttttgagttgttggtgaaggtggttaaataattagggtggggggggggggggttgtgtgttggttgtttgtttgggttttgtgttatttttttttggttttttgtgtgttagttgtttaaggaagtattgggaaaatttttgaatttttgagtatttgttatttaggtgaggatttttttatgtagttatatttttttttgggtagtggagttttgttttgttagtggtggtagttaatgggaggtgagaattgtttttgaatgagttggaggttgagttttgttggtttgtttttggaggttggaggattgtggggttgattatatgtgtgttggttgttttggtttgggttttggttttgtgtttgtgttggtgtttggtttgttgttggtttgttttttgtagtttatttgtttgttgttggtgtttggtagattttttattttgggttttttggatttatgtttgttgtttgtgtagattttttgggtttttttgggattttgtgtagattttttttttgtttatggtttttgagtggttttggtgtttttgttttgttttgtgttggtttgtttttatttttttgttagttttgttgatgttagtgttggggttgttttagttttttttttttgttgtttttttttttttgtagtttttttttttttttttttaatgttagttttatttgggttattgatgtttttggtttttttttatttggaggtttttttgttttgaatttggttataaaggatatgattttgagggtttggttatagttaggttttgtttgtggtggggaagaaggtttgttgtttatttggtttttttttatgatttttttttagttgaaatgaaggtaaggggtgtggggttttgttgggagtttttgatggttgtttatttgtgaaggatgagtttgttttgttgtgggttgttttgttttttgtttttttttttggggggttggtttttggtggtttgagggtgtgggtggtgagggttgttggagtttggttgttgttttgtgtttttttgtttgtttgtgagggttttattggtttgttgtgttgttgttttttttgattttgttaggtttgttttggtttagatgaggggttaggttgtgggtttggtgatattagtaggtgtgatgataagaagtaaataaatatgtttaagagtttaatgtttttttaggttagtttttatttttatatgtgtggggttgttggtttgtagagataatgggtgtgtttgggggaatgtttagggttgtatttagagggtggtttaaggattttggggggatatgtatggaagggtttttgtttgttgtgtatatgtttgagatttgttgttgttgggtggttggaatgggataggaagaagagaaatgagggaaagaaatgaaggagtgggaaagagttaggttttttttttttggtatggtgattttgtattttagtgatttgaggagagatttttttggaggttgaattttaagttgtttattagaagttgggggaagtggtgagtttaggagattgtgaagaagtgtgtgtgatgtatttaatagttttgttgtttttgatttttgattatttattaaatttaaggatatgtttgggattttttttgtttttttggtttgaattttggtttttttatgttggtaggaaaatttaaattgtagttttggttgttatatgtgaaggatgttgatgtgtagtaggtgtatttttgtgttatttgaatatttaaaaattattgttttataatggatattgatattgaaggaaagaggatttgttttttttagaattagtttttggaggagggagggttgttttgaggttgttttgaattttggggtagttgttttttggtttgttgtgtgttggggtttttggagattttttttttaggtggtttgtgggttaagttattggtgggttggagaagtattaataggaggtttagtatttgttggttgttaaggatattagataggggtgagggtggtggtgaagttttaggatttgaatatttaatttttgtttagtttttagtttggtattttgaaggttttattagtttgtttggttgaggttttaaggagtgttgtggttttagtttggaggagatttaagtggtttttttgaatattttagtaagtggtgagtttggttttgaagttgttttttatattgttagtggtgtgtggagatgaatgtagtgattatggatgttttgttttttgaatgtgggaaatgtttttggttttgagttttgtaataggtaatggtgttttgttgtttttttttttattagtttgttgttttttgtttttttttgttttttttttttattggtttagtgaagtgtaaatagtttgttatgtaaattgtaaattgatttgtagtggtgtttttagttttttgttttgggtataaaagttgttgttgtgaaattagtgtttggtgtgtgagaaaaaatggagggatgtagttttattaagattaattttttattggtttagttttggatatttgttaggaaaagatatttgtatttgtgttttataaatttatttggaagtaagtttttagtaagtggtttgattgtattttaagtattttttttattttatttttgttgttagtggtgttatttgaatattaagatgtaggtatgaagttttttggggaataggttaaagtttttatttttaggttatagtttttgatgtttttttttgttattttatggggtattttaattatttgtttttgtatattttttgatttatttggtagaagagtttttatgggaattttttggttttttttttgatattttatgtatttgtagtttgaaggttttgtaggtgatagtggtaatggatgtttggtggaattttttttgggtttatattttgtttttttttagtaggttgggtaataatttttagggtttattgaggggtgtttagtttggaggagggggagtgatgttatagtgatgtttaaaataaggttttttttggttttattatagaaaagtattaggaaggggaatgtggtgagtattttaggaaatgtttggattggggattaggtgatattgtaggaatgtgtgtgttgggggatgggatggtgttttaaatatgggttattaggagttagaaggagttttttttttttttttttttttttaagtaaagtagaggaggtggagattgggatgggggtagtttggaaaaattattttttaggggtgtgagtttagtttgtgttgtgtggattgtttttgttatagtttaattatttttgtggtgtgtttagatgtttttttttttatttttttgttttttggtttttttattttttgggttttgggtttagttttgaaagttgaattgtgggttgtagtggggaggtgagggtaggtagaaattagttttagggggggttttatttggtttaggagttgggggataatagaaaaggtaggtttagggtatgagggaaggtgttttttttgttgtattggggtagtgatttttgggggttttgtatatataggagggaggttgtaagtttatagttgttttagtatttttttttttgttggggtagatagagtggaagattaaggtaattaattttagagggttattagaaaattgtttattaggttgttattatagattattggagtaaggtttgtttggggatgtttttgagttttttagattatttagataattgttttagttttttatttggttttttttgtttagattagaattttaggggtaggggaggatatttttgtattaatgtttggtatttgtttttaaattattaggttggtaggtaatgttagttattggtgtgattttttagtggaggaaggagtggggattgaatatttgggtggttgtgattttgggtagatattttttagttgggggatttttaagtagaggatttgttagtatagtttttttaatttagttttgtttttagtagaaaaatttttataataaatgaaaagagtgtttggtttttgattgttttaaagataaagtgatttatattgtttgtttatatggttggattaatttgatagttgtttttttgggggtagatttttatgggaagtttgtgtgatgggataatttaatgttatttaagttttttggaggggtggtttttttaattatttatttaggagaaagttagttaatatttatttgattgtttttgttttgggatggtttatttattgttttttggtaggaaagtttttgttttgaagggtgttttgggggtttagagttgagttaagttgtaagagggggttatggggaatgtgggaagtgaatttttaattttggtgtttggttttaaaagatttagggttttttgtgtt

SEQ ID NO: 3631 - DNA, 2428 bp, Artificial Sequence
  chemically treated genomic DNA (Homo sapiens)
tatggaatattatttagttataaaaaagaatgaaataatgttttttgtagtaatttgatggagttagaggtgttattttaagtgaagtaatttggaaatagaaaattaaaaattgtagtttttatttataagtggaaattaagttatgggtatgtaaaggtatatggagtggtataatggattttggagatttagaaagagggagagtgggaagggggtgagggataaaaaaatatatattgggtatatatatatatttggtgatgggtgtattaaaattttatatatatatgtatatatatatatatgtatatttatatgtatattttatttatgtaattaaaatttatttgtgttttaaaagttattgatatatatatatatatataatttttatatgtttttatatatatgaaaaaagatagtaaatttttgttttttaaattttaagttataggaagagaaaaatatttataaaattttaggtttggagatttgatttgttggttgaaatttttttttgttaatgttgattttttatattggaaaatttttagattattatttgtatgagtgagaattttttttttgatttttaatttaaattatatggaaagaaggttaaaatggagtttgtgtattttgaatttatttttagtatttaggttgtagtattatagtttaatttttattagtaggaggtattatttaaatatgttgagaaatatttatttttaaggaatgatattgtttttttatttggtttaatttagtttgagaaggattgttgtttttgatgaagaaagagttttatttttggttattgttatagttgttttgttaataataaaggtatagtattttttttttgtgtatttttaatatggatgttttttagggtattttaaaatttttttttaattagaaaattgttattggttatagttttatggttttgttgattgtgggaagtgagtgttttttttttgttgtggtttttaagtgtttttgtagtattgagaatatgatttatgggttggtttttttttttgtttttgtttgggtgttattgattttgggattttttttgaataataggttgtggagattttttataggttgttgtgtgaattttaggaaaattttttttagaggttatagttgttgttttttttatgtttttggttagattattttgagtttattggtggttttagtgatgtggttttttgtggttttgtttaatggaattttttatgaatgtgttatgagtgggatgagaagtttaggatttttggaattgatttgtaagggtaagtttaaagagtgttgggaagaattttataaagtattttgtggtaaaattagtatgttatttattgttaatgaagaattgaaattttttttttaggtttagttttaggtaagaaaagataaatttgttttttttttttagtatgagtttgaagtattttttttgtgttttttttagttagggttgtttgtgttttgttagaatattttgaaattaaatggaaattgaaatatgatgtagtattgagattattttaggaaaagtttttgaaaggttgggtggtttaataaagttgttgattggattattttttttttggttttgaaaagaaaatatttattggattgtttatatataaatatttaagtattttaaaatagtttttttgggtttgtaaataaataatgtttaatattaaattataaattgagtgttaatggtagagttgtaattagaaattattgttttttattaattatttatatttaagttgtttttttaaatatatatatgtattatttatttattaaaatgtagttgaatgaaatgagttattattttttaaagttgtatgtaatataattagtgtggagatttttttgaatgatttttggtaattgttatttttgtgtataaatattgttaagattgagaagaattttttttgtatggtaggaattagtagtttttaaatagttttttgtgaaaaagtgattgtattttttagggagattatgttttatattttttgtgttgtatagttaaaggggtttttaattattttagaagtttaagatttgggtattgttttatttaatagaaggaaattatatttttatttaattgatgtagggaagtagtttgttatttttttaggtatatgaatataaatttagatgtatagttttaggaaggattaattttttatttataggtagtaagaattgtatttttaaaagtaaaataagtggtaagagttgataagtagatttataaattgttaggaatgttatttgttttagaataaaggtatagaaatagtattattttatttttttgataaggatttgttttggtaataataaattaaggtaaaatttgtttttaaaatta

SEQ ID NO: 3632 - DNA, 2428 bp, Artificial Sequence
  chemically treated genomic DNA (Homo sapiens)
tgattttaaaaatagattttgttttgatttgttgttattaaggtaaatttttgttgaaaaagtaaaataatgttatttttgtgtttttattttgaaatagatagtatttttgataatttgtggatttgtttattaatttttattatttgttttgtttttgggaatgtaatttttattatttataaatgggaagttagttttttttaaggttgtatatttggatttgtgtttatgtgtttggaggaatgataggttatttttttgtattaattaggtaaagatatgatttttttttgttaaataaaataatgtttaaattttgagtttttgaagtaattaagaatttttttagttgtatagtataaagagtataaaatataatttttttagagagtatagttatttttttatagaaggttatttaaaaattgttgatttttattatataaggaaaattttttttaattttgataatatttatatatagagatagtagttgttagaaattatttaagagaatttttatattaattatattatatgtaattttgaaaagtaataatttattttatttagttatattttaatagatgaataatatatgtgtgtgtttgagaaaataatttgaatgtaaataattgatagaaggtagtaatttttaattatagttttgttattaatatttaatttatgatttagtgttaggtattatttatttatagatttagagagattgttttaaagtatttaagtatttatatgtggataatttagtggatattttttttttagaattggaaaagagataatttagttagtaattttattgagttatttagttttttaaaagttttttttgagatagttttaatgttgtattatgttttagtttttatttagttttaaaatattttgataggatatagatagttttggttgaaaggagtatagagagaatattttgagtttatgttgagagaaaaaggtgagtttgtttttttttatttgagattgggtttgaagggagagttttagttttttattgatggtaggtagtatgttagttttgttataagatattttgtgaagttttttttagtattttttgggtttatttttgtaaattagttttaggagttttgaattttttgttttgtttatggtatatttatagaaagttttattgagtagagttatagaaagttatattattggagttattaatgagtttagagtgatttggttgaggatgtagaagaaatggtagttgtggtttttgggaaagatttttttgggatttatatagtagtttgtgaagagtttttatgatttattgtttagaaagaattttaggattagtaatatttaggtaggagtaaagaggaaaattagtttataggttatatttttagtgttgtaggggtatttaaaagttataatagaaaagagatgtttattttttatggttagtagagttatgaagttgtagttaataatagttttttgattaaggaagaattttaaaatgttttgaaaagtatttatgttggagatgtatagagggaaaatgttgtgtttttgttattggtagagtagttgtggtagtggttgagggtggagttttttttttattagaaataatagttttttttagattgaattgagttagataaggaaataatgttattttttaggaatgaatattttttaatatgtttagataatgttttttattggtggaaattgggttgtgatattgtagtttaaatgttgagaataaatttaaagtgtatgggttttattttaattttttttttatgtggtttggattgaaaattagaaaagaaatttttatttatataaataatagtttaggaattttttagtgtaaggaattaatattaatagaaagaggttttagttgataaattaaatttttaaatttagaattttatgaatgtttttttttttttatgatttgagatttggaagatagggatttgttgtttttttttatatatataaaaatatatgaaaattatatatatatatatatattaatagtttttggagtataagtgggttttggttatatggatgaaatatatatataaatatatatatatatatatatatatatatatatgagattttagtgtatttattattggatatgtatgtgtatttaatatgtatttttttattttttattttttttttattttttttttttttgagtttttaaagtttattatattattttatatgtttttatgtatttatagtttaatttttatttataagtgagaattatagtttttggttttttatttttgagttattttgtttggaataatgtttttagttttattaagttgttgtaaaagatattattttatttttttttatgattgagtagtattttatg

SEQ ID NO: 3633 - DNA, 2443 bp, Artificial Sequence
  chemically treated genomic DNA (Homo sapiens)
atgtgatttgaaggtatttagtatatgtttttgtttgggtaggattagttgagttattttttgttttattaatttttaataattgttatattgtgtgtgtaattagtaagtgagtggtatatggagtttgatttggtattttatttatatattttgtttgatattatttttattgtttgggtttttgtttttggagaagagttgttgaaaagtattatttttttttttattattaatttttatttttatttttatttttaatatgggatgttgaggtgtagaggtattagtattgttttgttattattttagtggatatggatttgattaggtgttttttttttttttgtttatattaaggttttttaggttgtggttgtttattgggaatttttttaggggagtggtggaggggtgaggttatggtgtggggatttgtaagagggttttgattttgatagagaggggttgatgggtggttaggtgggtttgtgggtttattttgttgaggtgagggttttgtgttagtaggtagttgtgttgatgggtgtggtggtgatggggggttttgggttttatggttggtgttgggtttggtggtggggttaggttggggtgggttgtatgtgtggtgtaggtggtggatgttgttggggtgatggtgttgattgtagttgtggtggtggtggttgtattgggaaaggtttagtggttgggggtgggtgtgggtggtgagagggggtggatgtgttgggaggggtttgagtgaagttggtgtttttagtagggtagtttgtgagaagtgttgagttatggtaggagattatttgagttggtgtgtgaggaggaggaggaagagtgagttttggtagtgttgttggtggtggagtgggggtggtggttggagtttttggttttatagggtttttgtttattatgggtttatgattattgttgtggttgtttttttttatgtgggtatgtttaaatgtagtgtattgggtggttttgttgattttagagatttagggtgggggtagggagtggggagtgttaggttaggatttttttgtttgggaaggttggagaaagtgtgagaagatgttagaaggtgtgaatttgagtggtttaggtagagttggtggttgtttagatatttagggggattataggatggaaggatttgtgaggggtttttagaattgttgatagaatattttgataggttgaggagaattagatttgttttttttgttttgttagtgttttggaagttttttttttatagatttataatttttgttgtgttatttaggatgttggttatgtttggggttttgaggttggagggaattaattttgatttagaatgttgaggtttaagggaattgggaggaagtttagagaggagagtttaggtgttatatttgttagtttttatagattttttattggaattgtatttgaatgttaataagataagagttaaggtgttagggtgtaaaggtttaatgaatagttttgtttattttgtatattatttttttgggagttttagaaatttgatgtttaagaattattgttttttttgaataatgatgagtaagtagttttttaggttttttttttaattttaggtgatttgtttgtttttgttttttaaagtgttgggattataggtgtgagttattgtgttgggttatttttttattgttttattgatatttatgtttggaggtttatggattggaggaatagttagattatagttaaaaggagtgtttgtttgataaaaataaattaatagtaatagatattaaagttttttgtgttttagttttttttttagttaaataggattgttagtttttgttttatttgtttttgtatattgatattataaaggatagtgtttgagattatttgttgattttatatttttatatattagatatatatttaattatagtgtttttatttttagttatgttaattttgttttattagaaagattttttatagtaattgtattttgtttgtatttatatttagaagtttttttgattttgtttgaattatttagaatttgttgtttttatagagaatattttttaggtattataaagttttttttgaaaaaaatttttgaagttaaatgatattttttattgttaattttatattttataaatatttaattttataatatttaagaaaaaggtgtattttatataatttatttttttgaattaattgagatatattatagttagggtgttttatgtgagaggaaatagtttaatagttggtatgggagttaatttaagttgtttaagaagaaataaaaatgttagtataatagatttttattataataaagtatttattatatgaatttagatatattatttatttgtttttgtttttgagatttaatatttat

SEQ ID NO: 3634 - DNA, 2443 bp, Artificial Sequence
  chemically treated genomic DNA (Homo sapiens)
gtagatattaaattttagaaataggaataggtaggtagtatatttaaatttatgtaataagtattttattataataagggtttgttgtattaatatttttgtttttttttaagtagtttgaattggtttttatgttagttgttaaattgtttttttttatataaaatattttaattgtaatgtgttttagttaatttaggagagtgagttgtgtaaagtatattttttttttagatgttgtaggattgagtatttatggagtatagaattaataatgaaaggtgttatttaattttaaggattttttttaaaaagaattttgtgatgtttagaaaatattttttataaaaataatgaattttagataatttaggtgaggttaaagaagtttttaaatgtaaatatggataaaatataattattgtaagaaatttttttgataaggtaaagttaatataattagaaatgaaaatattgtgattggatgtgtgtttagtatatggagatataaaattagtaaataattttaaatattattttttgtaatattagtatgtagagataaatgggatagaaattagtaattttatttaattgaaaaggaaattggggtatagaaggttttagtgtttgttgttattaatttatttttattagataggtattttttttggttatgatttgattatttttttagtttatgaatttttaagtataaatattaataaaataataaaaaaatggtttggtgtggtggtttatatttataattttagtattttggaaggtggaggtgggtggattatttgaggttgggaggaaggtttgaaagattgtttatttattattatttagagagagtagtggtttttgaatattaggtttttagaatttttagagaaataatatataagataaataggattgtttattgggtttttgtattttaatattttgatttttattttattgatatttaaatataattttggtggaaaatttgtagaaattgataggtgtggtgtttgagtttttttttttgggtttttttttagtttttttgggttttggtattttgggttaaggttggttttttttggttttagggttttgggtatggttggtattttggatggtatggtgaaggttgtggatttgtagaaagagggtttttaagatgttaataagataggagagatgagtttgattttttttagtttgttgaggtgttttgttaatagttttggggattttttatgagtttttttgttttgtaatttttttaggtgtttgagtgattgttggttttgtttgaattgtttaggtttgtattttttggtatttttttgtattttttttagtttttttgggtagggggattttggtttgatgttttttgttttttgtttttgttttgggtttttggggttagtagagttatttagtgtattgtgtttaggtatgtttatatggagagaggtgattatagtggtgattataagtttatggtgggtagaggttttatggagttaagggttttggttgttatttttgttttgttattagtagtgttgttaggatttgttttttttttttttttttatatgttggtttggatgattttttgttatgatttagtgttttttgtaggttgttttgttggggatattggttttgtttgggttttttttgatgtgtttatttttttttgttatttatgtttgtttttagttgttgggttttttttagtgtggttgttgttgttatagttgtagttagtattgttattttagtagtatttgttgtttgtattgtgtgtgtggtttgttttggtttgattttgttgttgaatttggtgttagttatggagtttgaagttttttgttgttgttatatttattagtgtggttatttgttgatatggaatttttattttaataaggtaaatttgtaggtttatttggttgtttattggtttttttttattagggttagggtttttttgtaggtttttgtattatggttttgtttttttgttgtttttttgggaaggtttttggtgagtggttgtggtttggggggttttggtgtgggtagaaggaagaaggatgtttaattgggtttgtatttattagagtgatggtagggtagtgttggtgtttttgtattttggtattttatgttagggatagaggtaaaggtaaaggttagtgatagaggaaaaggtgatattttttggtagtttttttttaaaaataagagtttagataatgaaagtagtattagataaagtgtgtgaatggagtgttaggttagattttatgtgttatttatttattggttgtatatatagtgtggtaattattggaagttgataaggtgagaagtggtttaattggttttgtttagatagaaatgtgtattgagtgtttttagattatgt

SEQ ID NO: 3635 - DNA, 2489 bp, Artificial Sequence
  chemically treated genomic DNA (Homo sapiens)
atttttagtatagttagggtaggttttattaaattgtaaagtaggaaagttgaataatttttaaaagttaaagtagtttatgattttaaagtatttagttaatttagtttttgatttgtataatttagattatgtttatattttgaagatatttttatttttattttattgataatttaaaagatagtttatttagtaaagttatatttaagtgaatttgaaaattgtttagatttatttatttaatttatgaatatttttttatttataagttaatttggtagatataatatataatagtaagtgtatatataagtaaatatatttagatatgtatatatatatataaatgaagaggtggagtttaaaatatttaaattgggtgtagtgtatattgtttgggagatggatgtattaaaattttataaattattattaaagaatttgtttatgtaattaaataatatttgtttttttaaaatttatgggaaaaaaaaattaaaaaaaatatttaaatggtattatagaattaattagttgaatatagtatttagtatttggttgttatttaatatttgttttatattattatatttagaaaataagtagatattttttttggaagagttttgagggagttattaggaggtttgtatggtttgtttttttgttttttttttgttttgtggttgaattttaattttttttgggtttagattttattgatttgtttttgggtaaagtaaatgatttgattagatggttatgtgtattttttttttttttgaaattagtattatagggtaaaagattatttttatttggttgttttttagatgttttatatttggatagtaaattgattttaaattatttttttttaaagatttttgagggagatattgtatttggttattgtagtttagagtaggtttggttatggttatgagtatgttgagttattatgtttattgtggatgatattttggagtaggttggggagtttggttggttttagaagtaagttttttttattttatgtttgttgttggttgtttttgtgtttatttgtgtgggtattgtttttttgggttttatatttgattattattgttagagttttggggtggttgagttgagttagtgttgtggttggagttttgtggaggagttgaattatatagtgttaggtttggggtttgtgggtgaggttttttttggttagtgtaggtgttatgaagtggattggaattagagtgtttttagttgtgtagattttttggttagtttggttattaataggagttatttgttgttgggtttttgttaggatggttgggtgtatgatatgtttggtttttttattgttattgaggtaaaaaagtttttgtaatatgggagtttttgggatagggagaaatataaagtaaattttatgaagtttagttttatattaggaaagaggtagggggttatgtttattgtgtagtttgtgggtgtttggttgtgttttaggtatggggtatttttttttttagtttaatttattataaattttgggtttttgaggaggaagttgaggtaggagagaatagttagtataagttgggggttaggttgttaggttgtttgaatgggagttgattgggagattaggagtttttttgtttgttttattggttttttttagaattattaatttgttttgggttttgtttttttattaatagtattgtgggttttttttttttgtttaagagtgatgatgattgattttaatgatggtgttgaggtggtttggaattgttttggtttggaagtgagaatatttggtggaattttagttgtgttttttattagttgagtattattgggtaagttattgtttttttaagttttatttttttattagttaattagggatgatgatggttgttttataggggtgtgagttttagttgggatttgtgaaagtattgagtaaatttaaattgagttatattgtgtagtttgatggggtttatgggatagggtgatggttttaaaagggttttgtttgagtagtttatttggttatttgagtattttgttttgagaattttttagtaaaaagtgttattatattttttttttattatgagtttttttgaaattattgtatggtaataagtgtggatgtttggtgggttggagaagttgtgggttaaagtttgttaggggttttttgttagtaatgagtagtggtgtggttttggtgtaggtattgtttttttgaaataagaggtaattgggttttttttgtttttggttttgtttatttgtttgtttttattatttttgtttaagttttttggattttttgggtttttgttttttttttttttttttttttgagtggtattagtggtgatatatttagggttattattggaggaaagtttagggttttttttttttgggtttgagtattgttttatttgtttgtttgg

SEQ ID NO: 3636 - DNA, 2489 bp, Artificial Sequence
  chemically treated genomic DNA (Homo sapiens)
ttaggtaagtaggtagagtaatgtttaggtttagaggggagggattttaagtttttttttagtaatagttttaaatgtgttattgttgatattatttaggaaagggaaaagaggaagaatagagatttaagaagtttggagagtttgggtgagggtagtgggggtagataagtgggtaggattagaggtagggagggtttagttattttttattttagggaagtagtgtttgtattaaaattatgttattgtttgttattaatagaaggtttttgatgggttttggtttatagtttttttaatttattaagtatttatatttgttattgtgtaatagttttaaaagggtttatgatgggaaaaaaatgtggtgatattttttattaaaggatttttaaagtaaaatgtttaaataattaagtaaattatttaagtaaggtttttttgaggttattgttttattttatgggttttattggattgtatggtgtgatttagtttggatttgtttagtgtttttatagattttagttgaagtttatatttttatgaggtagttgttattatttttggttgattgatgaggaaatgaggtttagagaggtagtgatttatttagtgatgtttagttaataaggggtatagttgggattttattaaatatttttatttttaagttagggtaattttaggttattttaatattattattgaggttaattgttattatttttgagtagaaggagggggtttatagtattattggtggggaagtgggatttagagtaagttgatagttttgggagaagttagtggggtaggtagagaggtttttggttttttagttaatttttatttaagtaatttggtaatttggtttttgatttgtgttagttgtttttttttgttttagttttttttttaaagatttagagtttgtggtggattaaattagagaagagaatgttttgtgtttgggatatagttagatatttatgaattgtataataaatatagttttttattttttttttgatatggaattgaattttataggatttgttttatatttttttttgttttaggaatttttatgttatagaggtttttttattttagtgatgatggaagagttgggtgtgttatatatttagttattttggtagggatttagtggtaggtggtttttgttggtggttaggttagttagggggtttatatagttgagggtgttttggttttagtttattttatagtgtttgtattggttaaggaaggttttgtttgtgggttttaggtttggtattgtatagtttagtttttttgtagggttttagttatagtgttggtttagtttagttattttaggattttggtagtggtggttaggtgtgaaatttaggaagatgatgtttatatagatgggtgtaaaggtagttgatagtaggtataagatgaggaaggtttgtttttggaattagttagattttttaatttgttttagaatgttatttatggtgggtatgatggtttagtatgtttatggttgtggttagatttgttttgggttgtagtggttaggtgtaatgttttttttagagatttttgaaaaggagtggtttgaaattagtttgttgtttaagtgtgaaatatttggaaggtaattaagtagaaataattttttattttatggtgttggttttaggaaaaggaagaatgtatgtggttatttgattaaattgtttgttttgtttgggagtgagttagtggggtttaagtttgaagagaattgaagtttagttatagagtaagaagagggtaggagagtaggttgtgtaaattttttagtagtttttttagggtttttttaaaaagaatatttatttgttttttagatgtgatggtatgaggtaagtattgggtgatagttaggtattagatattgtatttggttaattagttttgtgatattatttaagtattttttttagttttttttttttataggttttgagggaataggtattatttggttatatgagtaggttttttagtggtgatttgtgagattttggtgtatttattttttaagtagtatatattgtatttaatttgggtgttttaagttttatttttttatttgtgtgtgtgtatatatgtttagatgtgtttatttgtatgtatatttattgttatatgttgtgtttattaaattggtttataagtaaaagagtgtttataaattaagtaaataagtttaagtaatttttaaatttatttaagtatgattttgttaaataggttgttttttaaattattagtaaaatgaaaatagaaatgtttttaaaatatagatatggtttaaattatgtaagttagaaattaggttgattaaatgttttaaggttataaattgttttggtttttgaaaattgtttaatttttttgttttgtagtttggtagggtttgttttagttatgttggaaat

SEQ ID NO: 3637 - DNA, 2388 bp, Artificial Sequence
  chemically treated genomic DNA (Homo sapiens)
ataaatataataagttataaatatagtattgagaggtttttgtatggttttgttttttttaggtagtattttatataattatagtttatgattataattggaaagttgttattggtattatattagaaattagtttgtagattttgtttagattttattaggttttttgtgtatttatttgtttttttgaaaatattttaatgtttttttatatgatttatttttttgatatattgtgagataaggtttttttttttttgaataagtttagagaataatgaatgtgagaggtgggaaggatgatttggtgtatttttgttttatttatggtgagtttggattttagagtagaaggatttttgttttttttttggggagttttggtgttaatttagtgtaggttgttaagttatttgggtttgattgtttttttttttgttaaaatttgttttaagtatgtaatatagttatgtttattaatgatgaggagatagttaatgaaaattaatttttttaaagatgaatagatatttagatttttttaagtataatttatttaagaaaatattattttattgagttttaaatgagttaggttttatttagaaagtgttttttagtgttaggtaaagtgttttatatttgtaattttagtatttttggagatggagataggaggattttatgagtttaggagtttaagattagtttgggtaatatggtaaaattttgtttttatagaaaatataaaaaaaaaaaaaatagttgggtgtggtggtgtgtatttgtggttttagttattttggagtttgaggtgggagaattgtttgaatttaggaggttaaggttatagtgagttgtgtttgtattattgtattttagtttgggtgatagagttagtttttgtttttaaaaaaaaaaaagaaagaaaggaaaagaaaatgtttttgagttgattatattttaattattgtgttaatttgagagatagtttgttatttttttataggatatgagggttgataattattttattgtatggttttggggattgatgaataaaggttaatatgtggaaaagggtaattaaagaaagaagagttatttttaggttaattagtataagtttttttgttggtatgttttaatatattaaaatagtagtaaaaataatttgtatattggtattgaaggtatagataaatttgttgaggatttttattatggtagagggatgttttatatgagtttttagtagattaattaagtttttgttagttttatttggaaatgatgttgtttttttggggttatgtagagaagtttatgttgatgaaatgagttgttttagaatggtagtttttgggtagtagagtttgggtttaaggaaggttgaaagaaggggtggtgtggagttgttaggtgtaaatgttaggttagtaatgtagtttagtttgtatggatgtgttttgtttaggaagttgtgatttggttgtattttttattttaggtgagatggaaggttgaattttattttattttttggtgaggttgatgttttttggtgtttataattttttttgtaaatatttgaaaggaatttattattttaatgttggaagagatgtttatttttttttaagaggatttgagtggattttgattgtaggttttatgttgggtagagttaaggagaatttaatttgtttttaattttatttgaatgttttttttttttttttttttttttttttttttgagatagagttttgtttttttatttaggttggagtgtaatggtatgattttggtttattgtaatttttgtttgttgggtttaagtaatttttttattttagtttttttagtatttgggatgataggagtatgttattatgttttgttaatttttggtatttttagtagagatggggttttattatgttggttaggttggttttaaatttttgattttgtgatttatttgttttggttttttaaagtattgggattataggtatgagttattgtgtttagtttatttgaatgtttttatgtttgttataagtgtagtagtagaatttttatatattttgtgtgtgaaagttttttgtagtttttttagtatagagaggttggggaaggttagagattgatttgtattttttagatatatagttgattattgaataatatatgtttgaattgttatatatagattttttttaataaatgtgttagaaaatgttttggagttttgtaataatttgaaaaaatttaaagataaattatttagttagaaatattaataaaaatagaaaaagttaagtatgttatgaatgtataaaatatatgtagatatttagtttattttattttttattatta

SEQ ID NO: 3638 - DNA, 2388 bp, Artificial Sequence
  chemically treated genomic DNA (Homo sapiens)
tggtagtaaagaataaaatagattaggtatttatatatattttatgtatttatgatatatttaattttttttatttttgttgatatttttagttggatggtttgtttttgagtttttttaaattgttgtaaaattttaaaatattttttaatatatttattgaaaaaaatttgtgtgtaatagtttagatgtgtgttgtttaatgattaattatatgtttaaagagtataagttagtttttaattttttttagtttttttatgttaaaggaattataggaaatttttgtatgtaagatgtgtggagattttgttgttgtatttgtagtaggtataggaatgtttaaataggttgggtgtggtggtttatgtttgtaattttagtattttgggaggttaaggtaggtggattatgaggttaggagtttgagattagtttggttagtatggtgaaattttatttttattaaaaatattaaaaattagtagggtatggtggtatgtttttgttgttttagatattggggaggttgaggtgggagaattgtttgaatttagtaggtagaggttgtagtgagttgagattgtgttattgtattttagtttgggtgagagagtaagattttgttttaaaaaaaaaaaaaaaaaaaaaaaaaaaaagaatatttaaataagattggagataaattgaattttttttagttttgtttagtataaggtttgtaattaagatttatttaggtttttttaagaaggaatagatgttttttttagtattaaaatggtaaattttttttaagtatttataaagaaagttataaatattaggaaatattaattttattaggaggtgaggtagagtttaattttttattttatttgaagtggaaaatgtagttaagttataattttttaggtgaagtatgtttatgtaagttggattgtattgttggtttgatatttgtatttggtagttttatgttatttttttttttaattttttttgagtttaggttttgttgtttgggaattgttattttaggatagtttattttattaatatgaatttttttgtatagttttaagaggatagtattatttttaaatggaattagtaagaatttaattaatttattaaggatttatataaagtatttttttgttgtggtaagggtttttggtaagtttatttgtgtttttgatgttaatgtgtagattgtttttattgttgttttagtgtattagggtatattagtgaggagatttgtattaattaatttggaggtggtttttttttttttagttgtttttttttatatgttagtttttgtttattagtttttaggattatgtaatgaggtgattattagtttttatgttttgtaaagagatagtagattattttttaagttagtatagtggttaaaatgtaattaatttgggggtatttttttttttttttttttttttttttttttggaaatagaggttggttttgttatttaggttggagtgtggtggtgtaaatatagtttattgtagttttaattttttggatttaagtgatttttttattttagattttagagtagttgggattataggtgtatgttattatgtttagttattttttttttttttgtattttttgtagagatagggttttgttatgttatttaggttggttttgaatttttgggtttatgagatttttttatttttgtttttagaagtgttgggattgtaaatatgaggtattttatttggtattaggggatattttttaagtgagatttaatttatttggggtttagtgaggtgatatttttttaaatgagttgtgtttgaaaaaatttagatatttatttatttttgaaaaaattaatttttattggttgtttttttattattaataagtatggttgtgttatatgtttaagataaattttagtagagaagaagatagttagatttggataatttagtagtttgtattgagttggtattaggattttttagaggagagatgagggtttttttgttttgaggtttagatttattatggataaaatagagatgtattaaattattttttttattttttatatttattgttttttaagtttatttggagaaaaaaaaattttattttatagtatgttggggagataagttatgtagaaaaatattaaaatatttttaggaaagtaaatgagtgtataaaaaatttggtgaaatttgagtaaggtttgtagattagtttttgatgtggtgttaatggtaattttttagttgtaattatgaattatagttatgtaagatattgtttgagggaggtggggttatataaggattttttagtattatatttgtaatttgttgtgtttat

SEQ ID NO: 3639 - DNA, 2433 bp, Artificial Sequence
  chemically treated genomic DNA (Homo sapiens)
tgaagatgtaataaaattttttatttgaaaaatttttttgtgatttaagtaagtttatatttgttttattgttgataatttataattgttattttaggtttttaaggagtttattgatgtatttaaaataaatttaataaaattagtgttttttaattaaatgatattaaatatatatatttgtataatttgttttgtagttttaatttgattttttgttaggattaataaatatatatatatatgtttggtataaatagagtaaattttttgtggaataaaattaattgtgtatattattttattttttgtataaaatatatggtaggttgggtgtggtggtttatgtttgtatttttagtattttgagaggtttatgtgggtggattatgaggttaagagattgagattattttggttaatatggtgaaatttttgtttttattaaataaataaataaatataaatagtagttgggtgtggtggtgtatgtttgtagttttagttatttgggaggttgaggtaggagaattgtttgaatttgggaggtggaggttgtagtgagtttagattgtgttattgtattttagtttggtgatgtagtaagattttgtttttgtttttttttttgtttttatatgtgtgtgtgtgtatatatatatatatatatatgataaaggaattttttttttttttttgttttttgtttaatttaatttttgtaattgttggttgtttttttatttttgatttttttgtaaatttttagtagagtagtatttgggggtagatttgttattgagattgatttttttattgtagaagagaatgtgtggtttttggaggttggatattatagtgggagtaggaatttggtaggtgatgagtagaggtatgagtaagttgtttagttaaatttggtagttttgaggttaaaaatgattttgtaatatttttgtggaggaagttttttttagatgtttgagaaataaatttagttgggaggaggtgttttgtattttataaaatgaaggttttgtgattggtttagagttgtgtggtttttagtgggtttttaagttttggggtattttaggttggtattatattattaaaaagaagtgtaaattttatttttgaagtttagttgaaggtaggtgttggtagggagagttaagaggttgtttagagagtttgggttgggagtgggagtgggataaggtgggagttaatttagttggagtagatgttagaagaagttttgtttagttgaggtgttttgttttaattttaggtttttggggattttaagaagggagttatttggtgtttttttgagtggtttttatagttttggagattttgttgttgtttaggggtgtagttgttggagtttttgggtttgttggggtttagtaggggtagtgggagtttttattttgggagaaattgttagggataaatattgtttgttgatgtaaagtttgttttgtaaaggagttttttttgtatatgttttgtagtttaaattgatttagaaagggatatataggtttgtaaggtgtttttgggattatatagttttatgtttttttttttttttttgttatttttttatgttttttgtttttattttgggtagtagattttagtaggtggggaaatttggggattggtgtttgtattgttgaaaggttggaaagtagagttttgtttatatttatgatgtttttagaatgtggtttttagaaataatttaagtgtgagtagggtgttgaggataggataaggtgtttgttttttagttttgttattggttaaggagaattatagtagtagagttgtattattgttgttgttgtttttaatttgtgttaagtttggtttaggttattggattgggtaggattagttaatttaggttttgaggggtagtgtgttatagattgtagtttattttaattttggtttttggagaaggggtgttgaattttttttgggtatgggagggaaagatattttgagttggttgggtggagtggtagttttgagagtgatgagtgatagtaaagttttgttttagtaaggttttttattaatagtgtggtatgtttttttgaggagagtgttaggtttttgtattttgtaagttaagagagtaaagaaagtggggatagggtgtgtaattgtaatgtttggttgtgtgtgtgtatgtgtttgtgtttgtatgtgtgtgtgagtatgtgtatttgtttaagtgtaaatgtgtttgttggtagttggggtttaagtatttgagaatgtgtgttttttgttgttttaggagattaaaatgtttttttttagtattgagttatattgaggaaataaaattgaaataaattgttaggttttttttaagattagttggattttatgttaaataaaagttag

SEQ ID NO: 3640 - DNA, 2433 bp, Artificial Sequence
  chemically treated genomic DNA (Homo sapiens)
ttgatttttatttaatatagaatttggttggttttgagagaggtttgatagtttattttagttttgtttttttaatgtagtttaatattgggaaaagatattttaattttttaaagtaatagaagatatatatttttaggtatttagattttaattgttaatagatatatttatatttgagtaggtgtatatgtttatgtatatatgtaaatatagatatgtgtatatgtgtgattggatattgtgattatgtgttttgtttttgttttttttgtttttttgatttgtaaagtgtgagggtttggtgttttttttgaaagggtatgttgtgttgttggtaaaaggttttgttaggatgaggttttgttgttatttgttatttttaaggttgttattttgtttagttaatttggaatgttttttttttttatgtttaagagagatttgatgttttttttttaggagttgaggttggagtgggttgtagtttgtgatatattgttttttgggatttgggttagttggttttgtttaatttagtagtttgagttgaatttaatgtaagttggaggtggtggtagtagtggtgtggttttattgttatgattttttttagttagtagtaggattagggggtaaatgttttgttttgtttttggtgttttatttatatttgaattatttttaagggttatgttttagaaatattgtggatgtagatgaggttttgttttttagttttttggtaatgtggatattagtttttgggtttttttgtttgttggggtttgttgtttagggtgaaggtgaaagatataaagaaatggtagaggaaaagaagagggtgtgaggttgtatgattttgagagtgttttgtaggtttgtgtatttttttttaaattagtttgagttgtaggatatatatagggagaatttttttgtggaataggttttgtgttagtaaatagtgtttgtttttggtagttttttttagggtaggggtttttattatttttgttgagttttagtaggtttgagggttttgatgattatatttttgggtagtagtagagtttttaaagttgtaaggattgtttggagaagtattgggtagttttttttttggggtttttgagagtttgggattggggtggggtattttagttgaatggaattttttttggtgtttattttagttaagttagtttttgttttgttttatttttatttttggtttaaattttttaggtggttttttagttttttttgttggtgtttgtttttggttaagttttagaaatgggatttgtgtttttttttaatgatgtaatattggtttagggtattttggagtttggagatttattagggattatatagttttaaattggttgtaaagtttttattttgtaaaatgtaaaatatttttttttaattgagtttgttttttaggtgtttaaaagaggttttttttgtaaggatattataaaattatttttgattttaaggttgttaggtttggttgggtggtttgtttgtgtttttgtttattgtttgttaggtttttatttttgttgtggtgtttggtttttaggaattgtgtgtttttttttataataaaaggattagttttagtggtggatttatttttaaatgttattttattgaaagtttatagagaagttagagataaaagggtagttaatggttgtggagattgaattaaatgagggatgagggagaggaaaaaatttttttgttatatatatatatatatatatatatatatatatatatggagatagagagagagatagagatggagttttgttgtgttgttaggttggagtatagtagtgtgatttgggtttattgtaatttttgttttttgagtttaagtgatttttttgttttagttttttgagtagttgggattataggtgtgtattattatgtttagttattatttgtatttatttatttatttagtagagatgggggttttattatgttggttaggatggttttgattttttgattttgtgatttgtttgtgtaggttttttaaagtgttgggaatataggtgtgagttattgtgtttggtttgttgtgtattttatataaaagatggagtaatatgtatgattaattttattttataagagatttgttttatttatattaaatatatatatatatatttgttaattttaataaaaagttgagttgaaattataaaataaattgtataaatatatatgtttggtgttatttaattaaaaagtattgattttattaaatttgttttaaatatattaatggattttttaaaagtttgaagtaatgattgtaaattgttaatagtaggataaatataaatttatttaaattatagagaagttttttaaatggggaattttattgtgttttta

SEQ ID NO: 3641 - DNA, 2281 bp, Artificial Sequence
  chemically treated genomic DNA (Homo sapiens)
gattattatgtagtaattagaataaataagttgtatatttattgatttggaaagttgtttgtgatattaatataagtgaaaaaataaggttgtagagtaatgtatgtagaataatgttggttttgttttaaaaataatataggtgaatattgtgtatgtgtttatagtttgaatatatttgtatgaatatggaaatagatgtggaagattatttatttaatagtattaattattttaaatatataaaatggggtagaggtgggagatgattattttatatttagtgtttttttatgatgagtagtattggtttagtaatttttttaaagtaggaaaaataaagaaaaaagttgtagggtaggttagggttgaaagtatatttttgtaattattttattgttatattaattagtatttatttatggagtatttattgtttgtaaagatgagaatataagtattggatttaatagtttattagagggttaataatttgattggggagataaaatttttttataggaaaataaaagtatttttatgatgagaatagagttggttaatttatatttattttttgaaatgaatgtagtggaagtggtgtaatgagtataatttagatttggtaatttttttattttgttatatatttgtataaatttaagataaggtttttaatatttgtattattattttttaggttttttatttttgaagttgagaaaggaaatatttggatatgatgtaattagtaatatattaatgggtatgaaaggatttttttttttttttattttagtttttgtgttttatttttattttttaatttttttttagagtttggaatttattggggttatttttttaaaatattttttgaagttaagtttttagttttatagttattagggagatttttgagaattaagttagttttaatagttagtttagaattttggttaaatatgagtttttttatttaatggttaaaatgtaaaattaggtaatttttgtttatggtgttaagttgtaaattatttgtttttagtttttagtgaatgttattgggaagtattaggataaaagttgttatttaaaaattttaattttagtttttttttggtttgggtttaaagttagaggtgattttttataggtggtatgttagtgttatttgattgttgatatattttgtgtggtggttgagaaaattggagaagaaagagttagggtagttaaaggattgtttgttaattttaagatgtgtaggatgaagaggagaataatgtaagggtaggtattttgaataatttgtgttattgatagtattagtaaaaaataattagttggtttttagttagggagttttttatttagttgttgtgtgtgtattataggtttaaagagtgtttatggtttataatattgattagtttgagttttagtttattttgttatgggttgtagattagattgtgttttatgggttttttattttagaagaaaggttgaggagaaagaaagttatatttagtttttttgtgttatttgatatatttaatagtaaggaagggagggagggagggagggaagggaagggaaggaaggattttagtattttgggagtttaaagtataagtattgtttgaggttaggagttttagattagttgagttatataatgagattttgattttataaaaaaaaaattttttttttaattagttaggtatggtgatatatgtttttaatattagttatttaggaggttgaagtaggaggatagtttgagtttaggagtttaaagttatagtgattaagttattgtattttagtttgggagatagagtaagattttgtttttaaaaattataatattaataataaaatggaaagagtaaattttgatgttttattgttttgtgggtttgtgttgtttattttttttttatttttagttttgtattttatagtgttggtgatatatggaaaaaaaattaagatatagttttttaggaattgttaaaatttttatttaaatgtgagtgagtaatgaaaaataagatatatgaaatatgagggttgagaaagtgtgttttagggatgggagtgagagttttttgtattgtgtgggtagattaaagtaagttgttaattaagatttttttaagattatttagtagggggaaggagagaagagggggtgattatttagtgagttgagtataagaggaatattttgtagttttagagaatgtttagaggtagaagtgtgagtggg

SEQ ID NO: 3642 - DNA, 2281 bp, Artificial Sequence
  chemically treated genomic DNA (Homo sapiens)
tttatttgtatttttatttttaaatattttttaaagttgtgaggtattttttttgtgtttagtttattaagtgattgtttttttttttttttttttttttgttaaataattttaaggagattttgattggtagtttgttttagtttatttatatagtatgaggagtttttatttttatttttaaaatatatttttttagtttttatattttatgtattttattttttattgtttatttatatttagataggagttttggtaatttttaaaggattgtgttttagttttttttttatatattattaatattgtgaaatataaagttgaggatgaagggaaagtagataatataggtttataaaatagtaaagtattaaaatttgttttttttattttgttattagtattatgatttttagagataaagttttattttgttttttaggttggagtgtagtggtttgattattgtaattttgaatttttgaatttaaattatttttttattttagttttttaagtagttggtattagaggtatgtattattatatttggttaattaaaaaaaaaattttttttttgtagaattagggttttattatatggtttagttggtttgaaatttttggttttaagtaatatttgtgttttggatttttaaagtattgggattttttttttttttttttttttttttttttttttttttttttttgttgttaaatatattaggtgatatagaaggattggatgtaattttttttttttttaattttttttttaaaataggaggtttatgaaatatggtttggtttgtaatttatggtaggatggattgagatttagattgattagtgttataggttgtgggtgttttttagatttgtgatgtatatatagtagttggatggggaattttttggttgagagttagttggttattttttgttgatgttgttaataatataaattgtttagagtgtttatttttgtattgtttttttttttattttgtatattttaaaattaatgagtagttttttgattattttggtttttttttttttagtttttttaattattatatagaatatgttagtagttagatggtattggtatgttatttatggagaattgtttttggttttaagtttagattaagagaaaattagaattggaatttttggatgatgatttttgttttgatgttttttaatagtatttgttaaagattagagatagatagtttgtaatttagtattatgagtaaaagttgtttggttttgtattttgattattgagtaaaaggatttatgtttagttaagattttgaattggttgttggggttgatttggtttttagaggtttttttaatgattgtggagttaaaggtttaattttaaagaatgttttggagaaatagttttaatgaattttaagttttgggaaggggttgggggataggggtgggatataggggttggagtggggaagggagggaatttttttatgtttattaatgtattgttaattgtattatatttagatgtttttttttttaattttagaggtagagggtttgagagatggtggtgtagatgttaaaagttttgttttaagtttatataagtatgtagtagagtgaaaagattgttaggtttgagttgtatttgttatattatttttattatatttattttaaaaaatgaatataaattagttagttttgtttttattatgaaaatatttttatttttttgtgaagaggttttatttttttagttaaattattggttttttggtagattgttaagtttaatatttgtgtttttatttttgtaaataataagtgttttatgaataaatgttgattaatataataataaggtggttataaggatatatttttagttttggtttattttataatttttttttttattttttttattttaaaaaaattgttgagttaatattgtttattgtaaaaaggtattgaatataaaataattattttttatttttgttttattttatatatttaaaataattaatgttgttaggtagatagttttttatatttatttttatgtttatataagtatatttaagttatggatatatatatagtatttatttgtattatttttaaagtaaaattagtattattttatatatattattttgtaattttgtttttttatttatgttgatattatggataattttttaagttagtaaatatgtagtttatttattttaattgttgtataatagtt

SEQ ID NO: 3643 - DNA, 2313 bp, Artificial Sequence
  chemically treated genomic DNA (Homo sapiens)
ttattgggaggagaagggaaggtgttttgttttttagggttggggattataggtaaggttatgggtttgagggtatttttttaaattttagtagataaattatgtttaaattttatattttattgagaaagtaggtgtttgtaattagttatagaagggaggtgggtggttgtgggtagagaagaaaaaattttttaataaaaaaataaaaattaggtaaaatagaatttgatagttattatgtaaatagaagaaatattatgaaagtgatattattagtatggttgtgggtttgttttattttttggtttttaaagtaggagataatgagagttatttattgatttatttttagtatttgataaaagaaaaaaagttaattaattaggtttattttattgatttattaatgtttttgttattaagggataattttaaaaaggatttttttattaaaagaagagaaattaatttatagatttttttgggttttaatttataatttgtataggataaaattaagtttaaaatagagagtgtatttataaggttgagaagatattttgtggtgatttttttgtataatatgaaataaggttggttggtttttttttgtaaagagtaagatagtaaatattttaggttttttgggttaagaaatataattaaggatattatgtagttatttgtataataagagtaaaattatttttttttataatttttaaaatagattaattttaaaattttatgattagtatagtttgtattttatattgtttttatgtgttatgaaataatatttttattaaatttttttgtaagtatttgaaaatggaaaaagtatttttagtttgtgggttatataaaaataggttgtggtttggatttggttttggggttattatttgttgatttttaatatagaatatttttgagttatgttagggtttttaattagttaggttatttaagtttagattgaattgggatatggttttagaattttttttaatattgtatgtttgttataatgtgggtagggagaggttgttggttttgtagtagttatttgatggttgtttaaaggattgtgaatttagttattattagtattttttttatttttttagatttgggtgtagttggtttagttttttatttttagttttgggaaagttttttttttagatttttgtttttttttaataagtttgtatgttgtgttaaggagtaattgtttttgttgttatgaatttatttgtttttgtgaatttatgtgttttttatttttgttttatttagaatagagaatataattattttaatattttatgtattttttataagtttatagagttttaatggaagtttggagagataatggtagtttatatagtagaagtaatagtatttgtttagtgttattgtttaagttattattatagttaatatttttaggaaatttattttttttgttaggaggtttttatatgttatttaattttgtaataattagtagaaataggttttttttttttaatagttattattttgttttataaaaaagaaatgaagtttaagagattgagtagtttgttaattatagagtaagttaatgatagagatgaattttgaatagttaagttaggtagtgatttatgtttgtaattttagtattttgggaggttaaggtaggtggattatttgaagttaggagtttaagattagtttggttaatgtagtgaaattttgtatgttttaaaaatataaaaattagttgggtatggtggtaaatgtttatagttatagttattagttaggttgaggtgggaggattgtttaaatttgggaggtgtaggttgtagtgagttgagattgttttattttattttagtttgggtggtagagtgagattttattttaaataaataaataaaaattataattaatgatttagaatgtaattaatgatttagagtttatgtatttaaatataatatagttatttttttatagtattttaagtgaatattagattttgttgttgttgttgttgttgttgttgaaagtttttttattatttttttgggaatttttattggtttgattattttataaaatgttttggtttttatttatgtttttggtttttttttttgtttatgttttttttatttttttttttagattgtttttatgaatttttaatattttgatttaattttttagagtaatttagtttttgttagtttatgtttttaaattgagttttagtagaagttttttgagggatataatgttattttatag

SEQ ID NO: 3644 - DNA, 2313 bp, Artificial Sequence
  chemically treated genomic DNA (Homo sapiens)
ttgtaaaatgatattatgttttttagaaggtttttgttagagtttagtttgggaatatgagttagtaagagttaaattattttaaagaattggattaaggtattaagagtttatgaaaataatttgggagaagaggtgagaaagatatgggtaaggagaggagttaggagtgtgggtagaagttaggatattttatgaggtggttaggttagtgagaatttttagggaggtgatagaagaatttttaataataataataataataataataaagtttgatgtttatttaaagtgttgtagagggataattgtgttgtgtttaggtgtatgggttttgggttattgattgtattttgggttattgattgtggtttttgtttgtttgtttgagatggaattttattttattgtttaggttagagtgagatgaagtaattttagtttattgtaatttatattttttaggtttgagtgatttttttattttagtttagttagtagttatgattataggtgtttgttattatgtttgattaatttttgtatttttaagatatatggagttttattatgttaattaggttggttttgaatttttgattttaaatgatttgtttgttttggttttttaaagtgttgggattataggtataagttattgtttgatttgattgtttaaaatttatttttattattaatttgttttgtgattagtaagttgtttaattttttaagttttattttttttttgtaaaataggataataattgttaaaaagaaaaagtttatttttattgattattgtaggattaaataatatgtgaaaattttttggtaaaagaaataaattttttggaagtgttagttatgatgatgatttaaataatgatattgagtagatgttgttatttttgttgtgtaaattgttattgtttttttaaatttttattaaaattttgtaggtttataaaaaatatataaaatattaaaataattgtattttttgttttggatgaggtaaggatgaagggtatgtgaatttataagggtaagtgaatttgtagtagtagaagtgattgttttttggtataatatgtaagtttgttgaggaggagtggaaatttgggagagagatttttttgaggttggggatggaggattgagttaattgtatttagatttgaaagagtagggaaaatgttggtgataattgagtttatggttttttaagtagttattaggtggttattgtagagttaatagtttttttttatttatattatggtaggtatgtagtgttgagaaggattttgaaattatgttttagtttaatttgagtttggatgatttaattgattaaggattttgatatgatttagaagtgttttatgttgggggttagtaaatgatggttttagggttaaatttaggttataatttgtttttatgtgatttataagttaagaatgttttttttatttttaaatgtttgtaggaaaatttaatgagaatattattttatgatatatgaaaataatataaaatgtaaattgtattggttataaaattttgaaattgatttattttaaaagttgtggggaaaaatggttttgtttttgttatataagtaattatataatatttttgattgtattttttggtttagaaagtttgaaatatttattattttgttttttatagagaaaggttaattaattttgttttatgttatgtaaaggagttattataagatgtttttttaattttatgggtgtattttttattttaaatttgattttattttatatgaattgtgggttggagtttaaagaggtttatgaattgatttttttttttttgatagaaaaattttttttaaaattattttttagtgataaggatattagtaagttaataaggtaagtttgattgattgatttttttttttttattaaatattaaaaatgagttagtaagtagtttttattgttttttgttttagagattaaaggataagataggtttatagttatgttaatgatgttatttttgtagtgttttttttgtttgtatggtgattgttaagttttattttgtttaatttttatttttttattaaaaaatttttttttttttgtttatgattatttattttttttttgtgattaattgtagatatttgtttttttagtaagatgtgggatttgggtataatttatttgttagagtttggagaagtgtttttaagtttatggttttgtttgtggtttttagttttgggaagtaggatatttttttttttttttttagtgg

SEQ ID NO: 3645 - DNA, 2339 bp, Artificial Sequence
  chemically treated genomic DNA (Homo sapiens)
ttgttatttttttttttatttattttaagagttattattgggtagtggtaatttatttatggggttgttgtttagattaaatgagttaatatagataaagaataatgattggtatatgggaagtgttaagtaaagattagttattatggtttatttattttttttgaaaaaattttatttaaagatatatattggttaggtgtggtggtttatatttgtaattttagtattttgggaggttgaggtagaaggattttttgaggttaggagttttagataagtttggttaattaatatggtgaaaatttatttttattaaaaatgtaaaaattagttgggtatgttggtgtatgtttgtagttttagttatttaagaggttgaggtaggagaattatttgaatttaggaagtggaggttatagtgagttgagattgtgttattgtattttagtttgggtgatagaatgagattgttttaaaaataaataaataagtaagatagatattattatttagtttatagagatgtaattaaattaaagaattttagaagggtaattatatatatatataaatataaatattttttaaatgaaaaattaaataataaaattagaaaaatatagttaagtatattttaatgtagttatataatttaattaaaatataagttaattattgaaatagaagatttataatatatattagagaattatttaagtttaaaattttaaattatttgataatttggaagtatataaaatggtgggataagagaaattaaaaagtttttaagttttttattttatatttttgataattagaaataaataggtttaaatataaattttagaaaaataagatgtattttatttataaagaaagagatgtatttttaataattatagtatttgttttttataaatgagataaattaatatatagtttttttttaatatagatgttttttagatgtttaatagtggtttaattttttttatttttatagtgtttttaaagtttgttggtatataaatatgaatgaatgaataatgtagaatttatttaagaaattttaaggagagagaggaggagatttatattatatagtaaataatttaataaatttgttaaatgttatgtatgtgaataggtgtttttttttttttgattttttttttttatatagaatttagtgttttttttttgttttttgttatagtatttattgtttttttttttttatgttggggagtagttgaggtttgtgttttttagtggatttgttaaattattttttttagtatgttgtttttttttttttatagattatttgttaagaaaatatattttttatgttgttaatttatatatatatgtgtattatatatatgtttatataatgagagattgttaggaaaattattattatatatatatgtattatatatattatatatatatatatatgtattatatatatatttgtatatatatgtatatggaaaattgttaggaaaaatagtatagtggtagtgttagtgttggttgttttttggtggtgagattatatatttttttttataattttttgtatttttttaattttttgtgatttatatatgtttttaattattaaaagatgttgaaatttaaattatgttttatgtatattttatatttttatttaaagtttttttatggttttttatggtttgtaggatgatgtttgatgtttagtttaagagttttttttttttattttttatttttttgttatttgtagtttatgttttaataatattagagtgttttttgtgtatatttagttgatttatgtttttttgtttttgtttatatgtttatttttatttggaagataatttttttttttttggtgatttttatattatttttttttttttagagtaggtatagttgtttaggaaatatttttggttgagttttttatgggttttaattgtattttattttgaagatgaaatgatttgtgtttttgtttatttttttttttggatggtaagtttttaaagggtagaagttatattttattatttttatattatagtttttagaaggttttgttaatatgatataagttgtaaaaattgaattaaatttaagtgatattagaagtaaaagatttttggtttatagtgaatatataaagtggataaagaagttttttttttattttatgtatgtttataatattattttgattaaatatttaaattgggattgttaagtattaagatttaaaaatatttgttttttgagagataaaatagatattattagttgaaaataatgttttt

SEQ ID NO: 3646 - DNA, 2339 bp, Artificial Sequence
  chemically treated genomic DNA (Homo sapiens)
ggggatattatttttaattagtagtatttgttttgttttttaaaagatagatatttttaggttttggtgtttggtagttttaatttgaatatttagttaaagtagtgttgtgaatatgtatagaatagagagaaagtttttttatttattttatatatttgttgtggattagaggttttttatttttagtgttatttgagtttagtttgatttttgtagtttgtattatgttggtagaattttttagaagttatgatatgaagatagtaaaatgtggtttttgttttttgggaatttattgtttagaaaggagggtagatagaagtatagattattttatttttagggtaaaatgtagttagggtttatggaaggtttaattagaaatgttttttgggtagttgtgtttgttttgaggagagaagggtggtgtgaaggttgttaggggaagggaaattattttttaggtggaggtagatatgtgagtaaagataaagagatgtgaattagttgggtgtgtataggaaatattttggtattattagggtatgagttataagtgatagaggggtgggaagtgaggagaggaagtttttaagttgaatattaagtattattttgtaggttatggagaattatgagaaagttttaaatggggatgtaaaatgtatgtagaatatggtttaaattttaatattttttgatgattaaaaatatatatggattatagaaaattaggaaaatatagaaaattatagaaaaaaatgtataattttattattgaaagataattagtattaatattattattgtgttgttttttttaataattttttatatgtatgtgtgtgtaggtatatatataatgtatatgtatgtatatgtaatatatataatgtatgtatatgtggtagtgatttttttaataattttttattgtataaatatatatataatgtatatgtatatgtaaattaatgatatgaaaaatgtatttttttaatagatgatttgtggaagggagagagtagtatgttggaggggatgatttggtaagtttgttgaagaatataagttttgattgttttttggtgtggaagaaggaaggtgataaatattgtaatggaggatgaggaaggagtattgagttttatgtggaaagaaagggttaaaaagaggaaaatgtttatttatatgtatggtgtttaatagatttattaggttgtttgttgtgtgatgtaaatttttttttttttttttttgaaattttttgagtgaattttatattgtttatttatttatgtttatgtgttagtaagttttgggagtattgtaaaaataaaaaaggttagattattgttagatatttgggaaatatttatgttagagaaggattatatattaatttattttatttatgggaggtaaatattatgattattgaaggtatatttttttttttatggatggagtatattttatttttttaaaatttgtatttgaatttatttatttttaattgttaaaaatgtgaagtgagaaatttaaaaattttttagttttttttgttttattattttatgtatttttaggttgttaaataatttggaattttagatttagataattttttaatgtatattatagattttttattttaataattagtttatattttaattaaattgtataattgtattaaaatatatttaattatgtttttttagttttattatttggttttttatttaggaaatatttatgtttgtgtgtatatatagttgtttttttagaattttttagtttgattgtatttttatagattagataatggtatttgttttatttatttatttatttttaagatagttttattttgttatttaggttggagtgtagtggtgtaattttagtttattatgatttttattttttgggtttaagtgatttttttgttttagttttttgagtagttgggattataggtatgtattagtatgtttagttaatttttgtatttttagtagagatgggtttttattatgttggttggttaggtttgtttggaatttttgattttaggggatttttttgttttggttttttaaagtgttggaattataggtgtgagttattatgtttggttagtatatgtttttgggtaaaatttttttagaaagagtgaataaattatgataattgatttttatttagtattttttatgtgttagttattattttttatttgtattaatttatttaatttagataataattttatgagtaagttattattatttagtagtggtttttgggatgggtggaaggaaggatgatga

SEQ ID NO: 3647 - DNA, 2463 bp, Artificial Sequence
  chemically treated genomic DNA (Homo sapiens)
gatttttttgtgagggggtgtatttataagagggattggatggagtggttggtttgtagagttttagttagttgtttgatgtggttggggttggatatgatgtttaggttaaggttgagttgtgttagggatgtggttttggttagggtttggtagatgtggttaaagttgtggttgtagaggtggtagttgtgtagtgagagtaggtgtatggtgttgttgtgaaggttgtggtagatgttttgtattttggtgttggatagtggtttttttgaaatttggatggagttgggtagtattgtgtttatggttgggtttttgggtatggggttggaatggaggttggtggggttgtgggtggggttggggatagggttggggttggggttttggtaggggttgtgggtggagtggggttgggggtggaggtggtggttgtggtggaggttgtggttgtggtggaggttgtggtgggggtggagaagagttattgggattgagttggagttggttagaggtgtggaggtgtttagggtgtgggttgggttgaagtggggtggtgttggggtgggggtggtttgtatggtttgtgtttgggtgttggggtgggtgtgtgttttgggggttgggtaggtgttgtttggtgtttgtttttgttttttgtggttgtggtggtggtggtggtagtggtagtgagtggtttaagggttttggtttattggttttggttaggaggttgtatttgttttttttttttttgttgtttggttttttttgattattttgtgggtttggttgtatggttggtagagagagtttgaggtgggtggttggtggtagttttggttttagttttagagagtgagtgggtggtgagtttttatggtaatggttgtgttattggtgtttgttttgttttttgtttggttaaggttatgttggtttgtgaggtttgtgtatattgggtggtttggggtaaggagttgggagtgataggttgttttttttttgggagtggggttagttaattggtaggtggtaggtggtagggttgagtgggtagggttgatggggagtggaatggaggtatgttttgtggagatggtgttgggtatggttattgttgtttttgtttatttttttatttttttttgtttttaaggtttatatttttgttggaatttagggtattgtttttttttatttggaaggttttagggtttttttatttgtgttgtgttttgtttttgtttttgtgatttgaggtgtagtgtgtgtggtgattttggtttatggggatttttttgtttgttttttgttaagatggtggttttattagggaggttttaggggttatggttgggtagagttagtttgagttgttggggagaagggtattttatagggtttttagggtaggggagttttagatagatgtaaggttttggtgttatatttttttaggtatgtagggtattgttgatatttgagggtgtgtttgtgttgtgagattggggtagttaatataaagaaggtgttagggttagggttttggagtattggtgaggatgtgaaggtggttgagttatattgtatggtgtaggtggtgttgttttaattttgttttttggttagggtggtgggggatttatttgtgtaatgtaggataaatgaagggtatttttgtttgtttttttgttaggagggatagatgttgttgatttagatttattagtgttaagatgattattttatataaaatataatatttaatatagtgaagggaggttaaaggttttatttttatttttagttatttgaattaatttattaagtggagtatattaaagaggtggtgggggtggatggtgttatgttaggagtggtggttggttttaagaggaaagatagaaaaattaaaaggagttggttttagtattattaaggtaaagttaaatttggttttaattaagagttttataggaaaattattaatataatgtttaggtgtagaagatttttgttttgatatggggtttaagttgggatgttttgtttaattgttattgtttttttggttttttaagagagtagttgagtttagatttaagttggttgtagtgttttattaggtttatggtttttgtgtttgaggtttttttgttgttttatgggttaggtgtgatatttaattattgttttttatgtagtttggtttgttttatttttattttgtttgggtgaggatatgaagaagggaatatatgatattattattgttgattgagtaggaaagtatataggaagtgggatgatagggaggattattggattagttgttgtagttttagattttaattaatattttaattattaagtttatatttagtaagataatgtgggagagataaagaggaaggaaggggtaggtggggaggggtttttaaaggagttgatttattt

SEQ ID NO: 3648 - DNA, 2463 bp, Artificial Sequence
  chemically treated genomic DNA (Homo sapiens)
aaatgggttagtttttttgagaatttttttttatttatttttttttttttttttattttttttatattgttttgttaaatatagatttggtaattaaaatgttgattgaagtttggaattgtagtggttgatttagtggttttttttgttattttgttttttatatatttttttatttagttaatagtggtaatgttatatgtttttttttttatatttttatttaggtaagataaaggtgggataggttagattatatagaaggtagtgattgaatattatatttgatttatgaagtggtagggaggttttaagtataaaagttataagtttgatggaatattgtagttagtttgagtttgggtttagttgtttttttgggaagttaaggaagtagtgataattgaataaaatattttgatttaaattttgtgttaaaataaggattttttgtatttgggtattgtgttgataatttttttgtggagtttttaattgaagttaaatttggttttgttttggtggtattggggttagttttttttagtttttttgtttttttttttaaaattaattattatttttaatatagtattatttatttttattatttttttaatatgttttatttaataagttaatttaggtggttaagagtgggaatagggtttttgatttttttttattatattgaatattatattttatgtaaaataattattttaatattagtaaatttgggttagtagtatttattttttttaataaagggataaatagaggtgttttttatttgttttgtgttatataagtgagttttttattattttggttagaggataaagttgagatagtattgtttgtattgtgtagtgtggtttagttgtttttatgtttttattagtgttttagggttttggttttggtattttttttgtattggttgttttagttttgtggtatggatatatttttagatgttaatagtgttttgtgtatttgagaaggtgtggtattaggattttgtatttatttgaggtttttttgttttagggattttatggggtatttttttttttagtagtttaagttggttttgtttagttgtggtttttggggtttttttgatgaggttgttattttggtgaggagtaagtggggaagtttttatgggttgggattattatgtatgttgtgttttgagttatgggggtgggagtgaggtgtggtgtggatgaaagggttttggggttttttaaataggagggaatagtgttttggattttggtgggggtatggattttaggaatggggaaggatggaagaatgggtagaagtagtagtaattgtgtttaatgttatttttatggggtgtgtttttattttgttttttgttagttttatttatttagttttgttgtttgttgtttgttagttggttgattttatttttaagggaagagtggtttattgtttttagttttttgttttgaattatttagtgtatgtgaattttgtgggttggtgtggttttggttgggtagggggtggggtgagtgttggtgatgtggttgttgttatgggaatttgttgtttgtttgttttttggagttggagttggagttgttgttagttgtttgttttaggttttttttgttagttgtgtggttaggtttgtggggtggttggggggagttgggtggtagagaaggagggagtgggtatggttttttagttgagattggtaagttgaagtttttgagttgtttgttgttgttgttgttgttgttgttgtgattgtgagggataaggataagtgttgagtagtgtttgtttaatttttggaatgtgtatttgttttaatgtttagatatggattgtgtgggttgtttttgttttagtgttgttttattttagtttggtttgtgttttggatgtttttgtatttttggttggttttggtttagttttggtagtttttttttgtttttgttgtagtttttgttgtagttgtagtttttgttatagttgttgtttttatttttggttttattttgtttgtgatttttgttggggttttgattttggttttatttttggttttgtttgtggttttattaatttttgttttggttttgtatttggaggtttagttgtgggtatgatgttgtttagttttatttagattttgggggagttgttgtttggtgttgaggtgtgggatatttgttgtggtttttgtgataatgttgtgtgtttgtttttattgtgtggttgttgtttttgtgattgtgattttggttgtatttgttgggttttggttggggttatgtttttggtgtagtttaattttaatttgggtgttgtgtttagttttagttgtattaagtagttggttgaggttttgtggattaattgttttatttagttttttttgtgagtgtgtttttttgtaagggggtt

SEQ ID NO: 3649 - DNA, 2458 bp, Artificial Sequence
  chemically treated genomic DNA (Homo sapiens)
atatgaaattgttgtttaataggtgaagatgtttatgattttgtgttatttttggtttttaggtttagtttttttttattgtagagagaaagagagaaattttatatatatatatatatatttatatatatttttttttatatatttagatttagtatttttgtataaaggtttatttttttttttttatttttatagtttttttttttttttttatttttttatggtttttagtgttttattttttttatttagaattttttaaaggaagaatgggggtgttggtggttttgggatgggtaattgaggtttggtttagggtttgtttttttatgatagataaaattattgaagtgattttattgttgtttttaattagaggggagttttaaaagaagttatgggatttggggtttttggagttgtatttggttaggagggaggtgagggtgaggagattggttttgggttatatttttttagagatggtgttagttttattttgtggttatgagattgaattgttttgggtttaggtttgggatgtttgggttaggtttagttatttttttgggttgttgttgttgggatttggagatgaataaagaattagttttaaattgttttttttgatatgttaggtaaatatgtgtaaaaggttagttttatgttgtggagtagagatttgttttttaggtattaaaattttttttttttaattgtgtttgagagtttttgatttttgggttttgtttaggtggttttgtattttttggtttttttaggggtggggtggaggtgtttttttttggagtttttttattggttttgtattttatttatttttgggttataggatttttattttaatgtttattttttagttgatttaaaattttttgggatttgttttagaattttggttaaggttgggggtttttgtgggtagtttttttggtttgttttgttttgttgagaatttaaataaattagatgaagtttttaatttttaagtgtattttttttggttttttttagatggtggaaatagggtggtgattaattttttagagtggaagatatgtatgaagggtgtatttgtagttttttgggatttaggtgggggttgttgtgtttttttaaaagtgagtggtggttttagtttgttattgttttgttttgttagtttggaggaaattttggttggaggtgattttgggtttagttggatgggttgggttgagtttaggaggggttggtagatgtgttttagggttagggtggggtgtagggagtgttgtttttatttttagtatttttggggtgggggatttgagtgtgtggagagtgggaggtagagttgagagtggggttaagtgtgaagttaaggtgttgtatagggttgggtgggaatggatagggtgagttggaagtgaagtattttagttaggttttaggagagaggattgttggtatttgtgtatattttagtgggtggatgatgtgggagagaggtggagggaggtgaaatgtgggagttagaatttagttttgtagtgaggttatttggggtttgtatttagttttgatatatatatgtaggggttgtgtgattttggggaagttattgattttgtttgaatttttgttttttggtttgtaaagtggttaattggtgggaatttaataggagaatgtgtgtaaaatgtttagtatagtgtttggttaataatgtgtttttaagaaaggttgttgagttttgtttaggatggtttatattgttttatgtttaagatgagtttatagtgtttaagatttgtttaatttaagatgatgtaaattgtattgttttttttagatatgtagtagttaggagttggttatttgtattttttgtgattttttttttagaattttagttttgttagatttgtgtttttttttggttttttaaatatttgttgtattgtttagagtttttttttattttgattttttttgtagttttgtattagtgagattgtgttttgtggtattttgggggtgttatgattggtgggggatgggggatgttttttagttttatttgttttttgggttttagataattattttggagagttagttgtttttagtgtgggtaggtttaaggttattaattgtatttggtgatttatttttgtttttaagaggttttggaaagtgtggttttgggttttttttgaaatagagatttgtggtattttgtttttttttttgggataggagagggagagttgtgggagttttgtagttatttttggtgttgttattatgaagtaggtttattagttaatagggtttgggatattgagttgtgttgtaaatttttttgtgttttatttaatgagggaagtttgagttgtggtgaggggtgggatgatttggtgttgggttgagtggagtttttagttttagg

SEQ ID NO: 3650 - DNA, 2458 bp, Artificial Sequence
  chemically treated genomic DNA (Homo sapiens)
tttgaagttgggagttttgtttaatttaatattaggttattttgttttttattgtagtttaggttttttttattgagtggggtatagaaaagtttgtgatatggtttagtgttttaggttttgttagttagtgaatttgttttgtggtggtagtgttaggagtggttgtggaatttttgtggtttttttttttttattttagggggagaagtggggtgttgtgggtttttgttttaaaagagatttgaggttgtattttttgaggttttttgggaatggaggtgggttgttaagtgtagttagtggttttgggtttgtttgtattgagagtagttggttttttggaatggttgtttggaatttggagagtggatgaagttgggaggtattttttattttttgttaattgtggtatttttgaggtgttatggggtgtagttttgttggtgtggagttgtggaggaggttggggtggggaaaggttttgagtggtgtagtaggtgtttgaggagttagggaaggatgtaaatttggtaggattggggttttgaggaggaaattgtgggaggtgtagatgattagtttttggttgttgtgtgtttaagaagggtaatgtagtttatattattttaaattgaataggttttgggtgttgtgaatttattttggatgtggggtggtgtagattgttttggataaggtttagtagttttttttgagagtgtattgttggttaggtgttgtgttaagtgttttgtgtatatttttttattgaatttttattaattagttattttataaattaggaaataggagtttagataaggttggtaatttttttaggattatatagtttttatatgtatatattggagttgaatgtagattttaagtgattttattgtaaagttaaattttagtttttgtattttatttttttttgttttttttttatattatttgtttgttaggatgtgtatagatgttgatggtttttttttttaaggtttggttggggtgttttgtttttagtttattttgtttatttttatttaattttatgtggtgttttagttttgtgtttaattttgtttttagttttgttttttgttttttgtatgtttaggttttttattttaaaagtattgagggtggagatggtgttttttatgttttattttggttttgggatatgtttgttagttttttttaggtttggtttggtttgtttggttgggtttgaggttgtttttagttagagttttttttgagttggtgaggtgaagtggtggtaggttgaaattgttgtttatttttaagagagtatagtgatttttgtttgaattttggagagttgtaggtgtgttttttgtgtgtgttttttattttgaaaagttagttattgttttatttttattgtttggaaaaagttagggaagatgtatttaggagttaaaaattttatttaatttatttaaatttttagtaaaataaaataaattaaaaaaattatttatagaaatttttagttttgattaagattttaaggtaggttttagaaagttttaaattaattaaaggatgggtattgggatgaaagttttgtagtttagggatgaataaaatgtggaattgataaggggattttagggagaggtatttttattttatttttgggaaggttgagaggtgtaaagttgtttggatagggtttaggggttggaggtttttgggtatggttagaaaggggaggttttggtgtttgggggataggtttttgttttatagtgtggagttgattttttatatatatttgtttgatatgttagagaagatgatttaaaattggttttttgtttgtttttaagttttggtgatagtagtttgggagggtaattgggtttggtttaggtgttttaggtttagatttaggataatttgattttatagttgtggaatgggattggtattgtttttgggagagtgtggtttgaggttaatttttttatttttattttttttttggttaggtgtggttttgggagttttaaattttgtggttttttttaaagtttttttttaattagaagtagtggtgaaattattttagtgattttatttgttatgggaaagtaaattttaaattaaattttagttgtttattttagagttattaatgtttttattttttttttaaaaagttttaaatggaaaagataaagtgttggaagttatagaggagtgggagaggggaagggaattgtgaaagtaggaagaagggggtggatttttgtatagaagtgttaagtttgagtgtgtaagagagagtgtgtgtgagtgtgtgtatgtatgtgtagagtttttttttttttttttatgatgggaggagattaaatttagaagttagaagtgatatagaattatgaatgtttttatttattgagtaatagttttatgt

SEQ ID NO: 3651 - DNA, 2656 bp, Artificial Sequence
  chemically treated genomic DNA (Homo sapiens)
attatattgaatttaattttttttttaattattaaggattttagatttattgttaattttttttttgtatttatttttattgtttagttttgggttaaaagatagtggggtttgaatgaagtgtttataaagtatagtatttggagaagttttgttgttgttttttaaaataatttttttaaaaagggattttggatattttttttgtttttttaaaaaattttttttttatgtatgagaaatatagggaaaaaaagtaattaggttaatgaattattttggtttattggattttaattggtagagaatttaaatttaaaaattaaataaaatgaaagagttttttagttattttatgttgtaaatgagttaaaagttttgttatttttgaaaaattaaagagtattatttgtatatggttataattgtaaaggaaataatggtgtatttaggatagggggagtttattttaagaagttgtgtttttttggattatgtttttttggggttgatttttttggggagtttggtttttaaagtgtggattttgtgatgtgtggtttgtaggattgtggggtttggtggttgagatgtggtatttataggggtttttttgtgtggttgtggtggtggtggtgggaatttgggattggttggtgaggggttttgtatggtaattgtttttgattgtaagttataggttgtgggtattgtgtagagtgtattttttattgaattttttttattttattttaatttttgagattgaaagtgtggagtgtggagttttgtaaatttgattttgagttaaggtgtgtgaggtgatggtgagtgttttttgggttttttgtagttttggggttggaagttttggtttttgtgtattttgttttttgtttgtttgaaagtgaaatttggttggtgggtaggaggggagagtttggttttgagttttgtttggtggggttttggtttggaggtatttttgatttgtatttggtggtgtgatttatttatttgtttgtttttaaggtgttgttaggagtaatagtagtagtggtggtagtggtagtggttgtagggttgggtggttgggagtttgtatgggtggtggggttgggttatatgttggggggtagtagattgtttagttttatgtttgttggggttaagtgtggttgtgtggttttagttttgtgtttggggttttgtgtgttatgttttaggtgatttgagttttagggtgtttttgttatagttgtgttttttaggtttttttagaaattaagggtgagtgatttgtggagtttttatgtgtgtttttttggttatttagttggatggtagtgtgagggtagtttttgtggatttatagtttttagttatttggttgttagttttgagagtttgagagtttttattttttggggtttatgtttagattaattaggttattaggtaggtaaaatttttttttggtaatgagtgaggtgagtgtattgtaaagagattttggtatttaggttggtttgatggttagttaaagtttaatattggaagatggatgaaatagagtgttattttttgatatatagttaggtatttagttgtagattttatagttatgtattatttaagatgataggattattttttgagaaatgttttaggtgagttttttgtgtgaatattttagagtgtatttatatttatatggtatagttttttatatgtttatgttatatggtataggttgttgtttgtttttaggttataaatttgtatggtaagtgattatattgaatattgtaagtaattgtaatataatggtaaatatttgtgtatttaaatatgtttgaatgtagaaaaggtatagtaaaagtatagtatgaaagattttaaaaatggtatatttgtatagggtattttttatgaatggagtttgtaggattggaagttgttttggttgagtttgtgagtggtgagttaatgtgaaggtttaggatattattgtgtattattataggttgtataaatattgtattatatttaggttatgttaaatttattaaaaaattatttttttaataataataaattaattttagtttattatgattttttattttttatttttaaattttttaaattttatttatttatttatttttgagatggagtattgttttgtagtttaggttggagtgtagtggtgtgattttggtttattgtaatttttgttttttggttttgatgattgttttgttttattttttagagtagttgggattatatgtgtgtgtttttatgtttggttaatttgtttgtatttttagtatagattgggttttgttatgttggttaggttggttttgagtttttgatttttggtgatttattttttttggttttttaaagtgttgggattataggtgtgaattatgatatttgatttaaattttttgatttgtaataatgtttgatttaaaatataaatatattgtgtagtagtatgaaaatattttttttttgtattttttttataagttttttttatttttaaatttttttttttttttattttttttttattttttaaatttttttgttataaattaaggtataattatatatattagtttaggtttgtataggg

SEQ ID NO: 3652 - DNA, 2656 bp, Artificial Sequence
  chemically treated genomic DNA (Homo sapiens)
ttttgtgtaggtttaggttaatgtgtgtggttgtgttttagtttataataaaaaagtttaaaaagtaaagaaaaaataaagaaaaagaaaaatttaaaaatagaaaaagtttatagaaagaatataaagaaaaaatatttttatattgttgtataatgtgtttgtgttttaagttaaatgttattataagttaaaaagtttaggttgggtgttgtggtttatgtttgtaattttagtattttgggaggttaaggagggtagattattggaggttaggagtttgagattggtttggttaatatggtgaaatttagtttgtattaaaaatataaataaattagttgggtgtgggggtatatatatgtaattttagttattttggagggtgagataggataattattaaaattggaaggtagaggttgtagtgagttgagattgtattattgtattttagtttgggttatagagtaatgttttattttaaaaataaataaataaataaagtttaaaagatttaaaagtagaaagtaaaaaattatagtaagttaaggttaatttattattattgaagaaataattttttaataaatttagtatagtttaagtgtaatatagtgtttatatagtttatagtagtatatagtgatgttttaggtttttatattgatttattatttatagatttagttagagtgatttttagttttgtaagttttatttatggaaagtgttttatataggtgtattatttttaaaattttttatattgtatttttgttgtattttttttatgtttagatatgtttagatatataaatatttattattgtgttataattgtttgtagtatttagtatggttatttgttgtataggtttgtagtttaggagtaaataatagtttgtattatatagtgtaggtgtgtaagaggttatattatataggtgtgagtatattttaagatgtttatataagaaatttgtttaagatattttttaggaggtaattttgttattttaaatgatgtatgattgtaagatttatggttgagtgtttaattgtatattgagaaataatgttttattttatttgttttttgatattgaattttaattgattattagattggtttgaatattagaatttttttgtaatgtatttgttttgtttattattagaaggaggttttatttgtttagtgatttggttggtttgggtatgaattttgagaggtggaaatttttagatttttaggattgatagttgagtggttggggattataaatttgtgagaattgtttttgtgttgttatttagttgggtagttgggggagtgtgtgtgggggttttgtgagttgtttgtttttggtttttggggaagtttgggggatgtggttgtggtggaggtgttttgggatttaggttgtttggagtgtggtatgtagagttttaggtgtggagttgaggttgtgtggttgtgtttggttttagtgggtgtgggattgagtagtttgttgttttttgatatgtgatttagttttgttgtttatgtgggtttttggttgtttggttttgtggttgttgttgttgttgttgttgttgttgttgtttttggtggtgttttggggatgggtaggtaggtgggttgtgttgttaggtgtgggttggggatgtttttaggttggggttttgttaggtagagtttgaggttgagttttttttttttgtttgttggttaggttttgtttttgggtgggtagaggatgaggtgtgtggaggttggagtttttagttttggggttgtagggagtttgggggatatttgttgttgttttgtgtattttggtttggggttaagtttgtaggattttgtgttttgtatttttggttttgagaattgaggtggggtggggggagtttggtggggggtgtgttttgtgtggtgtttatagtttatgatttgtggttggggatggttattatgtggggttttttgttggttagttttaggtttttgttattattgttgtggttgtgtggaggggtttttgtggatgttgtgttttggttgttgggttttgtagttttgtaagttgtgtgttgtgagatttgtgttttaaaagttaaattttttgaaagggttagttttgaaggaatatgatttagaaagatgtagttttttaaagtaagttttttttgttttgggtatgttgttgttttttttgtagttatgattatgtatagatagtgttttttgattttttagaaataataaaatttttaatttgtttatgatataaggtaattgaagagtttttttgttttgtttggtttttaagtttaaattttttattaattggaatttagtaaattagaatgatttattaatttgattgttttttttttttgtattttttgtatatgagaaaaagattttttaaaaaaataaaaaagatatttgggatttttttttaaaaaaattattttaaaaaataataataaagtttttttaaatattgtgttttgtagatattttgtttaggttttgttgttttttaatttagaattgaatagtaagagtgaatgtaggaagaaagttgatggtgaatttggagtttttggtagttaaagaaaaagttaaatttaatatagt

SEQ ID NO: 3653 - DNA, 2242 bp, Artificial Sequence
  chemically treated genomic DNA (Homo sapiens)
ttatatatattatatattttatatattatatatattatatattatatatttttatatattatatattttatatattatatattatatatattatatattttatatatattatatattttatatattttatatattttatatatattttatatattttatatattatatatattttatatattatatattttatatattttatatattttatatattatatataatatatattttatattttatatatattatatattttatattttttatatatattatatattttatatttttatatatattatatattatatatattttatgtatattatatattatatatattttatatattatatattatatatattttatatattatatattatatatatttatatatattatatagtatatatatttatatatattatataatatatattttatatataatatattatatatattttatatattatatatattttatatatattttttatatattttatatatattatatatttttatatatatattttatatatattatatatatttagagagagaaagagagaatttgggtattgtgatttatgtttgtaattttagtattttgggaaattgaggtaggaggtttatttgagtttgggagtttgagattaatttgagtagtatagtaagattttattttggaaggagggagggaaggaaggaagggaaaaataatatttaagtgaatgaatgaatgaatgagaaatagagtgaagatttgtgtgtttaggatttttaattttttttttgatgattagtgttgtttggtggtgaagtttgggtgtgtattatgtgaagatagtaggtagtgtgtaagtggggttttggttggggaggtgggtttaggaggtgttttttgttgtagtatttattgatatttgtgtgttggagaggggaggggagtttgggtgttggttgtgtgggggtggggtggtgtggtttgggtggtatagtggtgaattttgtggtggttgtgtgttgtttatgttgtttttttagttgttgttatttttgtgggttttttttatttaaggggaatggagttgttattttttgttgtttttatagtaattgtagttttgtgtggggagtgagttagtgaattaggtttggtttgtgtttggttttttgggatatgttggttgtgtggggtagaggtggaagaataggggtttggaggaagagggagaaataggtgatatgattatgtgtttatttattatgtgtttatttagtaaatggatgtttgttgtgtgtaaggttttgtgttagttggggttatggtggtgaaaaggaaaatttataaaattttgagtgtttattttgtgttaagttttatgttagggaaaggatttttttattgttgtaagaaggttaaatgtttgattggttgtttaagagtttatatttgtgttatttgtgtagattgttagttttgtttgaggaataatagggagaggagttgtgagaatagtaatagttttagtaaagagttgttttgtttagtttagtttgggatatatatattgtggtattaggaaaatgtttaaagagttgaaattttgtagtttatttttgttagtgttttttttattttttttaagatttttttattatgtgttatgtttaaattattgggtgtttttaatttattatgtatgaataaaaagaattgttattaattgaatattataattatggattaggtattatgtaaggtattttatgtagattatttaatatttataataatttttagaggtaaatattattttttttttagatgaggaaattgaagggtagagaaattaaagatatttattttaggttatatatataggaatttaaatttattttaaggattagaaaatgaaagagagagagagagtttaaatttagttttgttttattttataagttttataattagttatattattgtgaaagatgaatgtgtgggatattgtaatttggagagaaatttttttttttttttgagatttttgttttgaagaaatatttttattaaagttatgtaatatattaatgttttgaaagttaatagtttttaaatgtaggaataaaaaattaaatatttgtatgtttttatatataagtaggagttaaatgaggagaatttatggatataaagaagggaataatagatattggggtttatttgagg

SEQ ID NO: 3654 - DNA, 2242 bp, Artificial Sequence
  chemically treated genomic DNA (Homo sapiens)
ttttaagtaggttttagtatttgttgtttttttttttgtgtttgtgagttttttttatttaatttttatttatatgtgagaatatgtgggtatttggttttttgtttttgtgtttgaaaattgttaatttttaaagtattaatgtattatatggttttaataaaaatatttttttagaatagaaattttgaaggaaaaaaaaagtttttttttagattgtaatgttttatatatttattttttatagtgatatgattggttatggagtttgtggaataagatagaattgggtttgaatttttttttttttttttgttttttaatttttagaatgggtttgaatttttgtgtgtgtgatttgaggtaaatgtttttgatttttttattttttagtttttttatttgaggaaagaataatatttatttttgaaggttattgtgaatattagataatttatataaagtgttttatataatgtttggtttatggttatagtgtttaattaatggtagttttttttatttgtatatgatgagttaggaatatttagtaatttggatatgatatatggtagaaaagttttaggaggaatgaaggaaatattggtagagatgagttgtaaaattttaattttttaaatatttttttggtgttataatatgtatgttttagattggattggataaagtgattttttattggggttgttattatttttataatttttttttttgttattttttagatagagttaataatttatataaatagtatagatgtgggtttttggatagttagttagatatttagtttttttgtggtagtgaaaaaattttttttttggtgtaaagtttggtatagggtaggtatttaaaattttgtaggtttttttttttattgttgtggttttaattagtatagggttttgtatatagtaggtgtttatttattgaatgagtgtatgatgaatgagtgtatgattatgttatttgtttttttttttttttttaaatttttgtttttttgtttttgttttatgtagttagtatattttaaggagttaggtgtaagttaggtttggtttattgatttgttttttgtgtgaggttgtggttgttatggaaatagtgggaaataataattttgttttttttgggtgagagaggtttgtagaggtaatagtagttggaggaatagtgtgagtggtgtgtagttgttgtagagtttattattgtgttatttgagttgtattgttttgtttttgtgtggttggtgtttgagttttttttttttttttagtatgtgagtgttggtaggtattatggtggagggtattttttgggtttgtttttttaattagggttttgtttgtgtgttgtttgttgtttttatgtgatgtgtatttgagttttgttgttaggtggtgttgattattggggagggggttaggggttttagatatgtgagtttttgttttgttttttatttatttatttatttatttaaatgttattttttttttttttttttttttttttttttttgggatggggttttgttgtgttgtttaggttggttttaaatttttgggtttaagtgagttttttgttttagttttttaaagtgttggggttataggtatgagttatggtatttggattttttttttttttttttgaatatatataatatatataaaatatatatataaaaatatataatatatataaaatatataaaaaatatatataaaatatatataatatataaaatatatataatatattatatataaaatatatattatatagtatatataaatatatatattatatagtatatataaatatatataatatataatatataaaatatatataatatataatatataaaatatatataatatataatatatataaaatatatataatatataatatatataaaaatataaaatatataatatatataaaaaatataaaatatataatatatataaaatataaaatatatattatatataatatataaaatatataaaatatataaaatatataatatataaaatatatataatatataaaatatataaaatatatataaaatatataaaatatataaaatatataatatatataaaatatataatatatataatatataatatataaaatatataatatataaaaatatatgatatataatatatatgatatataaaatatataatatatataa

SEQ ID NO: 3655 - DNA, 2371 bp, Artificial Sequence
  chemically treated genomic DNA (Homo sapiens)
atatataaatagatagttttagtgtagtggatatatatggtaatagaggttttaagatgtataaaaggttgtaggggtttaaaggatggagaaaggatattgattttttttttttaattttttaagttatttgtttattttgtttttttttttttgagattaaatatttttatttttttttaaagatttaattttgttattatggtgtttaattttttttttatattgtgatgttggggaaagttttggggtatttttgtttttttgtgaatttttgaagttttattttaaaaaatatatatttatttttttgtttattgtaaattttgatatttgtaaatattgataataggaattttgaaaaaatatatgtttttagaaataagtaagtaaataaaaatatgtagaatgttagagtttttttttattttatattttttttttaaattgatgttaaggtgggtttagtgagggttagtgatggaatttgtagtttgagaaagatatggtagaagtataaggttagaggttgtttttgttgttttattaaaaataataatttttttttaaatttggattgaaattgatatttaatgttaagtgtgattttagtttaatttgttttggtagatatgtatatattttttatgtgtattattttatgtgattgtgtttatagttttgtgagttgagaggggtgggagtgattatttttaattataagtaaggtttttgggttttaagggttggagattatttagggtttggttagtattagaattaatggtttttaattttaaattaaatgatggtttatgttatattataattttaaataaatgaattgtgatgtgttttatttttttgtgtaagtggaagatgttaatatatgtgtattatgagaaaggattttataattttttttttttgggttttgttgagatgtttttttgatttagagagaattttttaggattagtaagaaaagtatgttattattttttaaattttataatttaggaaatagtttattattttataaaattataaaagtgaattatttgagtttttttattatttgtttttttttttttaagttggttttgtataaatatgatgtatgtttattgggtgataagtttgttgtaagtgaaatgtttataggtattataggaatgatttggtgttttgtttattttattagaattttaattggggtgtgtaggagaggattttataaatggtaaggtaatttttggtagtttgtttgttagtattgtttgtgttatttttagaggagtttgagaagaggtagaggaaggtgaaatatggttggtgagtgtatggtattttttttattaggtttttgttagaagtttgtgttttttttgggttagtttgttaagttagagtgtttggttaggatagttgtttgttttgggggttttgaaggttagattttttattttagggtgttagttagaggtggtttttttttagtggtggttgggtttttttagtatatttttggggtagaatattattggaatgtagttttgaataatgggtagggtgtttagtgtagttggatattgtatttttttaggtagaggataagttttgttttgtttgtgtttgtgttttttttatatatttgttgttatttgtaaagttaaagtagataggatttgggttttgtgttttttagtgtagttgtatttagttgttagtagtgttagtaaagaagtatattttagaattattagggagtgagagtggtaatatgtaagttgatttgaaagaaattattgtttattttaaattaatttatttaggagtattaggaatgtttttaagtaagttatatattagaagtattagataggttttgtgtaagtgatttgatgagttgaagtttttttgtagtaggagtaggtgtgttataagatgttttggtttataggagagtattagggaataggggttataaagaataataggaagtgtaggtttttttattttatgtttattgttgaggatatgggtttttgttaattagtatttttgttaagtagtatgttaattattatttgttttgtgtgtttagtttagtaggttgatagggatgttaaatttaaataagatatgagttaaatttgtaaaatattgtgaatggtgattagggttgttggaagattggttaaagatattattgagttaaatgtaataggtaaatgttggttattttagaagttataaaaattgggataggtgattgtatattaggtttttttttttgttttttattttttgttgtaatgtatagtatggttgggatgttaagaagaggagttttggattttatatattg

SEQ ID NO: 3656 - DNA, 2371 bp, Artificial Sequence
  chemically treated genomic DNA (Homo sapiens)
tagtgtgtagggtttagagtttttttttttagtattttagttatgttgtatattatagtaaggaatgggagataggggagggggtttaatgtgtaattatttgttttagtttttgtggtttttgaagtagttagtatttgtttgttgtatttggtttagtgatgtttttggttaattttttagtagttttaattgttatttataatattttataagtttgatttatattttgtttggatttggtgtttttgttaatttattaggttgagtatataagatagataataattagtatgttgtttagtaggggtgttgattaataaaggtttatatttttgatagtaagtatagagtgggggaatttgtattttttgttgttttttgtaatttttgttttttggtgtttttttgtggattaggatattttgtggtatatttgtttttgttatggggaggttttagtttattaagttatttatatagagtttgtttgatgtttttgatgtgtagtttatttaggagtatttttaatgtttttaagtaagttgatttgaaataaataatggttttttttaaattaatttatatgttattatttttattttttggtagttttgagatgtgtttttttgttgatattgttgatagttggatatagttatattgagaaatatgagatttgagttttgtttgttttggttttatgggtggtgatggatgtgtaaaagaaatgtaaatataaataaggtaaagtttgttttttgtttaaggagatgtgatgtttagttgtattgaatattttgtttattatttagagttatattttaatgatgttttattttaagaatatgttagagggatttaattattattgagaaagagttgtttttggttagtattttaaaataggaagtttggtttttagagtttttaaggtaggtagttgttttggttggatattttggtttggtaggttggtttaggggaagtataggtttttggtaaggatttgatggagaagatgttatgtatttattagttatgttttgtttttttttgtttttttttaggtttttttgggaatggtatggatagtgttgatagataggttgttaaggattgttttattatttatagaatttttttttatatattttaattagaattttaatgaagtgggtgaggtattaggttatttttgtagtgtttgtaaatgttttatttatgatagatttgttatttaatggatgtgtattatgtttgtataagattagtttggggagaagggggtagataataaagaaatttaaatagtttgtttttataattttataaaatgatggattattttttggattgtagggtttaggaaatgatgatatgttttttttgttgattttgggaagttttttttgaattaaagaaatgttttagtagaatttagaagaagaaaattgtgaggtttttttttatgatatatatgtattagtattttttatttgtatagggaagtgagatatattatagtttatttgtttagggttgtagtgtggtataaattattatttgatttggaattagaagttgttggttttgatgttggttgagttttgggtggtttttaatttttgaagtttggaagttttgtttgtggttggggataattatttttattttttttaatttataaagttgtggatatgattatatgagatggtgtgtatgggaagtgtatgtatatttattagggtaggttaaattgagattatatttggtgttgaatgttagttttagtttagatttgggggaaaattgttgtttttaatgaggtagtaggaatagtttttaattttatgtttttgttatgttttttttagattgtaggttttgttattgatttttattgggtttattttgatattagtttaaagaaagggtgtggagtggggagaagttttgatattttatgtgtttttgtttgtttgtttgtttttaagggtgtatgtttttttaaagtttttattattgatatttataaatattaaggtttatgatggataaaggagtgagtatatattttttaaagtgaggttttaaggatttatgagagaatagaaatgttttaaggttttttttagtattatagtgtggaaggaagattgagtattatgatgataaggttgggtttttagagagaagtgagaatgtttgattttgagaaagagaagatggaataggtaggtggtttggaaaattgaaaaagagaaattagtgttttttttttgttttttaggtttttatagttttttgtatattttagaatttttattattgtatgtatttattgtattggaattatttgtttatatat

SEQ ID NO: 3657 - DNA, 2419 bp, Artificial Sequence
  chemically treated genomic DNA (Homo sapiens)
ttagggttgttaggttttttttagttttgtatttgttgtgttgttttattttgttaggaagttttagagattttggggatggggtgggagtgtttttttattgtgggtttaaaaagaaggaaggatgtttttaggggttgtagaaggaggattagttttaagttataattttttttggatttaaggtaggttggttggggttttgtgtttatatggtttttggtgggggtttgtgtgttttgggagttttgtggtttggggaggaaagaggagataagagataggtgaggattatggggttgatttagttggggtagggattattgtggaaaaattttggtgaggtggggggatgtggaaagagagtggtttgtgttttgtattttgtgttgggtattttgtgttagtgttttgtttttagtgttttgtgttttgtgttttgtgttttgtttttattttgggttagttgtattgtgtttgtgttgtaggaattgtggagttggaaagtgggggtgttgtggttggggggttgttttagttgtgttttggttagtgattggtgggttgggtttaaatttagttaggttgggtaggtggtggttgtgtgattggggattgggtgttttgttttttttgtttttttttttttttttttttttttttttagttttttggttttttttagtttttattggatttgtttgtttgttgttttttttttttttttgttttttatattattttttatttttttgttttgtttttgtttttttttttttttttgttttttgttttttttttttttttttttttttttaggggtggagtttttttttttttttttagataatgttgtggttgtgtttttttttttgttagtttgtttaggtttttgttgttagtgatttttttgggttgggggtggggaggtggggggggagtgtagggttggggaggatgagttggttttttttatttttttgttgttgttttttttaagagggatggagatttggtttaagttttttggtttatttggagttgtgatagttatttttagggaatagttatgttgttttattaagtttatttttagtggtttggattttttaggtagaggttgtgggattttgttttttttaatattttagtttatttttaaaagggtttgagttggataggggttaaataggtttttttgatttggtgggttggttagatgtgatagtaatgttaaggaggttaagtttttttgtttattttttattttttttttttttatttttggattttttggtgtttttagtatatagaggtttttgagtagtttggttgtaggttttttatttatttagagtttttttttttatgtgtttatttttaattttgtagtgtttgtggattaaaggggaagggagttttaggttaatttttaaggtatagttagattagtttatttagtttggaagttaagtattttttattaaatttattgtttggattttggaatgtgttttttttagaaataatgttataaatggtgatttgttttttaggttagttataaaagtttgttgaatttaaaatgtagttgtagggtggtgttgagaattgtgttagttattttgaaaaaggaggttattgattagttttatttgtagaaaaaatatgtatatattttttggttttttttttttgggttataaatattataaattaaataagttaaagtttttttattaagtttttttatatggatttattattttatgtgttaagttttttttttttgtaggtaatagaaataattttgggggaatgtatttgtagatgtagtggttttttgataattttatttaattttagtgttagaattgtatggagagtttagtataagaggtaaatttagagtttaaagggttttttgtaatttagaaagttttttttgaggggttttttttttttttttattatagattggttttttttgtattttagatatttggtgaaaggtggttatgatttttatttttggggtttggagttttgttgtttaggaaagtagttagatgttgttagaattttttattttttaatttaattttttaaaagagtagtttatttttttgtgatagtggggttagggatgagtttaggttgtatatattgggttattagaaattttgaatttaggttttatttaaaattaaatttattatttttgtttttgtttttgttttgttttgtaattttgagatggggttttattttgttatttaggttggagtgtagtggtatgattatagtttattgtagttttaattttttgggtttaagagatttttttgttttagttttttgagtagttgggattatagttatgtgttattatggttagttaatttttgtattttttgta

SEQ ID NO: 3658 - DNA, 2419 bp, Artificial Sequence
  chemically treated genomic DNA (Homo sapiens)
tataaaagatataaaaattagttggttatagtggtatatggttgtaattttagttatttgggaggttgaggtaggaggattttttgagtttaggagattgaggttgtagtgagttatgattatgttattgtattttagtttgggtgatagagtgagattttattttaaaattataaaataaaataaaaataaaaataaaagtaatgggtttagttttaaatagggtttaggtttagggtttttggtagtttagtatgtataatttgagtttatttttagttttattgttataggaggatgagttgtttttttgggagattagattagagaataagggattttagtagtatttggttgtttttttgagtagtagagttttaagttttggagatagaagttatggttattttttattaagtgtttggggtgtagggagggttagtttgtgatgaaggagaagaaagaattttttagggaagattttttgggttatgggaagttttttaggttttggatttgttttttatattgagttttttatgtagttttgatattgagattagatgagattattgagaaattattgtgtttgtaaatgtatttttttaaggttatttttattatttgtaaaggaaagaagtttaatatatagagtagtgggtttatatggggaaatttaatgggagaattttaatttatttaatttatagtgtttatagtttaagaagaaagaattagaagatatatatatattttttttataaataaagttgattagtggtttttttttttagggtagttgatatagtttttagtattattttatagttgtattttgggtttaatagatttttgtggttggtttgggaagtagattattatttataatattgtttttaagggagatatattttaagatttaaataatgaatttagtaaagaatgtttggtttttaggttggatgagttggtttggttgtattttgggggttggtttgaggttttttttttttttggtttgtagatattgtagggttggggataggtatgtgagggggagaattttgagtagatagggaatttgtagttgggttgtttaagggtttttgtgtattgggggtgttaggaggtttagggatggaaaagggggaggtgagaaatggataaagaaatttggtttttttggtattgttgttatgtttggttggtttgttaagttgaaggggtttgtttagtttttgtttggtttaaatttttttgggaataagttgggatgttagaaaaaataaaattttataatttttgtttggggaatttaggttgttggaggtgggtttggtagggtagtgtgattgttttttgggagtggttgttatagttttgggtgaattgaggagtttgggttaagtttttattttttttggagagggtagtagtaaggaggtgaggggagttagtttattttttttaattttgtattttttttttatttttttatttttagtttggaagaattgttggtggtgggagtttggatgagttggtggggaaggggatgtagttatagtattgtttgggagggaggggagaagttttgtttttagaggggaggggagaagaggagggggtaggagataaggggaggaagaaaggtgaaggtaaggtgaaggggtggagagtgatatgaagagtgagagaaaagagaggatagtggatgagtagatttggtaggggttgaaaaaggttaaggggttggagggagggagaggaaggaggaggggagtgaggagggtggggtgtttggtttttagttgtgtggttattgtttgtttagtttggttggatttgagtttggtttgttgattgttggttgaggtgtagttgaagtagttttttagttgtggtgtttttattttttaattttatggtttttgtggtgtgggtgtgatgtagttggtttggggtgaaggtaaggtgtggggtgtggggtgtggggtattgggagtgaggtattggtgtgggatgtttggtgtaaggtgtagggtgtgggttgttttttttttgtgtttttttattttgttaaagtttttttatgatggtttttattttggttgggttagttttgtaatttttgtttgttttttgtttttttttttttttttgagttgtggggtttttggggtgtgtggatttttgttaggggttgtgtaggtgtggagttttagttggtttgttttgggtttgaagaaagttgtggtttggagttagttttttttttatgatttttgggggtgtttttttttttttttgagtttgtgatgggaaggtgtttttattttatttttggggtttttgagattttttggtgaggtggggtggtgtggtaggtgtagggttggggagggtttgatagttttgg

SEQ ID NO: 3659 - DNA, 2480 bp, Artificial Sequence
  chemically treated genomic DNA (Homo sapiens)
tagtatgaaatataaggtttagtatatattattatttaaatgttttttgtttgaataaatatatgattgttagtgaatatttgttgaatgaataaaggggttatatttaatagttaattgtagtgtttatgttatttaaatatggtggttttttaggtgtttttgttttagtttttgagagttttgttttttttttattgggatttagatatgtagttataaggagttaaattttatagaggtgtgtaaagatgataagttataggtagtagggtggtaattaatatttttttgtttggatattgagatttttatatttgttggataatagtgaatttataagggattatatatttaatggtaatatttatatataataaatatttatttaaaaaatttatatgaattaattaatttttagaatgtttttatatgggattttttattagtttttgtatttataagtatttattgaatattttttgtatattaagaattagttattttttaaaattttggtgagattaatagattttatattattagttagtgagtttttttaaaagtgttggtttatttataattagtgagttgtattttttttgtggtattggttagattttataaattgtagttttttgtttatttataatggatttagatttttggatgagatgtattatatatgtgtgaaggattagagggtattttttaataataataggaataatattgttttgtgttgttaaattgtagatttttttttttaaagatttaaagtttattatagatataatttgattgttgttgtattgtaatagtgtttttttttttttttttatttaggtagattttttttttgattaaagatggtatgaatatttttttatgttatgatttatttgataaatagtttaggatgttataaaagtaaagtaggagatgttttaaataattagtggtagaaagtttgttgttgtttgggtgttaattttgttagaaagtttagatatttgtgggttgtattgtaaatttttgtatagatgtgtgtgaggttgagttttagttatatgtttgtaatagtattaggaaatattttgttatgttatttttttgggtgattttttatgattaaaagaaaaaaaaagttatatttttgttttgtgaaattgagtttgaattttgggtagtttagtagtaattagtatatgtttgaattatagttgtgtgggatggtttgtattatatattaatggtaattattgttttaaatatggaaattaaatattttaggtttaggttgattttaatttgtgggtaggaaatgtttgatttattttaagataagtttaaaagtgtgtggagttttttttggggttataaattttgtttatatttatatgtattttttttgagatagttttttgaggttttttggtagttatttttttgaatgtgggaagagattgggatttttaggaatgtaaaaaaggagaaattaaaatgtttttagaaaattttagggtgtggttggtttagagatttaatttaatagttttaagatttaaaagatgagtattaaattatatttggtttttttttttttaggtatgagatatttatatttatttagaattagtttttaatttggaagttttttgtgtttttagtatttttagattttgtattaaattttttgtaaatttttttaataatgagtagttatgtatagtattatagttgtggttttgatgtttttattattagttgattattttggttttgtttttttgtggttttgtggttatgaaataatattttaataggtataagatgattggtgaaatttatttagtaagttttgggttttttttaatgtgtataattagtgtatattatagtttatttaaaaatgtgttaatgggtgaaattaatatgatattttagaagttgttgattatttatttatttttttgagatagggttttattttgttatttaggttgtagtgtagtggtgtgattatggtttattgtagttttgatttttttaggtttaggtgatttttttagttttttgagtagttggttttataggtatgtgttattatatgtggttaatttttgtattttttgtagagatagggttttattatgttgtttaggagggttttgaatttttgggtttaagtaatttatttgttttggttttttaaggtgttgggattataaatatgagttattgtgtttggaaagaagttatttattattattttgttagataatttgtttgtgattttttaaatatttaatagaatatgttgagttttgtttttatttttttatttattttggaggttatttgtaatgttggtggatgtttttagttatattaatagttttttattttaggtatttgtgtttttttgtttgagggtttttattggtttgagggtttttttagtttggtttggggtaggt

SEQ ID NO: 3660 - DNA, 2480 bp, Artificial Sequence
  chemically treated genomic DNA (Homo sapiens)
atttgttttgagttaggttgagagagtttttagattaatgaaagtttttagatagagggatataaatgtttgaggtgggaagttgttggtgtgattgaaagtatttattaatattataggtgatttttaaaatagatggaggggtaagggtagggtttagtatattttgttaggtatttaggaggttatagatagattgtttagtaagataataatagataatttttttttaggtataatggtttatgtttgtaattttagtattttaggaggttaaggtaggtggattgtttgagtttaggagtttaagatttttttgggtaatatgatgagattttgtttttataaaaaatataaaaattagttatatgtggtggtgtatgtttgtggaattagttatttaagaggttgggaggattatttgagtttggggaggttaaggttgtagtgagttatgattatattattgtattgtagtttggatgatagagtgagattttgttttaaaaaaataaataaataattaataatttttgaggtattatgttaattttatttgttaatatatttttaagtgagttataatatatattaattatatatattaaggaaagtttagagtttattaggtgagttttattagttattttgtatttattaaagtgttgttttatggttatagagttataaagaaatagagttagaatgattaattgataatagaagtattaagattataattataatgttatatataattatttattattaggagagtttataaaaaatttggtataagatttgagaatgttgggaatataagaagtttttaaattaggaattgattttgggtaaatgtggatgttttatgtttgaagagagggaagttaagtatagtttgatatttattttttgagttttggaattgttggattgggtttttggattaattatattttggaattttttgaggatattttgatttttttttttttgtatttttagggattttaatttttttttatgtttaagaaggtggttgttaagagattttaagggattgttttaaaagaaatatatatgaatgtgaataggatttgtagttttagagaaaattttatatatttttaaatttattttgggatagattagatgttttttatttgtagattggaattagtttgaatttaaagtatttaatttttatatttaaagtagtagttgttattggtatataatataaattattttgtgtagttgtgatttaggtatatattgattattattaaattatttagaatttgagtttaattttataagatagaaatatgatttttttttttttttggttatagaagattatttaaggaagtagtatgataaaatgttttttgatgttgttataggtgtatggttgaaatttaattttatatatatttgtatagaaatttatagtgtaatttataaatatttgagttttttggtaagattaatatttgagtagtagtaagttttttgttattaattatttaagatattttttgttttgtttttgtaatattttgagttgtttattaaataggttataatatgagaaagtatttatgttatttttaattaagaaaaaaatttgtttggatgaggagagaaggaaaaatattgttgtaatatagtaataattaaattatgtttataatgggttttaaatttttagaagaaaagatttatagtttagtagtataaagtagtattatttttgttgttattaaaaagtgttttttaattttttatatatatgtaatatattttatttaaggatttaagtttattataaataaataagaagttatagtttataaaatttggttaatgttataaaagagatataatttattggttataagtaagttaatatttttagaaaaatttattagttaatgatataaagtttgttggttttattaaagttttgggaaataattggtttttggtatataaaaggtgtttaataaatgtttataaatataaagattgatagaggattttatataggaatgttttagagattagttaatttatatgagttttttaaataaatgtttgttatatataaatgttattattaagtatataattttttatgaatttattgttatttagtaggtgtggaaattttagtatttaagtagagaaatattaattattgttttgttgtttgtagtttattatttttgtatatttttgtagaatttaattttttataattatatgtttaaattttagtgaagaaggagtaaagtttttaaaaattgagataagaatatttaaaaagttattatgtttaagtagtataaatattgtaattagttgttaaatgtaatttttttgtttatttaatagatgtttattgataattatgtatttatttaagtaagaaatatttgaataataatatatgttggattttatgttttatattg

SEQ ID NO: 3661 - DNA, 2464 bp, Artificial Sequence
  chemically treated genomic DNA (Homo sapiens)
ttgtagtgagttgagatagtgttattgtattttagtttgggtgatagagtgagattttattttaaaaaaaaattaatttggaaatttatgttttagaaagtatgattttagttattttgaatatttttagtgtatagatatgttttgagtggttatatagagagggtataggggtattaaaggaagggaggaattaggagtttttatggaggttttatagaggaatttaaattatgtttttaggagttttttttataattagttgttgttttttttttttgttttaaatttagtaagatataattgataaaaattatatatatttatggtgtataagttaattattatataatatatgtattgttttatgtatttattatttttggtggtgagaatatttaagttttatttttttagtagtttttaagtatataatatattattattattatagttagtatgttgtataataggtgtttagaatttatttattttgtataattgatattttgtattaattgattgatattttttaattttattgtttttttttaattttttgataattattattttttttttttttggtgtatttggtttttttagattttatatataaatgagattatgtaatatttgtttttttgtgtttggtttattttatttagtataatgtttttaggtttatttatgttgttaaaaatataagattttaatttttttaaggtttagtagtattttattgtgtatatggattgtattttttttatttatttattgagggatatttgggttgattttatgttttggtttttgtgaatagtgttgtagtgagtatgggagtgttgatatttttttgatatattgattttattttttttggatatatatttagaagtgggattgttagattatatggtatttttatttttaattttttgaggaatttttatattgttttttataatggttttattaatttatattttaatgagtaggaattagttttttttttgtatagttttagttattgtttttattgttttattttttgttttttttttttaggatgtttgtgggtattgaagttttttttttagattggatatgagttagtattttagtattttgtgagttgagtgttaggataaggtgtgatttgatttttttagaaattttttttgttttagagatagttttttgggttagggatttttaaggattaaagtttaatttttattattttttattatattgggaattttagaatgtgtgagttttatgttttttggtgttgatagattagaggaggattagatgtgataatatggttgttgttggaggggttgagaggtgattgattagtttaagtttgtatagtttgtggaggaagtattttgtttttgtttttttaagtgataaagtttatgttggaatatagagttttttgttttgagtatttaaagttttgatttttttgggggaaaattttttgtagtttttttttttagtattatttgtgttagtgagtaattttttaattaggttgtgagtttttggagagttgagagtgtgttttggtttttgtatttatgaagtgttgggttatgtttttattttagggttatgattgaaaaaaaatgttagagggagaaaattgtaagatgattattatattttgtttaattgaaaaggaatgtgttaattagtttatatagttttatttatttttggaaaaaatatatttttatattatttgttttttgtttttttttaattttttttttttttttaattaaaataaggaaaaaaaaattatagaatgttatttataatatgttaattgttggttatttttagatgttgggattatgttttaaataataattttgagtaatttaaataaatatggaatgttttggaagttgtggggtaggatatagagttgagggaaagtttaagatttagaaattagaaggttagtgttaaaaatattttttagatgtgggtagtgagaaataaaggagagttttttgtgtagggggttattagttttaagtatttttttatttttatatatttttttttaagatttagaattttaggaggagtttgattgatttagtatgggttatatgattagttttggtgagaggagggtaggattttttaaataatgggaaatttgtgttattattaaagatagggagaggagaattgtgaaggtaaaatatagatgattattatgaataaggggtattttttttttttatttgtggtttttaatgtttttgttataaataaaatataaaaaatatttaagaaatatttatgtattatatatataatatatatatttataaatgttataataaatattttaatatttgtttttttaatagtaagaagaaaagatagtagtaatattattaagaggaagttagtttattggaagggatttaga

SEQ ID NO: 3662 - DNA, 2464 bp, Artificial Sequence
  chemically treated genomic DNA (Homo sapiens)
tttgaattttttttagtgaattagtttttttttaatggtgttgttgttattttttttttttattattaaaaggataaatgttaaaatgtttattataatatttataaatatatatattatatatataatatataaatattttttaaatattttttgtattttgtttgtagtaaaaatattagaaattatagatagaaaagaaaagtattttttgtttgtgatggttatttgtattttgtttttgtagtttttttttttttatttttggtaatagtataggttttttattatttaaagaattttgttttttttttgttaaggttggttgtataatttatgttaggttaattagattttttttagggttttgaattttgaagggagatgtataaagatgagaaaatgtttggagttgatgattttttgtatgaagggtttttttttattttttattatttatatttgagagatgtttttaatattgattttttaatttttgggttttgggtttttttttaattttgtattttattttatagtttttagaatattttatatttatttaagttatttagaattgttgtttgaggtataattttaatatttggagataattaatagttaatatattgtggatagtattttgtggtttttttttttttattttgattaaaagagagagagaagttaaaggaaggtaggaagtaggtaatatggagatatattttttttaaaaataaatggaattgtataaattggttggtatatttttttttaattggataaaatgtggtgattattttgtaattttttttttttaatatttttttttaattatggttttggagtaaaggtataatttagtattttatagatataaagattaaaatatatttttaattttttaggagtttataatttggttaaggagttatttattaatataaataatattagaagaaagagttatagagagtttttttttagaaaaattaagattttaggtgtttagagtagggagttttgtattttagtatagattttattatttgagaaggtaggaatgaggtgttttttttatgggttgtgtaggtttaagttaattagttattttttagtttttttagtagtagttatgttgttgtgtttggtttttttttgatttgttagtattgggaaatgtggaatttatatattttgaagtttttagtgtaatggggagtggtgggaattgaattttggtttttaagagtttttggtttaggaggttatttttaaaataagaaagatttttgggagaattaagttgtattttgttttgatatttaatttataaagtgttgggatgttggtttatatttagtttgaagagaaaattttagtgtttatagatattttaaagggaggaggtaagagatgggatagtgagggtgatgattgaaattgtataagagaaagattggtttttgtttattgaaatgtaagttagtaaggttattatgaagaatagtatggaggttttttaaaaaattaaaaatggaagtattatatgatttggtaattttatttttgggtatatatttaaaggaaatgaagttagtatgttaaagagatattagtatttttatgtttattatagtattatttataagagttaagatatggaattaatttaagtgttttttaataggtgaataaagaaaatgtagtttatatatataatggaatattattaagttttaaaaagattaaaattttatatttttaataatatagatgaatttgaggatattatgttaaatgaaataagttaagtatagaaagataagtattatatgattttatttatatgtggaatttaaaaaagttaaatgtattgaagaagaggggaatggtggttgttaaggggttgggggaaggtgatggaattaggagatattagttaattggtataaagtgttagttatgtaggataaataagttttggatatttattgtatagtatattgattgtagtaataataatgtattgtatatttaaaaattgttaagagagtagagtttaaatgtttttattattaaaaatgataagtatgtgagatgatgtatatgttatataataattagtttgtatattataaatatatataatttttgttaattatattttattaaatttggggtagggggaagagatagtaattggttatagaagaagtttttggagatataatttggatttttttatagaatttttatggggatttttgatttttttttttttttggtgtttttgtgttttttttatgtgattatttaaagtatatttgtatattaagggtatttagggtggttggagttatgttttttgaggtatgagtttttaagttaatttttttttaagatggagttttattttgttatttaggttggagtgtagtggtattattttagtttattgtaa

SEQ ID NO: 3663 - DNA, 2482 bp, Artificial Sequence
  chemically treated genomic DNA (Homo sapiens)
aatggggagtgattgttaaagggtatatgggattttttttggggaataagaatgttttaaaagtgattgtgataatggttatataaatttgttattatattaaaaataatggaattgtatatattaaatgtgtaaattatatggtatgtgaattatattttagtatatgtttaatttttttttaagtgggttgtggttatgtagtatgtattttttttaggtgggtatttgttatagtttttatagttttatattgattgttttatattgggatttagttaatttttttgattttggtttttgttggtatttgatattttagttttagtttatatttatgagtatttttttttttttagtatttttattatgataagttttttttttttatttttttttttatgaaaattatttttattggttattttagagtatattttttataatattttttgatatgtagttattaagtttttgataaagaaatgtatttttttattagtaataatattgttataaaattatatgttattaaattaaattgttttataaatataatttggattttgggttttataaataaatatagtgtattatgttaattgaagaataataggaagtattttatgattttatattatttaatagtttttttttaaatatttttgtagtatgattaggtaggagatgttataagattgggaatagagttgtaattattggtatttttaaatagtttgttgatggattgggtttgtgagaaaattaatattatattgaaatttttagggatattttaaattggtggattagatggttgtttgattaagtttgggttatgtaaatagtggagtgtttagatttaggtttggttgttggagtttaggtagttgtttgtatttaagtttagttagaagttttgttaattaaagaattgattgaattttttttttttttttatttttgtttgttttttttttttgtatttgtgttgtttttttttttgtttaaattttttgggtttaggattgtaggtaggtaaggtagagtattttgaatgtttttttgaggattaggaatttatttttttgattatatagtgatgtgttttatagattttttttattgtgaggtaattattttatttatttaagttttataaagtttttattattttggttagtttatatttttgaagttaagttattagtttgatgtgtttgttgtaaaatgtggtttaatagtttgttagtatatttattttttttttaatggaatttaaaggtattttatgtttgagtagtagtggatttaagagttgatgaaaagttttgtgagttgggtgtagttagtataaaataatgtggggaatattgtggagttttatgtagagttatttttagtagtggtgtgtgggttttttgaattttaagttatgttttttgtttttttttttttttgatagtgttttataaataatttatgttgttttatgtgtgttggttttagattgtttaggatgtattggattatttgagtagtttgtgtttatgtggttttttttttttttgaagatgatttgattttgttttgtttataaaggggagatgtggattgttgttttttgttttttaagtgtggttttgtaaagttgttttagaattaatgggttggaattgaaaattattatggagtttggtgaatgttagtgagtttttgaaaagtaaaagttgggaagtgataaattttttttatagttttattttaaatataaatgaggttatttttttgggaggtagtaaaagtgagtattttgtgtttgattaaagataattttttggttgaggttttgattatttagggatgaaatggaggtaaatggttttttttgtttaaatttagatttatttttgtattaggttaggtatttgttggattgaaaggagtgtagtttttggagagtagttttatggaattggaattggtaaaaatgggttttttgattatattttatatattattattagaatgtattattatatattagatttatattatatttaatatagatttaatatattagattataattagattatattaaattataattatatattagatttatattattatatttaaaatgttttattttattagttttgttatttgtatatttgtgttgttagtttataaattagattataatgattttttattatttaagttagaatttttatattttatttatattttagaaagtagagattaaagaaaagtattgagaagagaaggttaatttttttttatataataatatttgtggtttttaaattgaaatgatagttgatatagtgtttagagtttaaattttatttttatttatttttttagaaagagatattgaaatatataagggaaagagaggagattatatgtgaaaaattattaattattttgttagtgattatttaataatgaa

SEQ ID NO: 3664 - DNA, 2482 bp, Artificial Sequence
  chemically treated genomic DNA (Homo sapiens)
tttattgttaggtaattattggtaaagtagttggtaattttttatatatggtttttttttttttttttatgtgttttaatatttttttttagagagatagataaaaataaaatttaggttttaagtattatattagttgttattttaatttgagaattatagatattattatgtaagaagaaattagttttttttttttaatatttttttttaatttttattttttggaatataaatgaaatataagagttttgatttgaatggtaaaaaattattgtaatttggtttatgaattgataatatagatatgtaaatggtaaggttggtaaggtaaaatattttagatataataatatagatttaatatataattataatttaatataatttaattataatttaatatattagatttatattagatataatatagatttaatatgtaataatatattttaataataatatataagatataattagaaagtttatttttattaattttagttttatgaaattgttttttaagggttgtattttttttaatttaataaatatttagtttggtataaaggtaggtttggatttaggtaaagaagattatttgtttttattttatttttggataattaaaattttaattaaaaggttgtttttggttaaatatagaatgtttatttttgttgttttttaagaaaatgattttgtttgtatttgggatggaattgtggaaagagtttgttgttttttagtttttattttttaaaggtttgttgatatttattaagttttataatagtttttagttttaatttgttagttttgagatagttttataaagttatatttggaggatagaaaatagtaatttatgttttttttttgtggataaaatagaattgaattatttttagaggggagaaaaattatatgaatgtagattgtttaaatgatttagtatattttagataatttgaaattaatatgtataaggtaatatgggttatttatgagatattgttagggaaaaagaaaagtaaaaaatgtaatttaaagtttaagaaatttgtatgttattgttgggggtagttttgtgtaggattttataatgttttttgtattgttttgtgttgattgtgtttagtttgtggggttttttattggtttttaaatttattgttgtttaagtatgaaatatttttggattttattaaaaaaaaaataaatgtgttaataagttgttaaattatattttataataaatgtattaaattgatgatttagttttaaaaatatgaattaattgaaataataaaggttttgtagaatttggataaatgaagtgattgttttatagtgagggagatttgtggggtatattattgtgtaattaaaaaaataagtttttggtttttagagaaatatttaaaatgttttgttttgtttatttatagttttgagtttaaagggtttgaatagggggaaaaataatataggtataaaaaaaagaagtaggtaggggtgggagaaagaaagaaatttagttagttttttgattaataagatttttagttggatttaagtataaatagttgtttagattttaatagttaagtttaaatttaaatattttattgtttatataatttaaatttaattaagtgattatttaatttattaatttaaagtatttttaagagttttagtgtaatgttggtttttttataagtttagtttattaataagttgtttaaaaatgttagtgattgtagttttgtttttagttttgtagtattttttgtttggttatgttatagggatgtttaggggagaattgttagataatgtggggttataaagtattttttgttattttttggttggtatagtgtattgtgtttgtttatgaaatttagaatttaggttgtatttataagatagtttggtttgataatgtataattttatagtaatattgttattaataaggaaatatatttttttgttagaaatttgataattatatgttaaaaaatattataggagatgtgttttaggatgattagtaaaggtaatttttatgaggaaaaggataagaaaagggaatttattatgataaaggtattagaaaaaggaaaatgtttatgaatatgaattgaggttaaaatgttaaatgttaatagaggttaaaattaaagaagttaattgggttttagtgtagggtagttaatatggaattatggagattatggtaggtatttatttaaggaaggtatatgttatataattataatttatttaaaaaaaaattaaatatgtgttgagatataatttatatattatgtaatttatatatttaatatgtgtaattttattatttttagtatagtgatagatttgtgtaattattattataattgtttttagaatatttttattttttaaaagaaattttgtgtgttttttagtagttattttttatt

SEQ ID NO: 3665 - DNA, 2345 bp, Artificial Sequence
  chemically treated genomic DNA (Homo sapiens)
agttattgggtttattaaggtatttttatagttggtagtttatttttttttttattatttttttttattatattaatatttttttttttgtttatttttatggggttttttatgtttttttgttagttttaaagtatgtgtgaagagtagatatatttatgtaaatggtttatatttattgtgaaaatttatgaaatatttatgaattattaatgttgtttttagggttataataaatttttttttttttttttttttttgtgtgtgtagtgtgtgtgtttttttttttttttgaagtgtaattttttaatatggtataatttttttagattgattttgttatttatttaggagggaatgttaaattttatttattttgttttagtttgtaaattttttagtgttttttttttttaaattggattgttagattatttgagggtatttattttttttgtttagagtatagtatttggtgggttgtaaaatagaagagtttttttagatttgtttgataaatgagaggaaaggggtaatggtggtaggagtttgtatagataaaaaggttttttattttgggttaaaaggtgttatttggtattatttttattttttgtttttgtttaggaaagaaatttgataaagtaggagatagtttttgttttgttttttttatttataatttttttttttgagaattgttattttgtttttaagatgggttatatattagtttttatttttatttttttagtttttgtttatgttatttagataattatgatggtttttttttagttattattttgtagattagttttgtattattggataaatggaattttatagtttttgtttggaataatttagtttttggaattttttatttaatatgatgtttgtggaatttattatgtagttgtatatagtaatattttatttatttttttgttgaatattattttattatttttgttagtttgaatggattttttttttatagttaagtaggttatgattaagggagataatgaagtatggaattgttttttttagagaaattataggtatggaataagaattttttgaggaggttttttttgttttttttttattaagttgtgatattatttttatatttagagaattttagagtaatattgagttttgttgagtgggtttagagttttatatggtagttgttttagtttttggtatgaggttaaaggatgatagtttttatttttttttatgtttttttgtttaattttagggaatatttttttattttgtgattgtttatatttgaaaattttatttatattttataattttttattagtttaatgttatgtggtgttaattttttgtatgttgtagtgttgagttgtaaatttgttttttttttgtagtaatttaaagtgtttgtaaagttttgaggtagataatgttattttgttatgtatgtttatataatattagtaaattatttattgtgtttttgtttattttttagatatggtggttgttttgtagaattaaaatttttgttatttttttttataattagttaataaatttaagttgagttaaggagttaggtgaagttattgtgatttgggtaaggtttttattgatagatatgtgtttttagatataagatgtgtttttagatatataattttgtttggttagagtagaatagaatgggtggtgtatatttttattatgtaagtatattttgttttttttattggtaataatattttaaggagtgtaaggaaatttaggaaggaatattttataatgttaagaatatttattaagtaaattattttttagaataaatttgagagatggattgttatattaaagttaatagaaattgaagtatgataatgttaatgtatattttttttgatatattgtagatttgtagttttaaaagtttgtttttttattttgttagttgaattttttttattttgttgttattttttttatgggatgttttaaaattttatagatttttgtttggtaatggggaaaaatgagggtgtttattattaagaaagttaattaaagaagtaattgatggattatttagtttatagattaaataaaatggatgttattttatgtttttaaatatttaggtattggaattagaaaatgaatttttaattagatttttttgttttttttgtagggaaaatgagatgtaaagtagagttagagaaaaatagtaaatggttatttgtttgttgggagataaaaattttatttagaggttaagttatatttaaattggttgattttatggagattgattttgttttgtggga

SEQ ID NO: 3666 - DNA, 2345 bp, Artificial Sequence
  chemically treated genomic DNA (Homo sapiens)
ttttataggatagagttagtttttatgggattaattagtttgaatgtgatttgatttttgagtaagatttttattttttagtagataaatggttatttgttatttttttttgattttgttttgtattttattttttttgtaggaaaagtagggaagtttgattgggagtttattttttgattttagtgtttagatatttgaagatatgaagtaatgtttattttgtttggtttatgggttggataatttattagttatttttttaattggtttttttagtggtaaatatttttatttttttttattgttaggtaagagtttgtaggattttgaggtattttatgagaagagtggtagtaagataaaagagatttagttagtaaaataaaaaagtaggtttttaaaattatggatttatagtatattagggaaaatatgtattgatattattatgttttagtttttattggttttggtatgataatttattttttagatttattttaaagaataatttatttagtaggtatttttgatattatgaaatgtttttttttgaatttttttgtgttttttaagatattattattaatgggaaaaatagggtgtatttatataatgaaagtgtgtattatttattttattttattttggttaaatagaattgtatgtttgaaagtatattttgtgtttgaaagtatatgtttattgatgggaattttgtttaaattatagtggttttatttggttttttagtttaatttgaatttattaattaattatgaaaaaagataatagaaattttgattttataaagtaattattatgtttggaagatagataaagatataatgaatgatttgttgatattatatgaatatatatgataaaataatattgtttgttttaagattttatgggtattttggattattgtaagaaaagggtaggtttgtagtttaatattgtagtatgtaaagggttaatattatatggtattgggttgatggaagattgtagagtgtgagtaagatttttagatatgagtaattatagggtaaagaaatattttttaaggttgggtaaaagaatatgaaagaagataagaattgttattttttggttttgtgttaggaattgagatagttgttatatggaattttgaatttatttagtgaaatttggtgttgttttgaagttttttgaatatgaaaataatgttgtagtttgatgaagaaaggatagaaaaggtttttttagggaatttttattttatgtttgtggtttttttggaaaagataattttatgttttattattttttttagttatggtttatttgattgtaagaaagaaatttatttaaattggtaaaagtaatggaataatatttagtaaaagaataaataaaatattgttgtatgtaattatatggtgaattttataagtattatgttaagtaagagattttgaagattaaattattttaaatgaaaattataggattttatttatttaataatgtaaaattaatttatagggtaataattaaggagaggttattatagttgtttgggtggtatggataagagttggagaaatagaaatagagattagtatatggtttattttgagaataagatggtagtttttaaaaaagggggttgtgagtgaggaaggtaaggtaaggattgttttttgttttgttagattttttttttgagtaaaagtaggaagtggaggtggtgttaagtagtattttttggtttaaggtgaagagtttttttatttgtataagtttttgttattattgtttttttttttttatttgttaaataagtttgaaggagtttttttgttttatagtttattaaatgttgtgttttgaataaagggagtgggtatttttagataatttaataatttagtttgaaaaaagagaatattagaaagtttataaattgaagtaaaataagtagaatttaatatttttttttgagtgagtagtagaattagtttgagaaagttatattatattgaagggttatattttagagagagagaaagatatatatattatatatatagagagagagagaaaaagagagatttattgtggttttagaaatgatattaataatttataaatattttataagtttttatagtaaatataaattatttatatagatgtatttgttttttatatatgttttagaattggtaaggaagtataaaagattttatgaaggtaaataaaggaaaaaatattggtatgatgaaggagagtggtagaagaaagagtaagttattagttatagaagtattttggtggatttagtgatt

SEQ ID NO: 3667 - DNA, 2435 bp, Artificial Sequence
  chemically treated genomic DNA (Homo sapiens)
attagttgttttagaaattgtagattgtgttgatttggagggaggaagatttttttaaatttttatttagatttttataagatttagatttttaaaataaagtaaaatataaaagtaattttttgtttgtggatgatttaattttttttttggtaggtttaattttgttttttaggaattagtagtgattagtgatagaaagagtagtttttatgattttaggtgattattaggatgttagggtaggaaggagtttgttgattgagtgttgatttgtaaaattattagtataggtgtttaataattttatttttgagaagttagagttgagtttttggggttgttttggagggtttaggatatgttgtagggtaataggaaggatatggggtgagaaaaaggtttttgttaagttgttgaaagatatatgatagtttaatagggaattaagagttaggtttaatattgtttttgtattatatttaataattgaggttaatggtttattaagtttttattgagggttatagagaggataggtttttaagtgtagagaggtagtagtaaaggttgaggttgtgggaaatataattagagtttaaaatattaatatttatttgttggtatggttgagaggtattttaataatttttggtttttgattttttattgtgttaaaatttaaattattatattaggttttgaataatttttgaaaatgtgtgtttttttatttagttaaggtaaagttgttttaaagataaatattatattagtatagatgtttttataagagtaattattattaatggttattgtttggaagttggatttggaaatgatatgttggatggttatagttttgttagatgaggtgtgtgtgtgatgataagtgggaaatagtttgatttaagggatattttagtttatggttagtatagtaatgattttgggaagtttgaagttatgttttttgttgagtaataaggtatagggtgtagaaggggtaaaataagttagggagtttagttaatatgtgagatggaaatttaaggatagggatagagtatgtataaagtttagggatatagttttttgttggatattttgtttgtattaattggtaaattagattgtataataggaaagaagtttgtgatagtaaaaggggttgaaaatgggaaggatatttagagggtaggaattatgatggggttttgtggttttgtgggtagtagggagagtgtatttttggtttgtgggttttgtgagttggaagaaattaggaaagggaagttgagtatttaattttatatagattataggttaattgtgtttatttagtgtttgaaagtgagaagttgttaaggttttgtgatagttttgaaattgtaggtattagaggatagaaattttgagtttagagggaggtaggtatttttatttgtttaatttggtttttaatagtttttaattttttaatatttttaagtagaattagattaagtagaagtgtttataatagttttttaatttagtttgtatttttttttttttttttttgttttgggggttatgtgttattaggagtagaggttgtgaatgttttagaaatttttttgggatgtaggttttttttttatgtagaaaatgtttattgaatatattaaatgttaggtatatgttttgtattggggtgtaatggtgaggggtgatatttagagggagtgttttttttttttgtattattttttgtttgatttttttagtagattttagagttggttattatgattttttgaatttatttttttttattttttttttttgagttttgagaagtaaagttaatttaaatttaaagtgttgggtataggagtttgttttgtaagaatttaaattttattgttttatttttaaatttggtttgtttttatagtgtttgagatttagtaattttttattatttttagttgtttttgttgttgtggttgttaatattatttaaaattgataaaaattgtatagggaagttgatatagttagatattaagttgatatgtttattattgaatgtttggagtaaggtaattttattttagatttgatttttaataaattttagtgaatatttaatttttgttttattataaatgtattattatatttgtttatatgggaaggtgaagatgggttagttgtttgttttgaaaggaggaaagagtgagaatgtataattgaatgaaaaaaaatattttggttatagatatttttttttttggttttataataataaaatatgtagtgggatttttattttgttttagaatttttagttgtttttttttttttgaagtgtttttttagaggaaataaatttttttattgatattgaaaatgagttataagagaagtgttgttattttttttttgag

SEQ ID NO: 3668 - DNA, 2435 bp, Artificial Sequence
  chemically treated genomic DNA (Homo sapiens)
tttaaaaggaaagtagtaatattttttttatgatttatttttaatgttaatagaaagatttgttttttttgaaggagtattttaaaaaggaaaaaataattaaaaattttaaagtaaaataaaaattttattatatattttattattgtaaagttaagagaaaaagtgtttgtggttaaaatatttttttttatttagttgtatatttttatttttttttttttttaaagtaaataattggtttatttttatttttttatataggtaggtgtaataatatatttgtgataaaataaaaattgaatatttattgaagtttgttaggaattaagtttgaggtgaggttattttgttttagatatttaatgataggtatattaatttaatatttgattgtgttaatttttttgtgtagtttttattagttttaaataatattgatagttataataataaaaatagttaagagtagtgagagattgttaagttttaagtattatagaagtaggttagatttagaggtaaaataataaagtttgaatttttatgaaataaatttttatgtttagtattttggatttgaattgattttgttttttagagtttaggagagaaagatggaaggagatgagtttaggaagttatgatgattaattttgaagtttattgaaaaggttaggtaaaaagtaatatagaagagggggatattttttttgggtgttattttttattattgtattttagtataaggtatgtgtttggtatttagtgtgtttagtaggtattttttgtatgggaggaaggtttgtattttaaagggatttttggaatatttataatttttgtttttaatggtatatggtttttaggataaaagaaagagagagaagatataggttaaattggagaattattatgagtatttttgtttaatttgattttgtttgggaatattgaagagttggaagttgttgaagattaaattgggtagatgggagtgtttgtttttttttgggtttaggatttttattttttaatgtttgtggttttaaggttgttataaagttttgataattttttatttttaaatattaaatgggtatgattagtttgtgatttatgtaggattaaatgtttagttttttttttttgattttttttagtttatgagatttgtaggttaaaaatatattttttttgttgtttataaggttgtagagttttgttatagtttttgttttttgagtgttttttttgtttttgattttttttgttattataagttttttttttgttgtgtagtttaatttattagttagtataggtaaaatgtttagtaaaaagttgtgtttttgggttttgtgtgtgttttgtttttatttttaagtttttattttatatgttaattggattttttgatttattttgttttttttgtgttttgtattttattgtttaatagaagatatagttttaggttttttaagattattattgtgttggttatggattaaagtgttttttaaattaagttgttttttatttattattatatgtatattttatttaataagattatgattatttagtatgttatttttaggtttaatttttaggtagtgattattgatggtaattgtttttataagagtatttgtgttaatgtgatatttgtttttgaggtaattttgttttaattaggtgggaaagtatatatttttaaaagttatttaagatttagtgtaatagtttagattttggtatagtgaaaagttaggggttaagggttattggaatgttttttaattatattagtaggtaagtgttagtgttttaaattttgattatgttttttgtagttttagtttttattgttgtttttttgtatttagaagtttgttttttttgtggtttttagtgaggatttgataaattattgattttaattattaagtgtggtgtagaaataatattaaatttgatttttggttttttgttgagttattatgtgttttttagtaatttggtaggaattttttttttattttatgttttttttattattttgtagtatgttttgaattttttaaagtaattttagaaatttaattttggttttttaagaatgaaattgttggatatttgtgttggtaattttgtaggttagtatttaattaataggtttttttttgttttagtgttttgatggttatttggggttatgagggttattttttttattattaattattgttgatttttgggaagtagagttgagtttattaaaaaggaagttgagttatttgtaagtaaagagttgtttttgtgttttgttttgttttaaaaatttgagttttataggagtttggataggggtttggaagggtttttttttttttaggttagtatagtttgtaatttttaggatagttgat

SEQ ID NO: 3669 - DNA, 2450 bp, Artificial Sequence
  chemically treated genomic DNA (Homo sapiens)
ttaaagttagaatgtatattatattatttttttgtttagtttttttttttggtttggttaaatttgttatttttgttttttgaggatttatttttaataaattatatgtgtttgaaattttatttttagttttttttttttttagatttttttatttaggatagttgtaggtaaagtgaggaattttaagagagaatttagaaaagtagaaattataaaggtaatttagttaatagtgaaatgtatgataaaatggagggattttgttgataaataaaatgatatttgaaaagttttattaataaatattaaagattattaaatgtatattaatttttggatgttgaaattaatattgaatgtttaaaattaatttaaataattatattaaatatatatgtatatatgtgtatatatatatattaattataaggatttaaaatattttgaaattattttattttttttttttttttttttttattaaaaaaaaaaaataatggttagaatattggtttttataatattagtttttgttttggtagattaaaagaggtagaatttttttagtataattttgttttttaaatattttaaaagtatttaattatttggttttgtattatttataaaattttgtagttatgaagaaagtttttttttttaaatttagtttatttttttaaattaaaagtgtttttataaataagaagagaagttgtttttgttaaaattttgggtttatttaggattaatggagtttttttgttttgtaggaaaattttttgtttttagattagttgttaaagttgaatattatagatgatttttttaaagtgattttgaaaaattatatgttggaatttaaattttttaaattttatatataagattagaattttatattttaatagttatataattttataaagaattatttttgatttttttggtagattattattgtagaaggaataaaaaaaggttttataaaagtattttatttgtattgttggtagatgatttataaatgttgtatagatatgggttgattattggtttatagaagaagtattaaatgaatgatgagatatttgttggtaaatatatagtaaataaaaaatgtaatttagagttaaatatgtgtatagtgtgggttttatttttgtttataaattaagtaatgtgttttgttaattattagtagagttattgattttagatgtgtattatatagttataattttgttagagagtagattatataagttgttttttttttggttgttttattttgttttattttaagagtttgtaaattgatgattgggataaaaattataattgatattatttgtgggaaatattttataaaataataggtttagatgtaggattaaagttatgtggtagtaaaatattttattgaaaaggggttaggttttatgattttttaagaaaatagatgtgttttttttttttttgtttgttttttaattttttttttttaaataaatttttttttaattattaatgtttttttttttttgtttttttatgattgtattggagagagtttataaatggattatagatgtaggtttgtattttaaaattttaattgttataatttttggaataaaataaatgaaatatttggaaaaattatattgaattattgtaaaggtaatgatgattatgtaaatatgtttgtttgatatttatttagtatttttgggtatgagtatatgattttttagatattttaagttggagtttagggagtaggaagtaatttagagtttgtttaaaatgtagtaatagtaattttttttgaaagttttttgttttgaaggggaagtttttatttttgaagttttgataagttggtaaaagggtttttatgtattttttttttttttaaggtgagatttttggataaaatagtataggaaaataagaatttaatatattttagtttttatttatttaagttttttttatttatattatgttttataattttttttttggaaatgttgtgaattataagaaaaggattttagggtataaatataggttatattgtttaataattaatttataagtgttgtgaagaattgtatataattgggtttttgttaaaaattttggtgttatatggaatttattgtagtattattgattataattaattaatttagtatttatgttgtattttagtatttatttttagtaatgtgttaagatggtttagtgttgggagaaaataataaagtgtaaaagaaattaaatttttattatgtgttatgttaagattttaatagaatatttgtattttttaattgtttttttttagttttttaaaaattgaagtaaatagtatataaatttgtttagaaattagaggagtttgattttaatttttttgtattgtttttttagtttgt

SEQ ID NO: 3670 - DNA, 2450 bp, Artificial Sequence
  chemically treated genomic DNA (Homo sapiens)
atagattaaagaaataatgtagggaaattggagttaggtttttttggtttttaaataaatttatgtattgtttgttttagtttttgaggggttgaaaagggatagttggagagtgtagatattttgttgaaattttaatgtgatatatgatggaaatttagttttttttatattttattatttttttttaatattaagttattttggtatattattggaggtggatgttgagatatagtataaatgttgaattaattaattgtaattagtgatattgtaatggattttatatgatattaaggtttttggtaaaaatttggttgtgtgtagttttttatagtatttgtagattagttgttaaataatatagtttgtgtttgtgttttaggattttttttttgtggtttataatatttttaaaggggaaattgtagagtataatatagataaaaggaatttgaatgagtagaggttgagatatattgggtttttatttttttgtgttgttttatttagaaattttattttaagaagaaaaaaagtatgtgagaatttttttattaatttgttgaaattttaaagataaaagttttttttttagaatagggggtttttagaaggagttattgttgttgtattttggataaattttaaattattttttattttttgaattttagtttgaggtatttgggagattatatgtttatgtttaaagatgttagataaatgttaagtagatatgtttgtataattattattatttttataatagtttaatgtaatttttttaaatgttttatttattttattttagagattgtgatagttagaattttgaagtataagtttatatttgtaatttatttatgaattttttttagtgtaattgtgaggagatagagaggaaaaaatgttggtggttggggggggatttatttggagaaaaaaaattgaaaaataagtagagggaaaaagagtatatttgtttttttaagaaattatggaatttggtttttttttagtggggtattttattattatatggttttaattttatatttgggtttgttgttttatgaaatattttttatagatgatgttaattataatttttgttttggttgttaatttatggatttttggaataagataaaatgaaataattagaaaaagaataatttatgtggtttattttttgataaaattatagttgtgtgatatatatttaaaattaataattttgttaatgattagtagaatatattgtttggtttatgagtagagatggggtttatattgtgtatatgtttggttttgagttgtattttttgtttgttgtgtatttattagtagatgttttgttgtttatttaatgttttttttatgagttagtagttagtttgtgtttgtgtgatatttataagttatttgttaataatataggtggaatgtttttatgaagtttttttttgttttttttgtagtgatgatttattagagaaattaggggtaattttttatagagttatatggttattaagatgtggagttttgattttgtgtgtaaagtttaagaaatttagattttagtatatggttttttagaattgttttgaaagaattatttgtggtgtttaattttagtagttggtttgagggtaaaaggtttttttatgaaataaagaaattttattagttttaagtagatttaaagttttgatagaaatagtttttttttttatttatagggatatttttaatttagggagataaattgaatttaaaaaaaagaattttttttataattataagattttgtaagtaatataaagttagataattggatatttttaaaatgtttggagggtaaaattgtgttgggaagattttgttttttttggtttgttagagtagggattaatgttatagaagttagtattttggttattattttttttttttaataagaaagaaagaaaaggaaagatgaaataattttagaatattttaaatttttatgattagtgtgtgtgtgtgtatatgtgtgtatgtgtgtttgatataattatttgaattaattttggatatttaatgttgattttaatatttaaagattaatgtatatttaatgatttttaatatttattagtgagattttttagatattattttgtttgttgataagatttttttattttgttatatattttattgttgattaggttgtttttgtgatttttgtttttttgggtttttttttaggattttttattttatttataattgttttaggtagagagatttaggagaggaagaggttgggaatgaagttttaggtatgtgtgatttattaaaggtgggtttttaggaagtaggaatggtaaatttagttaggttagggaggggaattgagtaaagaagtggtatgatgtgtgttttgattttag

SEQ ID NO: 3671 - DNA, 2493 bp, Artificial Sequence
  chemically treated genomic DNA (Homo sapiens)
tttagttaggtagtaaattttgaaatttttggttatagaggtttttatttttatattatgatgttttttttttttagttgttattggtaatggtttttattttataatgagataagttggaaattgtagttgttattttattatgtttgttttttttttttttttttttttttttttttttttttttttttttttttttttttatatatatatatatatatatatatatatatatatatagagtaggttatattgttaataatatatattattttgttattgggatattttgagaggtagtgtatttttaaaattttaaataggaaaaatagtaattgtatttgtttttttttttttaattgattgataaagatattttataagatttgagagaggaatgtaaaggtattgtatgaatttgatttgttgttttttttttttattgatttttttttttttttgataatttatataggtagaagttttgggatgtttttattttatttttttttggttggtattttttttgttatatttttttttttattggtatattaaagtttaaggtttaatttaattagtgaaataatttatgatttaggtaaattagatatgattttagtatagaattgttagatattttaggaataaggtaattggaggatgatagtttattagttaatattttaaaaataatatttttagattattatttttttttgaaaattattttttttagtatgttgtgtagaatgattttagatttttaatgagtttagttttttaatgagtgagagtagagagttttaaatatttttgtgttttgttttggatggagatttttgtttaagttattggtttaatggtttaatttttgaggagatagaatttaagtaggtagatttgtatatttttatatgatatttattatttttttttttgtgtgttttttttttttttttttttttttttttattttttttttttgtttttttaaattttttagttaattttttttttgttttttagtttttgtttatatagaaaatttggttttagagaatagtatttaaatagtttttaattaaaatgtattatgtgtggtaatgtaaaaaattattagaatagtttttttttatttaaaatatgatttttgtttattgttttggtttttttgtttttgtgttttaggttaaatattatttagatttttgtgaggttaggtgtttttttattaattatttgaaaggtttagagaatggtatttatattaaagttagttttaatgataaaggatatttggttatggtaaatataagtattttttagttttttgttttatttggtaaaaagttatttttattttagttataatataataaaggattaattgatgggagtattttttttattttttaaaaaataaattgagttaattttatgagtttatttagaggaattaattagggaataggaaatttttaaagttatttttaaattgatattgaataaagtttagggaatagatggttttttatttgaattttttaaaatttttagtattttattaatttttttataggaatgaaaaaaaattgttaaatgaatttgagtaaattattttattaggtgtttagtttttttaagattttttttgtattaagaaaaaaagaaaatataataggtattttttttattgatattattataattttatttgtatatgtgagttttttttttagggtttattttaaattttttttgtatttttgattattaagttgggggaatgatttttttaattggtgtagttgattatgtataattgtttagagtataaggatagtgttaatatatataaagttgagaatgaggttattgtttaagtaaaatagaaaaatagaaaataatttttgttattttgttttagatatttggagatttttggggtaagagatggagaggataaattgtattattttaatagttgagtagattttttttttttgtataaatttgatatgtagaaatattgtgaataagagagatattgttttttatttgtatagttaataagaagttgttttattaaagtttttagaaggatgaattgttggaatttatattttatttatttaaaggatgtttatatataattttttaagataatttggtagaaaattttaaaatatttttttttttttaaaatttgatagataaaattgtatatatatattatgtataataggatgttttaaaatatatggatattgtaggatagttaaattaagttaattaatatgtatattattttatatagttgttatttttgtaataagtatatttaaaatttatttttttagtattttttaagaatataatatattgtgatgaattatatttttatgttgtagaatagagtttttaaaaatattttttttatttaattgaagttttgtaattttttattaataggtttttattatttttttt

SEQ ID NO: 3672 - DNA, 2493 bp, Artificial Sequence
  chemically treated genomic DNA (Homo sapiens)
gaggaaggtaatggggatttgttggtaaaaagttataaaattttagttaaataagaagaatatttttaagagttttattttataatatggaggtatagtttattataatgtattatatttttgaaaaatgttaagagagtagattttaaatatgtttattataaaaataataattatgtaaggtaatgtgtatattaattagtttaatttagttattttataatgtttatatattttaaaatattttgttgtatatagtatgtatatataattttatttgttaaattttaaaaagaaaaaagtgttttaaaattttttattaaattattttggaggattgtatgtagatattttttgaatagataaagtataaattttagtagtttatttttttagaggttttaataggatagttttttattaattatgtaaatgagaggtaatgttttttttatttataatgtttttatatgttaaatttgtatggggaaaaaaaatttatttaattattgggataatatagtttattttttttattttttgttttagaaatttttagatatttgaaataaaatgataaaaattgttttttatttttttattttgtttgaataatggttttatttttgattttgtgtgtgttgatattgtttttgtgttttgagtagttgtgtatgattagttgtattaattaagagaattatttttttagtttggtagttagaaatgtaggggaagtttagaatgagttttgggggaagaatttatatgtataaatgaaattatagtaatattagtagagaggatatttgttgtatttttttttttttttagtgtaaaaggaattttaggggaattgaatatttggtgaaatagtttgtttaaatttatttagtaatttttttttatttttataggggaattagtagagtgttaaaggttttaaagaatttagatgaaaagttatttgttttttgggttttgtttaatgttaatttaaggatggttttggagattttttattttttaattaatttttttagatgagtttgtggggttggtttaatttattttttgaaagatggaaaaaatgtttttattaattagttttttgttatgttgtgattgagatggaaatagttttttgttaaatggagtgaggagttgagagatgtttgtgtttgttgtggttaggtgttttttgttattaggattggttttgatgtaagtattattttttgggttttttagataattggtgagaaagtatttggttttgtagaaatttgagtaatatttagtttgaagtataaagatagggaaattaaagtagtgaataggagttatattttaaatagaaaaaaattgttttaataattttttgtattattatatgtaatgtattttagttggaggttgtttgagtattgttttttagaattagattttttgtgtggataaggattagggggtagggaaagggttaattgaggggtttggagaaatagaaaagggaaatagagaaaaagaggagggggaaaaagagatatatgagaggagaggtgatgggtgttatgtaaaagtgtatagatttgtttgtttaaattttatttttttaaagattggattattgagttagtggtttgagtaggaatttttatttaggataagatataaagatgtttgaggttttttgtttttatttgttgggagattaggtttattgggagtttaaggttattttgtgtagtatattgaaagaaatgatttttaaggaaaaatgatgatttgagagtattatttttagaatattaattaatgagttattattttttaattgttttatttttaaggtgtttgataattttgtattgaggttatgtttggtttatttaaattataggttgttttattagttaggttaagttttgaattttagtatgttagtgggaaggagggtatgataggggaaatgttagttagaaaggaataggatgggaatattttagaatttttgtttgtgtggattgttggaaagagaagggaattaatgaggagggagagtagtaggttagatttatgtagtgtttttatattttttttttaaattttgtagggtgtttttgttaattagttaagggaaagaaaataagtgtagttattgttttttttgtttgggattttgggaatatattgttttttaggatattttagtaatagggtgatatatattattagtaatgtgatttgttttgtgtgtgtgtgtgtgtgtgtgtgtgtgtgtgtgtgtgagagagagagagagagagagagagaggagagagagagaaagagagagagagaataggtatgatggagtagtagttgtaatttttggtttgttttattatggagtggaagttattgttgatgataattagagaggaggaatattatggtgtaggaatagaaatttttgtagttaagagttttagggtttattgtttggttaaa

SEQ ID NO: 3673 - DNA, 2438 bp, Artificial Sequence
  chemically treated genomic DNA (Homo sapiens)
gagttagtgaaatttaattttgttgtttataattaaagaattttaattaagtatgttatttattaaaatggagatagttaaagtttaatgtttagtatttaaaatttttagtaaatttttgtgatataaaaaaaaattattgtttgggtgtagtggtttatgtttgtaattttagtattttgggaagttgaggtaggtagattatgaggttaggagattgagattattttggttaatgtggtgaaattttgtttttattaaaaataaaaaaaaattagttgggtatggtggtgggtgtttgtagttttaattatttgagaggttgaggtaggagaatggtgtgaatttaggaggtggaggttgtagtgagttaagattatattattgtattttagtttgggtaatagagtgagattttgttttaaaaaaaaaaaattattaaatttttatttgttttgttgatatatattgtagtttaagtttatttttttaattttattaggaattagaatttttttatgttttatttgtttttattttaaaaaatatttatgtttattttgttttaaaaataagatgatgtaattgatatttatatagaaaattgaaataatgaaggaaaagttaaaatgaagggttttttttttaaaaagagttataaaataaatttaaaagtttataattttgattattggattaatttgttttaaatattttatttttggtttgttattttattttggtttttttttagatttatttgggaagatttttttttttaaatatatgtgattagtttttattaaagattagttttatttgaagatttaggtgtaggatttgggatgtaaatatttttaaatgtattgggtaaattttgatgtataataaaggttgagagtttgagatttagggatttaattaattatgtaagatgtttaaaatggaatgttgatttttatatgatatttgttaaatgtagaaaattttgtttggatttggaaataaaaatgtgagtatgaagttttggtaaaataaatttttttgaaaaatattaatattttataattatttttttattaaaataaaatagtgttaagtatatagttttttttaagtaataaatttttaaaattaaagtgaaattttgaaattatttttttaaatagtatttgtttggtagatagatggtatgttttattttattttttgtttttatttggtggagtttatggggtattttgagaattaatgggtaattaagaattgggtgttaatttaggtatttgatttggaaattgagtttttgaaaattattaattttaaatatagtgtaagttttttttattatgttattttagaaattggtaataagaatattttaaaaatatttagaaatgtaggagttagattttttgggttgtaggtggaggatatatagttgttaggaaatggaagatatttgttatgtttttgagtttttttttggtgggtagtggatggaggataataaggtttgttgtagtattaatttgggtattaaatagtaataaataaatgtgatttaagagtattgttgggagatttttttgaaagagtatgtatagtagtttttggtagtaaggaattaaggttggtagttttaagttatttttgttaaatgtaaagagtgttgaaaaagttttatatttgtaattattagttagtagtattttaggagatattattttattagatatgattaattttttgttttagagagtttagtagaagtttatagaaatttatagtttatgtgatattgtgttaggttgataggtattaatttgagattgaggtgtgaaaaaagattatttgaaaattttattaaaaggtagatttttgaggtttagttttatatattttgatttataaaaattgtagaggaattaggaatttgtattttattaagtattttaggggtatttttggtataagtggtttgtaggtaatatttggggaaattaataatgattaatattatgtttttattaaggaaagttaattttagggaaaaaagagtatttgaaaatttgagtaaagaaggatttggtaggggtttttggtttaagtaagaaagttttaaagaatagggagtgataggtaagtttagattgtaagatattttagaaagaaggggagaattaaagggaggagaggtgagtagttgttaggaataaattttagaattataaaattttttttaagatttattttggggaggagaatagtttgagaagtaaaagattataaggaaatattggattatttaatattgattaaatgttattattagttagtattgtattaggtgttttagaaatattattattattaataggtagttgtagtttataggttaggtgtgtggattttaggggtagtggttgtttatgtat

SEQ ID NO: 3674 - DNA, 2438 bp, Artificial Sequence
  chemically treated genomic DNA (Homo sapiens)
atatgtgagtaattattgtttttagagtttatgtatttaatttataggttgtagttatttattagtgatggtgatatttttaaagtatttggtgtaatgttgattggtagtaatatttggttaatgttggatgatttgatatttttttatggttttttattttttaaattgtttttttttttagaatagattttaggaaaagttttgtaattttgaggtttgtttttagtaattgtttattttttttttttttggttttttttttttttttggaatattttgtaatttggatttatttattattttttgttttttgaggtttttttatttgagttagaaatttttgttagatttttttttatttaggtttttaaatatttttttttttttaaaattaattttttttaatggaagtatgatattaattattattggtttttttaagtgttgtttatagattatttgtattaaaagtatttttggaatgtttgataaagtgtaggtttttgatttttttataatttttgtaaattagaatatgtgaagttgagttttagagatttgttttttaataagatttttaagtgatttttttttatattttagttttaggttgatgtttgttagtttagtataatgttatatagattgtaaatttttatagatttttgttgaattttttagaataaggagttaattgtgtttgatgaagtaatgttttttaaggtgttattgattggtagttgtaggtgtgaaatttttttagtattttttatatttaataaaaatggtttagggttattagttttgattttttattattaaggattattgtgtatgtttttttagaaaggttttttaataatgtttttaaattatatttatttattattatttagtatttagattaatattatagtagattttattgttttttatttattatttgttaaaggggggtttagggatatagtaggtgttttttattttttggtagttgtgtgttttttatttgtagtttagaaaatttggtttttgtatttttaaatatttttagagtgtttttattattagtttttgggatagtataataaggagggtttgtgttatatttggaattgatggtttttaaagatttaatttttaaattaaatatttaaattggtatttaatttttaattatttattgatttttaaaatattttatgaattttattaagtagaaatgggaaatgaaataaaatatgttatttgtttattggatggatgttatttgaaggagtggttttaaaattttattttggttttaaagatttgttatttggaagaagttatgtatttggtattattttattttgatggaaaaataattgtagagtattagtgttttttaagagagtttattttattgaagttttatgtttatatttttgtttttaaatttagataaaattttttatatttgataagtattatgtgaagattaatgttttattttaagtattttgtatgattgattggatttttaagttttaagtttttaatttttattgtgtattagaatttatttgatatatttgaaaatgtttgtattttaggttttatatttagatttttagataaaattggtttttagtgagagttagttatatgtatttaaaaaaaaaaatttttttaagtgagtttaagggaaaattagagtagaatagtagattagaaatgaagtgtttgaaataaattaatttgatgattaggattatggatttttaaatttgttttataattttttttggaaaaaaaattttttattttaattttttttttattgttttaattttttatgtaaatgttaattatattattttatttttggaataagatgagtataaatattttttagagtggaagtaaataaaatatgaaagaattttgatttttaatggaattaagagaatgaatttaaattatagtgtatattaataaggtagatggaggtttaataattttttttttttgagatggagttttattttgttgtttaggttggagtgtagtggtgtgattttggtttattgtaatttttgttttttaggtttatgttatttttttattttagttttttgagtagttgggattataggtatttgttattatgtttagttaatttttttttatttttagtagagatggggttttattatgttagttaggatggttttgattttttgattttgtgatttgtttgttttagttttttaaagtgttgggattataggtgtgagttattgtgtttggataataatttttttttatattataaagatttattgagaattttaagtgttagatattgggttttggttgtttttattttggtagatgatatatttggttagggttttttggttgtaagtaatggaattaaattttattaattt

SEQ ID NO: 3675 - DNA, 2449 bp, Artificial Sequence
  chemically treated genomic DNA (Homo sapiens)
taattgtggttattaaattttgtttttgtaatgtaaaagtatagataatatgtaaatgaataagtgtggttgtgtttttataaaattttatttataaaaataggtggggggttagattgttttttttttattgtatataaattgaaaaataagaggtaaaattagagggattttagggtggtttttaattttgtttttttttaattgtgttagagaaagagagaatataagttatatttgtttttttggttgttaatttttttgttaattttatttttatatataaaaggtgagtattaagtttatttggtagtgttgatggggggattaagtgaaataatgtaaaaatttgggatgatgttagatttgtttaaagatatttatattttttttgttttttgttatatttttttatttgtttttagaatttagttttaaggtttgggaatttaaatattgtttttaattaagtagttaaggttttagatgataagtttgtgtgtgtttggaaaatgtggttttatgatgtgtatatttaggattggtgtagttgttatattgttattttttagtgtagggtgttggggtttgaattttgataatttttgtgggatattttagaaggattaggttttatttttaaaggggttatagtgagtagagttttggttttatttttaaaggggttatagtgagtagagtttaggatgttatggggttgtagtttagaattattaggtatttagttttattttttttttaagaagatatgttgttttttgtaaatattatattttagttttttggtataattttaaataatgttatttttgggaaaagttgataagtggtgagaatttaagtttttttatttgttgggaataaaagtgggtagatatgtagaagtttttttttattttatatagttgtatttttttggtatttattttttttttattttttggaattgagttggttagagatgaggattggtatgttgttttttttagttttgttttgtgtggtgtttgttttgtaatttttttatgtttgttttaataggaaaaaaagtaaagagattgatatatagttattttgaggttagattgttattgaaatagatttttttaaataaaaataagggttgtttttgtttgtaaggttttgtaatgaaatagagttaataaaaattgtatgggaaatttatattgtagttataaaaatattaaaaaatagaatttttagttaaagttagtagtgattgttggtttgaggtagaaattagggagtaaaatattttgaaatatttattgaaagtgaagagagggaagaattattattttttatttatttggttaattttttagaagtaaagttagagttatatttgtttagtaagtgattaagtattgggtttttaagtgtaggatagattatttttttttgtggttaatttgtaataaatagaaaatagggttatttaaaaattagtataaatatatataagaaataaagttgttttaataggaaaatttggtaagattattgatgaaaatgtttatagttttatttgttttttttttttagtttttgtttttgtgtgtgtatattagatgtttttgaggttaaagtttgtgtgtttttttgggttggagtatagggatattttttattattttttagtttttagtgtttagtgttattatttggaatattttttggaattttggagggatggtttgtttttatagttttttattagtaggggttttttttttaagaatggtgtttttaggatttttttaggtttagttttaggtgttattagattattagggaatggtgattgattatttgagaaatgtatttatttgtatttaggatttattaagttattattttaatgggaatttattaattggttttattaatttttatttagaattataagtattaaaagttatagtatttaagataagtgagtttttagtttttggttgtaataggggaatttataagaatatttagaagtgatttaggtttttttttttttttttttttaaagtatataaattttggttatttttataggtttttgttaattaatattattattgtggaaatgggggttgttttataaataagttgtaataaatgggatttttattgttggtggaaaagtttggggaataattagtagatttatggagattttttgattttgggtatttgtatggtaatggttaattttggagattatttagggaaatggggttggattttttattttagggtatatttatattgttagttatagtttttaaattgtagtgggataaatgtgggaaaatattttgtgaaatattagataaatgaatttggtgttgattaattttaattaggaaaattggttttgttttgttaagtgttgtatagtagttaagatttg

SEQ ID NO: 3676 - DNA, 2449 bp, Artificial Sequence
  chemically treated genomic DNA (Homo sapiens)
tgagttttggttgttgtatagtatttagtaaagtagagttagtttttttagttgagattggttaatattaggtttatttgtttagtattttataaaatatttttttatatttgttttattgtagtttgaaggttgtaattgataatataaatgtgttttaaggtggaaagtttgattttatttttttgagtgatttttagggttggttattattatgtagatgtttggagttaagggatttttatagatttgttaattattttttagatttttttattagtaataaaaattttatttgttgtagtttgtttgtagaatagtttttatttttatagtggtggtattaattagtaaaaatttgtgaaaatgattagagtttatgtgttttaaggagagggaaagaaaggaatttggattatttttaaatatttttataaatttttttattgtaattaggagttaaaagtttatttgttttagatattgtgatttttaatgtttgtagttttaagtgggaattagtgaagttaattagtgagtttttattagaatagtgatttggtgaattttgaatgtaaatagatatattttttagataattaattattattttttgatgatttagtggtgtttgaaattgagtttggagagattttggaagtattatttttagaggaaagatttttgttagtggggagttgtagaaataaattatttttttagggttttagaagatattttagatgatgatattgggtattggggattggagagtgatgaagggtgtttttgtattttagtttaggaggatatataagttttaattttagagatatttgatatatatatatagggatagaggttgaaggagaagaatgaatgaagttgtagatgtttttgttaatgattttattaagtttttttgttggagtagttttgttttttatatatgtttgtgttaatttttaagtggttttattttttgtttgttataggttagttataggagaaaatggtttgttttatgtttaaaaatttagtatttaattatttgttaagtaagtgtgattttagttttatttttgaagggttaattaaatggataaagggtaataatttttttttttttttatttttaatgagtgttttagaatgttttattttttaatttttattttgagttaataattattgttgattttagttaagaattttattttttaatatttttatagttgtaatgtgagttttttatgtagtttttattaattttgttttattgtaaggttttgtaagtaaaaatggtttttatttttatttggagaaatttattttggtgataatttagttttggggtagttatatgttaatttttttgtttttttttttgttgaaataagtatgggaaagttgtaagataaatgttatatagggtagggttgaaggaagtagtatattgatttttatttttggttagtttaattttagaaagtgaaaggaaagtgaatgttgaggaggtgtaattatgtaaggtagaagaaaatttttgtatgtttatttatttttatttttaatagatgaaaaggtttaaatttttattatttattaattttttttagaaatgatattatttgggattatgttgggaggttggagtgtaatgtttataagaagtagtatgtttttttaaaaaagaaatgggattaggtgtttggtgattttggattgtaattttatggtattttaaattttatttattgtgatttttttggagataaagttaaaattttatttattgtgatttttttggagataaagtttagtttttttgaggtgttttatagggattattaaaatttaaattttagtattttatattaagaaatggtagtatgatagttgtattagttttaggtgtgtatattatgaggttatgttttttaaatatatataagtttgttatttgaagttttggttgtttgattgaaaatagtatttggatttttaaattttaaagttaaattttgaaaataaatgggaaaatataatagagagtaggggaagtgtgaatatttttgaataagtttgatattgttttagatttttatattattttatttaatttttttgttaatattattaagtagatttaatatttattttttatatatgaagataaggttggtaagagaattagtagttaaagaagtaggtataatttatattttttttttttttagtataattagaaaaagataaagttggaagttattttagagtttttttggttttattttttgttttttagtttatgtgtaatagaagagggataatttagttttttatttgtttttgtaaatgaagttttatggagatatagttatatttgtttatttatatattatttatatttttgtattgtaaaggtagggtttaatagttataatta

SEQ ID NO: 3677 - DNA, 2482 bp, Artificial Sequence
  chemically treated genomic DNA (Homo sapiens)
tatttattattttttataaatttatggattggttggtttggaagttttgttgatttggtttgagtttggttgatttagtttggtttgatttattaatttttggtttgtttggataatttgtttttttttatgttgttttttaatttttagtagattagtttggtttttttgtgtggtggagtttgagattttaaagagtaagtaaaagtttgtaaggttttttgaggtttaggtttggaattggttttgttatttttgttatattttatgtgttagtttaagatatatggttaaatttaggtttaaggaatggaaaataaatattattatttgatggaagaaattgttaaattatattgtatggaagagaaataattggaggaaattttgtaattaatttataatagagtagtttgattgttttaataaataaattttaaattttaggattaaatattataatgtttattttttgtttatagtttaattttgtattatagtttaatagaggtgggtaggggagtgagagagattgttttatatagttatttaggtattaagtttttttttgtttagttgttgtgttatttaaagttatagagtttttgattgggttttgtgtttttatttattagatgagagaagagagtaaatatgtagaagaaatatttgtttttaattgttttaatttggaggtgttatatatattatttttgtttttttttagggttagaatttggttatatgattgaatagaattgtaagggaagttgggaaatgtggtttagttgttaggagaaagaggaaaatggtttattgagtatttagttagattttgttgtagttataggttttgtgattgaggaatttatttttaaagaaagtgtattgggatatattttaaaagttgatgtatgatagtatggggtagataaaggttaaaaagataaggttatgattaagtaggggagaaatatatagatatttatgtaaatatttagggtatgagtaagaatttggggaaagatttggagttaggaggaggtgggtgtttggtaggtggtgagattttaataggtagaggtagaagtgaagggtaaagggaaattttgggttatatggggaaattagatttgtttgtttgtttaatattgtggtttttagtgggatttaaagttgatgttttaatgtaggatggttatgttagtgttgattagaataatgtattttttagggttatattaaaaaattatgtttagtgttttatttgtatttttaaaatatgtatatatatgtgtgggttagaaaaggttgtgtttaggatatgtatttttatgtgaattgtaggtaattgtataagtaaataggaagttgtgtaggtatgtaggtagttgtttgttgagaggtgtgtgtgggtatgggtaggtgtgggttttgtttgtttgagtataattttaaaggttttttttgatggaagggagggtaagtaagtttttgggtatttgtttttttaattgttgttgttgtttgttttttttaaggttttttttttgggtagggttatgttagggagtatttgtggttgtaagaaaaaggtgttgttttaaggtttttgttaattgttgagttggtgaataaatgttttgaaattttttttgttgagaattttattttttggttttttttttgattttatggtttagtttttttagtttattttttgttttttttttttgtttgttttttagatgtttttttgtgaatttgtttttaattattttttgattttttgaattagagttatttaatagaattatttgtaaaggtatttgtattgttttttgttgtagttattagttatatatagttattgagtatttgatatggggtttatgggtttgagaaattgatttttaaattttatttaagttaaatataaatagatatatgtggttagtggtttttttattggatagtatagttttagaatagtttttatgggtaataattttttttttatagtttgttttattatttttagtttgtatttttttattttatttgtttttttgaattatgtttataaatattttaatttgattattttgtggtttttttaatgtaatgtggttaaggttgaattttttgtttttatttataaaatttatttttttttgattttttttttgttattttatttttggtttttttttattagggaatagttttgattagattatgttatttatatatattattattaagataggtttaggttttgtggatttgagttaatttgggatttttatttaaaaaaaaaattatagagtataaatgtaaaattagatttagagttttggagtatttttggtaagtgaagatgtttgtgaagtttaagttttatttgttttattgtaaattggttttagtttattattggaatattttatagtttttgggtttgaattttagtttgattatt

SEQ ID NO: 3678 - DNA, 2482 bp, Artificial Sequence
  chemically treated genomic DNA (Homo sapiens)
agtggttagattgagatttaaatttagaaattgtagaatattttaatgataaattgaggttaatttgtagtaaagtaaataaagtttaagttttatagatatttttatttgttgaggatgttttaaggttttaaatttaattttgtatttgtattttgtaattttttttttaagtagagattttaaattgatttagatttataaaatttggatttattttgatgataatatatatgagtaatatggtttgattagaattgttttttaataagggaggattaaggataaagtgataggaggaaggttaagaagaaatgagttttgtgggtagagataaagagtttaattttagttatattgtattaaggggattatagaataattaaattggagtatttgtaaatatggtttaggagagtaggtagggtaaggagatatagattgggaataatggggtagattgtaagggagaaattattatttataaagattgttttagagttatgttgtttaatagagaagttattagttatatgtgtttatttatatttaatttaaataaaatttaaaagttagttttttaggtttataagttttatgttaagtgtttaatgattatatgtggttagtggttataataaggaatagtgtaggtatttttgtagatagttttgttggatagttttggtttagaaggttagaaagtgattagggataggtttatgggaaaatatttgaggaataaatagaagaagaagatagggaataaattggggaaattgggttatagaattaggaagagaattaggagatggaatttttagtaaagagaattttaaaatgtttatttattagtttggtagttagtaaagattttgaaatggtattttttttttatagttataaatattttttgatatggttttgtttagaaaggaaattttgagaaggataaatgatagtagtagttagggaagtaggtgtttagaggtttgtttgtttttttttttattaggagaagtttttaaaattgtatttaaatagataaggtttatgtttgtttatgtttatatgtattttttaataggtagttgtttgtatatttatgtaattttttgtttgtttgtgtaattatttatggtttatataagaatgtatgttttgagtgtagttttttttggtttatatatgtatgtgtatattttgaaggtgtaaatgaggtattgagtatagttttttaatgtagttttaaggggtatattattttgattagtattaatatagttgttttatattaaggtattgattttaggttttattggaggttatagtgttaaataagtaaataaatttagtttttttgtgtggtttaaagtttttttttgttttttatttttatttttgtttattaaagttttattgtttgttaagtatttatttttttttaattttaagtttttttttagatttttgtttatattttaggtatttatataggtatttgtgtgttttttttttatttaattatgattttgtttttttaatttttgtttgttttatattattatgtattaatttttgaaatgtgttttagtgtattttttttgggaatgagttttttagttatagagtttgtgattgtagtagagtttagttaggtgtttaataagttattttttttttttttttaatagttggattatattttttagttttttttgtagttttatttaattatgtgattaagttttagttttggaaaggggtagaagtgatatgtatgatatttttaggttgaggtaattaaggatagatattttttttatatatttgttttttttttttatttagtggatggaaatgtaggatttaattaaaggttttatggttttggataatatagtaattagatagaaggaaatttggtatttgaatggttgtgtggagtaattttttttatttttttgtttatttttattggattgtgatataagattggattgtgaataagaaataaatattatgatgtttaattttaagatttgagatttgtttattagagtaattaggttattttgttgtaaattgattgtaaaattttttttaattattttttttttatataatgtgatttagtagttttttttattaagtggtggtgtttattttttattttttggatttaggtttggttatgtgttttgaattggtatatgaaatgtagtagaagtgatagagttagttttaagtttaggttttaagagattttgtaggtttttgtttattttttgagattttagattttattatgtgaagaagttagattagtttgttgaaggttgagaaataatatggagaagagtgaattgtttaagtagattagaagttaataaattaagttaagttgaattaattaaatttagattagattagtagaatttttgagttagttaatttatagatttatgaaaaataataagtg

SEQ ID NO: 3679 - DNA, 2492 bp, Artificial Sequence
  chemically treated genomic DNA (Homo sapiens)
ggttattgatatggtttggttttgtttttatttaaattgtattttgaattataataatttttgtgttaaaggtggggttaggtggagaattattgatttatgggggtagttttttttatgttgtttttgtggtagtgaataagttttatgagatttgatggttttaaaaaggggagtttttttgtataagtttttttttttgtttgttattatgtaagatgggatttgttttttttttgttttttgttatgattgtgaggtttttttagttatgtggaattgtgagtttattaagttttttttttttataaattgtttaattttaggtatattttgattagtagtttgagaatagattaatatagttatttaaattaattttgtaatgattagaggtataaatatagatgatgatgatggtgatgaagataatagatttattttagaataatgagaaattgtggaaagtttgtttgagttgattttaaaatagatattagtagataatattatagatgaaattaaattgtagttttaggaaaaatattatttttaaatttagggttattaattattttggaattattttatagttgtttaaatgtagtttgtatgtggttgtttatttgatggttttatttttttttgattttttttttattttaattttgttgaagagattaaatgattgtttgttaaaaaggtgtataaagtggaattttgtagaagaaataaaaataaatttttttgtgtatttgaatttattgatatatttagtgtttgattttattttttagtgtttgtgattttgggtaagattttttgtttagggatttggagttagttaggtaatgattgttgtgtgtatttagtatgtatgttaggtatagttgtaaggtttttaatttttttgtttgtttgttagttattattttagatttatttgaaagttagtaaggagatagtggttgtaaagtggttttttgtttttaaagtttaggttttttgaggttttagaatgataaaatggagaggtagggttaggggaagagggtttggtgagatttgttttggtttttgttggttttttgttaatgtttgtagatggtgggggtttatggttgggatgtttgtttaggttttggtagttttatgtgttttagtatttttttaaaagttgattatttggtttgttttttttgtgagttggtttattattattttattgtgtggtggtaatttttatttgtattatgaatattgattttatgtttgtttttttatttgaattataggtgggtaggttggtggtttgtattgtttgtttagttttagtttttttggtagttatttgaatagttttaaagaaaagttgtttgtttgagtatttagggataatagagagtggttataggttgttatagtgatttattaaaagataggaaaatgagagaaaagatttttattttttgtattagttgtttgtttttttgtttttttttattttttgttttttttttttttttttttttttttttattttttttttttttttattttttttttttttttttttttttgtttttttttttttttgtgtttttttttttgtttttttttttgtttttttttttgttttttttttgtttatatttttaaaatgagagagggaaaaagatggttgtgtttttaaaatttgtataaatttatgggatataaatattattttattatatggatatattgtatagtagtgaagtgtgagttttttgtgtgtttgttgtttaaatgttgtgttaagtagatgtttgagggatgttgggtttgtttgttatatttaatgatatattttattaaaggtagatagaatttagggttagtttttgaaggatatgagaggagattgagtatttgtaggtgtgtgtgtgtatttagtgtatatatatatatatatatatatatattgtaaatggtgttagttgttttggaaaaaggaagttttttttttagaaaaataaggtagggtgttttttttttttaatttttttttttttagatatattttagtagtttatgattttttgagtttttattttgaatatagtgtttgttatttgaagaggttatttttgtattgtttagtttgggttttttttaagggaatgatgtatggagagttttttttttttggtgtgttggtttttttagttttaggtttagttttattattattttgatggtttttttttatatgtaggaaatttgtgggaagtaaatatggttggagtgtgtgtagatttttaaagtgaaggttatattttggtgataatttttgtttaattaattgatttattggagtattaagtaagttgggttaggaaggatatgggagggtgggttgggtgattttggtatgttggttgtttggtgtgagtaattgtatgggggtagtttttttaaattgagttgtaaggattttgtttttagatttt

SEQ ID NO: 3680 - DNA, 2492 bp, Artificial Sequence
  chemically treated genomic DNA (Homo sapiens)
aaggtttggaaataaagtttttgtggtttagtttggaagagttgtttttatgtaattgtttatattaagtggttagtatgttagggttatttagtttatttttttgtgttttttttagtttagtttgtttagtgttttaataggttagttggttgaatagaaattgttattaagatgtagtttttattttgaaggtttgtatatattttagttatgtttattttttatagattttttgtatgtagggaggagttattggggtggtgatggggttgaatttgggattggaagaattagtatattaaggagggaagattttttatgtattatttttttgagagaagtttaggttggatagtgtaggggtggtttttttagatggtagatattgtgtttagggtaggaatttagaaggttatggattgttggagtatgtttggggagaaggagattgagaggagaggatattttgttttatttttttgagaagagagttttttttttttagaatagttggtattatttgtagtgtgtgtgtgtgtgtgtgtgtgtgtatattaaatgtatatatatatttgtaagtatttaatttttttttatattttttaaaggttaattttgggttttatttatttttaatgggatgtgttattagatgtagtaaataagtttaatgttttttaagtatttgtttaatatagtatttgggtgatgaatatataaaaagtttatgttttattattatgtaatatatttatgtagtaaaatggtatttgtattttataaatttatataaattttaaaagtatagttgttttttttttttttttattttaaaaatgtgaataaaaaggaggtagagaaagagatagaaagaaaggtagagagggaggtatagggagggaggaagatagagaaagggaaaaaaggaaaggatggaagggagggaggaataaagagaaaagagaaaagaggagagagatagagaataaaaggaagtaagagagtaggtagttggtgtaagaagtaagggtttttttttttatttttttgttttttaataaattattgtagtggtttgtgattgttttttgttatttttaaatgtttaagtaaatagtttttttttgagattatttaagtggttgttagggaggttggagttgagtaagtaatgtgagttgttggtttgtttgtttgtaatttaggtagaaaagtaagtataaagttaatatttatggtgtgggtaagaattgttattatataatgaaatggtaatgagttggtttataaaggagataagttggataattagtttttaaggaggtgttggggtatatgaggttgttagggtttgagtgggtgttttggttatgggtttttattatttgtgggtattggtagaaggttggtgggagttagggtgggttttattaggttttttttttttggttttgtttttttattttgttattttggggttttaaggagtttaaattttgaggataaaaagttgttttgtagttattgtttttttgttggtttttagatgagtttggggtgatggttggtaggtaaatgggaaaattggaaattttgtagttgtatttggtgtatatgttaaatgtatgtagtggttgttatttgattagttttagatttttaagtaggaaattttatttaaaattatagatattggggagtggagttaggtattgggtatgttagtaaatttaaatatataaagggatttatttttattttttttataagattttattttatatatttttttaataggtgattatttaatttttttagtaaaattagaataaaagaagggttaaaaggaaatgaagttattagatgaatgattatatgtaaattgtgtttagatagttatgggatggttttagggtgattggtggttttggatttgaagataatgttttttttgagattataatttgattttatttatggtgttgtttattgatgtttgttttgagattgatttaaataggttttttatagttttttattattttagagtaaatttgttgtttttattattattattattatttgtatttgtatttttagttattataaaattaatttaggtgattgtattggtttgtttttaagttgttaattaagatatatttgagattgggtaatttataaaggaaagaggtttaatgaatttatagttttatatggttggggaggttttataattatggtagaaggtaaaggagaagtaagttttattttatatggtggtaggtaagagagagagtttgtgtaggggaatttttttttttaaaattattagattttatgagatttatttattattgtaagaatagtatggggaaaattgtttttatgagttaatgattttttatttggttttgtttttgatatggggattattataatttaaggtgtgatttgggtggggataaagttaaattatattagtgatt

SEQ ID NO: 3681 - DNA, 2491 bp, Artificial Sequence
  chemically treated genomic DNA (Homo sapiens)
gaaaaaataaaaaaagtagttttaaataaatgaaatgaatgattgtaattaaaatttttttagttatatttttttatgatttttatgtgttgagaggattttaagtaaaaatagagatgggttgtttgtttattttaattattaaaagttttttataagtgagttgaattttgtttaaaaggatattagattttgttatttaattattgtttgttttttagagttattatgaggaagtttatttttaagaatttgggaggttttagttgtagtggattataagaggtattggaatagttgatatattgaggtgttattaagaattatattattattgaagtataattttgttgtagatatgattgttttgggtgtaggtttttatgttagtgttaaaaatgttaagatttggagaaaggagaggagaaagtagagttattttttttgtatgttttgttgtttggaaaggagatagaaaaatagtaggaaatgtttatttttttttttgggattttttagggattttttatttgaataggatgattgaattttgttttggtaagggatgatttgttggaagatgaaaagttttgtggtggaatatgagtggagttttttatagttttttaggtattgttggtgtagtatggggtagagggtgtggtataggtgaggaggtgggtgtggttttagtttatggttgatagtttttttgttttttgttagggtagttttggtatgagtagttgggaattagattttgggtaaagtaggagtaaagagtttttttgagtttttttgattgattttaatggatttgtttttagaggggtatgaaggtggttgtgattttataagtagaatggaagtgatttgatttatattgggtttgggaaaattggtttaggtgtggtaaaggtatagagtgtgaaataggtggggaaaataaatttaagattttgaatttttttatggtttttaaaggggaagttatgggtatagtgaatggaggggttgtttttagtttatttggtgttgtggtgaattgttttagggtttggtatattgttattattttaagatagatgggaaataaatattattagtatgttgataagtgtttgtttttttttagtattagggttaagaaaaataaagtggggagggtattaagttttggagtaagtttttaaaaggtttttttttttgaattttttatggttgtttatttataatagttataattataatagagaggaaaagattttaattatttttgggatatattttgttaaaattatatttaagtattttttatttgtaagtgagaagtattattttttattatgtttttaaagtagtgtggggaagttgtgtgtataaattaaggtgttgttgtggtttgttgttttttgtgaatttttggaaaggattattaagaaggatgttttgataattgtttgttaggtaatttgtataagaggaaagaggtttttttgaagattattaaaaatgatttattattattggttatatatatatatgttgttttattatttaaaagtataaattatatattggtaagtaattgtgtttattagattattttaggttttgggaggagtagagaggtataaagtgtggtgattatttttaaggaaagtgtattttaattagggagataagaataattatatgtgtagtagttaaaagttatataaaagtttatgattaagtggtgagttgtgaataataggttatttatgttgtgatttttttagtgatgatataagtgatattttggaagaggtaaaatttgagataggtttttaaggattggtgttatttggataggttgaagaggagtaggagggtttttggatgtggagaatggtatgtataaaagtatggaggtgagaatgtatatatgtgtttgggatttttaaaatagggtagtttgattggattggagtttttgggtaatgatgagtgagtaataaaatggaagagaatagggttagaaggggtagataggagttatttatttttataatatgtatttattttttaattttattataaatttatattaaatttttttgtgttgattatttgagtattgtaatttaaaaagagtaatttgtgtatagagttttgtattgggttatagagtttgttttagttgagttttttttagaagtagatatagatagaaagagtttagagtaagtagtttattagggaggttattttaggaaattttagtagaggggtaggaaagtgagataggaagggaaaggaaggtagttagggaagtgttattaagatattaatatggataaatggagtaaaattttagtggtgaattttagaaattagtgtataaaatgtgttttagagtgaatttatttgggaggtgaggaagttggggtatttatttattagttgttattagttattgggtgagggttgtttttgagggtattaattt

SEQ ID NO: 3682 - DNA, 2491 bp, Artificial Sequence
  chemically treated genomic DNA (Homo sapiens)
aagttaatgtttttaaaagtagtttttatttagtgattgatggtaattggtggataaatattttaatttttttattttttagatgagtttattttgaggtatattttatatattgatttttagagtttattattgggattttgttttatttgtttatgttggtattttaatagtatttttttgattgtttttttttttttttttgttttatttttttgtttttttgttaaagttttttagaatgatttttttagtaaattatttgttttggattttttttatttgtgtttgtttttggggaaaatttaattaagatagattttgtaatttagtatagggttttgtatatggattattttttttaaattataatatttaaatagttaatatagaaaaatttggtgtgggtttgtaatggagttgagaagtgaatgtatgttatgaggatgggtaatttttgtttgttttttttgattttgtttttttttattttattgtttatttattattgtttaaaggttttaatttaattaggttgttttgttttagaagttttagatatatatgtgtatttttatttttgtgtttttgtgtatgttattttttatatttgaaagtttttttatttttttttaatttgtttagatggtattaatttttgaagatttgttttaagttttgttttttttaagatgttgtttgtgttattgttaagagaattatagtatgggtagtttgttatttataatttattatttaattataggtttttgtatagtttttaattattgtatgtgtaattgtttttgtttttttaattaaaatgtattttttttgggaataattattatattttgtatttttttattttttttagggtttaaaatagtttgataaatataattatttgttaatgtatgatttatgtttttaagtaataaaataatatgtatgtgtatgattaatagtaatgaattatttttaatgatttttagaaaggtttttttttttttatgtaaattgtttggtagatagttattagagtattttttttggtgattttttttagaagtttataaaagataataggttatagtaatattttggtttatgtatataatttttttatgttgttttaaaggtataataaaagataatgttttttgtttataaataaaaagtgtttaaatgtaattttgataaaatgtgttttaggggtgattgaagtttttttttttttgttgtgattgtaattgttataaatagataattgtaagagatttaaaaggggaaattttttaaaggtttattttagggtttgatattttttttattttattttttttagttttaatgttgaaggaaaataaatatttattgatatattaatggtgtttattttttatttgttttggaatggtggtaatgtgttaagttttgagatagtttattatagtgttaagtgagttgaaggtagtttttttatttattgtatttatggttttttttttgggggttatggaaaagtttaggattttgaatttattttttttatttgttttatattttgtatttttgttatatttaagttaatttttttaggtttggtgtagattaaattatttttattttgtttatgaagttatagttatttttatgtttttttagaaataggtttattgaagttagttgaggaaatttagaaaggttttttgtttttgttttgtttagagtttgatttttaattgtttatgttagagttgttttagtagggaataggaaagttgttggttgtgagttggagttatatttatttttttatttgtattatattttttgttttgtgttgtattagtaatgtttggggagttgtgaagagttttatttatgttttattataaggttttttattttttagtaagttattttttattaaagtaaagtttaattgttttgtttaggtgggaggtttttgaaagattttaagagaagaagtgagtattttttgttgtttttttgttttttttttaagtagtaaagtatatagaggaagtagttttattttttttttttttttttttaagttttagtgtttttggtattgatatgggagtttatgtttaaagtaattatgtttatagtaagattatgttttggtggtgatataatttttaatggtattttagtatattagttgttttagtgttttttataatttattgtaattgaaattttttaagtttttgaaaatggatttttttatggtgattttaaaagataagtagtaattaggtaatagaatttaatatttttttagataaagtttaatttatttgtaaggggtttttagtgattggagtgaataggtggtttgtttttatttttgtttaaaatttttttaatatatgagagttataaaaggatatggttgagaaagttttagttgtaattatttgttttatttgtttagaattgttttttttattttttt

SEQ ID NO: 3683 - DNA, 2463 bp, Artificial Sequence
  chemically treated genomic DNA (Homo sapiens)
gaaggtatttatgtttttatttaagttatttagaggaaagaagttgttgtgtgttatatttttgggtagagaagagagtatttaatgaagtttttataagtgaatttttatgttatatgtattttttgtgtataattttttggagtaatgttaagtatatattggtatttatagtaatattttaatgtttttagtttgtttaattaatttttttttaatatatgtttatataatattaaaaatgttttattaagttagatattaggatattgttgaatatgtagatatttattatatatagatggatttaaatttattttgagtttatttatttatttattagtagtgtttgtggttttgtgatattatttgtgatttaattttaagtgtgattttatttatatgtggaaattaaataagtttattttatagaagtagagagtagtaaaggtagtagaggttggggaggagaggaagagaaggggtaagtggagatattgattaaagggtataaagtttttgttagattggaggaataagttgtagtgatggatagtattgtatggagattatagttaataataattgtattgtatattttaaaattgttaaaagaatagatttttaatgtttttattataaaaaagtatgttggtgaggtgatggatatgttaattagttttaatgaatttttttataatgtatatatagtttaaaatattatattgtatttaatagatataaagaattattatttgtaaattaaaaattaattaataaaaaattagaaagttgttattttttaaatatatttatgggttaatttttttatgtggaaaagtaatgttggttttattataaatatttttttagttggttaagtagattatttaatttgaattaatatattttttttttatgaggttaataaagatattttaattaaaattaaaaaaaaattttagttttattttttttttttgttttttgatttagtttttgtaggtaagaagttgtttattattgatagagataaaatattttaatgagtgatggaatttttattttttatttaaatattatgttaatatttaatataaaatattattgttttgttttatatagaaattgtaagtttattttgtttgaaatatggggaaataaatttttgttttgattttttttttgttgttttagttgtgtgttattgatattggtgtgatttgttatgggaaggtgtaatgaggtaagattgggattgtaataattattaatttataaatatgttatggtaaagttaaggtaagttagagtgatatttttaaatattttaggaaatagtatttatgtttgaattatttattttattagtttgttttgatgaatatgggagaaattaataattttttaatataaagagtaatttaatgttattaattgggtattttatatgggttgatagattgtttttttttatttttgtttttttggtggtaatttattgagttgggaaagtttgagtttggtgtagtatttggtttttagtgatattttgttggttttatttaattttttagttgggagtatgaggtatagggaggttgaatgatttgtttaaaggttatttggtagtttaattgggattataatttaaaatttttttgatttttttattttttgtttattggattataaaatttttttgattttgtttttttaagtttgtttgagtaggaagtaaatgtttaggtttagaaaaaagaattttaaattaagtattggttaaaattatttttaaaaatgtgtgaaatttttattggtataatttttaagaaatattttatttttattttaatatttgagaatatgtgtgattatgggagtgttgtttttttttaaggggttattatgggaaagtttatatttattattgtttggatgttgttttggttaaaatattttaggaattttaaaatttgatgtttgtggtagaatataattatttgaatatataatggattttgtttatattatatttagaaatagggtatttgattttattaagtgttataaattatttggtttattttgtagtagaatttttaggtttgttttttttttagtttgtaaattttttttgggatttttttatggttggtaattttttattatttaggttttagtagaaataatatttttttagagtgagatttgttttaattttttgatgtaatggttttttttgtttgatggttttatttttttttttattatatttattagtatttataattattattgattttattttaaaaatttggtatgttttaattttgagtgtaggagtttgatttgttttgttttttagtatattttagataatgtttgatatataaaagaagtttaataaatattttttgaaagaatggatagttatttttggtaaaagaaggtttttttttt

SEQ ID NO: 3684 - DNA, 2463 bp, Artificial Sequence
  chemically treated genomic DNA (Homo sapiens)
agaagagagatttttttttattaggaatggttatttatttttttaaaaagtgtttattgagttttttttatatattaaatattgtttaggatatgttggaaaataagatagattagatttttatgtttagagttaggatatattgaatttttaagatgaaattaatgataattgtaaatgttgataaatgtaatgaagaaaaaaatggggttattagataaagaaagttattatattaggaggttagagtaagttttattttgagaaggtattatttttgttaagatttgaatgatgaaaagttgttagttatgaggaaattttggggaaaatttgtaggttgagggaggagtaagtttaagagttttattataggatgagttagatggtttatagtatttggtggagttaagtgttttgtttttgagtataatatgagtaaggtttattatatatttaagtggttgtattttattataagtattaaattttggagtttttaaaatgttttggttaaagtagtatttaaatagtgataggtatggatttttttatggtgattttttggaaagggataatatttttatggttatatatatttttaggtgttagaatgaaaatgaggtattttttaagagttatattaatggaaattttatatatttttaaagatgattttggttagtatttaatttgggatttttttttttaggtttaaatatttgttttttgtttaggtaagtttgagaagataggattaagggagttttgtggtttagtgagtaaaggatgggaaaattagaaagattttgagttataattttagttgagttattaggtgatttttaggtaagttatttgatttttttgtgttttatgtttttagttggaaaattggataagattagtaggatattattgaaaattagatgttatattgaatttaagtttttttagtttaataaattattattaaaggggtgggggtggggaggggtaatttattagtttatgtgaaatgtttaattaatgatattaggttattttttatattaaaaagttattaattttttttatatttattaaaatgaattaataaaatgagtaatttaaatatgagtattattttttgagatatttagaagtgttattttggtttgttttgattttgttatagtgtatttgtaggttaataattgttataattttagttttgttttattatatttttttatggtaagttatgttagtgttaatgatatatagttagaataataaagagaaggttaaaatgggagtttatttttttatgttttaaataaaataaatttgtagtttttatatgaaataggataataatgttttgtgttagatattaatgtgatatttagatggagagtaaaaattttattatttattagaatgttttgtttttgttaataatgaataattttttatttataaagattaaattagaaaataaaaaagaaaaataaaattggagtttttttttagttttaattaaaatgtttttattagttttatggaaaaaaagtatattaatttaagttaaataatttatttgattaattagaaggatgtttgtgatgaaattgatattgtttttttatatgaaaaagttaatttgtgagtatatttgagaagtagtaattttttaattttttattaattaatttttaatttataaataataattttttatatttattgggtataatgtgatgttttgaattatgtatatattatagaaagatttattaaagttaattaatatatttattattttattaatatatttttttgtggtgaggatattggaaatttatttttttagtagttttgaaatatgtgatataattgttattaattgtggtttttatgtagtgttatttattattataatttatttttttagtttaatagaaattttgtattttttgattaatatttttgtttgtttttttttttttttttttttttagtttttattatttttattattttttgtttttatgagatgaatttatttagtttttatatataaatgagattatatttaaaattgggttatagatagtattataagattataaatattattgatgggtaggtagatgggtttaaaataggtttaagtttatttatgtgtaataagtatttgtatatttagtaatattttggtgtttggtttagtggaatatttttaatgttatatgaatatatgttgaaagaaaattaattaagtaagttgaagatattaaaatattattgtgggtgttagtatatgtttaatattattttaaaggattatgtatagagaatgtatgtggtatgaaaatttatttatgaaaattttattaagtgtttttttttttatttgaaaatgtaatatataatagttttttttttttgagtgatttgggtggaagtatggatgttttt

SEQ ID NO: 3685 - DNA, 2485 bp, Artificial Sequence
  chemically treated genomic DNA (Homo sapiens)
atagtttaaagtttaagttataaggagtgtatttgagaatttttagttggttttatagtagtttttgaggtttttttagtatatagttattaatgaagttttttaatggtttatggttatattatgtttttgttatattttgtatttttgggattttattttgaatatgtgttagtagtaaataatttttttgttttatttattattaaagttaggaaataatttttagggatgatttttaagataataattatttgttggaagtggaagttatgagtttgtttagtggtatagaatattttttttttattgagagttttgaaaatttgttgtttttatgtataatagagattataggtataatagagagaagaatggtatgtattttaagttttaattttaagaatttatttggtattagtgagtagtataattttattttttttttaattttgttttttttgaattaattttttttattgtttgataaattatatggtttgattgtgtatgttatatgaaaatatatttgaaagatatttagatttttttttggaattaagtaaaagaagtatttggttataaatatgtggtaattgggtttgaggttatgtatatatatttttttttagttgtagttaaaattaggtttgggggtttttgatgagtttttttgtggttattgttattaaagaaaaatggatttttttgttgtatgtttagaaaattagatattattattatttgattatttatttattggtatagtttgttttatttattaaagaaaagataaggttgaaattggatttatttaatgtatgtttgtggttttatgtgtttgtagataataagtagttttgggtgtttgtttagggttgattttttaggttataattggtattattttgatttttttttggatgagtttatattgttatggagtttgtagttttaaataagaaaatatttataaaaatgagaggggtaaaatgttttttttggaagtagtaggggagggggtaggaaggggaggtttttgtttatttatggaaaatggatgtgtgttttatggtagttgtagtttaagtaaatataaattttgaattagagattatatttgttatttttttagtattagtaatattaaattaaaatatagttttatttggttaattttaaagtaggatgtgggtgttagttttgaaaattatatgattgggtttttagtagatattattagggttatgtttttgttttaagtaagaaagttataaaggtaatattttttgtagtattattattatgtttagtaaatagatgtaattataataatagttaattttagagataatagtttattatagaaaaaggttaagagggttttttattttttatgtgtagaatttgagttattttatattataattttattgagagaagaggtattaaaagagagataatgagaatttagggtataggtttaggtagtggggttgggtggggaaagaatttttttatttttttatgagttttagagttggttaatttggaatttatgtttagaagtattattttgatttttgtggaaagttgttttttttaaatagtaatttagtaatgagtaaagtattaaattgtgattttgatatgtttttattttgtttttttttttataaagaagattttttagggtttagggttattttagttattttaagtttggtaagtatttagttagggtttgttgttttagaggtttttatggtgtggttttatttatttatttattatgaagttgttgttttttttttttttttggagttagggagggaggggtagatgatagagttgggtgttttgagttaatgattagttttatatttataagtttatttatttttgtttttatttggtgttttaatgttgttaatgagtgggaattaattttattgagggttatttagttttttaaaagaaaattgtttatttggttggaaatgttttgatagaaggtagagtagttggttatatttgaatattgtgttttttagatttgggggtagagggggagtggtagatttagagggagaggggattaagtagttattttatatgagttattatggggtggttggaattttagtagagtttattaatagatttttgtgttaaagatatagtttgttgtttttttatttgttattttttattaaatttgtgtatgattttttagtattttttttaataattagttgtttgtaagaaggtaattattttatggtgaattggagaagaagaaaagatattttaggaaaatgttatgataatagaaaattttttagtgttgtaattatttggtgtgttatggtgataaagaagttgataattgagtgtttaataattttttttggtttgagataatgggtatttattttgatttgtgttttttataagagtaatttgttattattttatattatat

SEQ ID NO: 3686 - DNA, 2485 bp, Artificial Sequence
  chemically treated genomic DNA (Homo sapiens)
atgtggtgtgaaatgatggtgaattatttttgtgaagaatataaattagggtgagtgtttattattttaggttaaaagaagttattgggtatttaattattggtttttttgttattgtagtatattagatggttataatattgaagagttttttattattataatatttttttagagtgttttttttttttttttaatttattataagatgattatttttttatgggtagttgattgttgagaagggtgttggggggttatgtatagatttagtggggagtggtagataaagagataataggttgtgtttttagtatgagagtttgttgatggattttgttgggattttggttattttataatagtttatgtgaaatgattgtttggttttttttttttttgaatttgttattttttttttgtttttaaatttagaagatatagtgtttaaatgtgattggttgttttattttttgttaaagtatttttagttaagtgagtagtttttttttaaggaattgagtggtttttaataaaattaatttttatttattggtagtattgaggtgttaggtgaggataaaagtaaatgagtttgtgaatatagggttagttattaatttagggtatttaattttattatttgtttttttttttttggttttagagaagggagaaaaataatagttttatggtaaataaataaatgaaattatattatgaaaatttttgaaatagtaagttttgattggatgtttattgaatttgggatgattggaatgattttgggttttgaagaattttttttataagagaaaagataaaatgaggatatgttaaaattataatttaatgttttgtttattgttggattattgtttggaaaaaatgattttttatagaagttaaggtgatgtttttaaatatggattttagattggttgattttagaatttataagaagatgggaggattttttttttatttagttttattatttgagtttatgttttaggtttttattgttttttttttaatgtttttttttttaatagagttgtaatatgggatagtttagattttatgtatgaagagtaaaagatttttttgatttttttttgtagtgaattgttgtttttgaagttaattgttgttatggttgtatttgtttgttaaatataatgatggtattataaggagtattgtttttgtgatttttttgtttaagataaaagtatagttttggtggtgtttgttggaaatttgattatgtggtttttaaggttggtatttatattttattttggggttagttaaataaaattatattttggtttggtattgttagtgttgaggaaatggtgggtatgatttttggtttagagtttatgtttatttaaattgtggttattatgagatatatgtttattttttatgagtgaataaaagttttttttttttgtttttttttttattgtttttaaagggaatattttgttttttttatttttgtaggtgtttttttatttaaagttatagattttataatgatgtgggtttatttaaagaaaaattaaaatgatgttaattatagtttagaaagttaattttgaataaatatttaaggttgtttattatttatagatatataaagttatgaatatgtattgaatagatttaattttaattttgttttttttttaataagtgaaataagttgtattagtaagtaaataattaagtggtgataatatttggttttttaagtatgtagtagaaagatttatttttttttaataataataattataaaagagtttattagaaatttttaaatttgattttggttgtaattagaaaagaatgtatgtatatgattttagatttagttattatatgtttatagttaaatgttttttttatttaattttaaagaggaatttaaatattttttaaatatatttttatgtgatatatataattaaattatataatttattaaataatgagagaagttagtttaaaaaagataaaattaaagagaagataagattgtattgtttattaatgttagataaatttttgagattgaagtttgagatgtatgttatttttttttttattgtatttataatttttattgtatataaaggtaatagatttttaaaatttttaatgagagaaaaatgttttgtattattggataagtttatgatttttatttttaataagtggttattgttttgaaggttatttttaaaagttattttttaattttagtaatgggtagaataagagaattgtttgttgttgatatatgtttagagtagagttttaggaatataaagtgtgataaagatatgatgtagttataggttattaaagagttttattagtggttatatgttaaaaagattttaaaaattattgtgaagttaattaagaatttttaaatatattttttatggtttaaattttgggttgt

SEQ ID NO: 3687 - DNA, 2485 bp, Artificial Sequence
  chemically treated genomic DNA (Homo sapiens)
tgaagtttttaattttttttaaagtatatttttgtggagaaggatagattataaagaagtgaatatataaataagatataatatagtataaatatttaggaaaataaaaatgtagtaatgtgataaattttagtaggttattatatatattttatgtatatatataatataggtttatatatataatataggtatatatatattttttattattaatttaatttagtgataaattattaagttttatttttttattagatgttttttttgtttaaaggattttatatttagatggttgtatgaagtatttgggttttagttaaatgttagttttttattgaagttttttttgatgagttagtttataatagtttattaagatttattatattattggattttagtttttttgaatatttttgttatattatagtgtttgtttatttatgtgtttatttttttgttatttgtttttttttaaaagaatgtgttagggattttatgttttttatttattgatgtatttttagaatgattagtgtttggtatatggtaattttagttataatttttttaattaatggtttatttttgttttttatggatataatattattttatttgaaaaaaataagtatttttagtttatgattatttttgagtaaatgaggatagtaatagtataagatttttagtggtatttttaatgaaagaattatataataatttttgattattttttgtttttatgtgtttataattttattgttaatattaagagagtgtattttgttgttattaattttggttatatttttataagtatatatagtaggttattattttgttttataaatagaagttgattaagttgtttattttgtaggatttataataaattatagtttaatatagtagtagaatgtaaggatttagaaggtttaaaatttataagtttaggaagatatttaattaatagaaattaaagtttaaatttgatttatttatttattggaaattttgggttgttaaataatatttaagtttattttgtaattagattaaagttttgggttttgtgggggttggagattggaattttattttaaaaagaaatgtgtaaggtattttgttttttattaagaagtgtaatgagtaggttttatttatgatttttagttttaaatgattgaattggtattagtgttaaaaaaattgaaaatgttttaatatgtattaattgtttaatggatgtgttgtttgtttgaaaagggtggggtggtatttaggttgtttaatgattttatatttttttatggtaaaatatttgtgatttgattatgttgtaattaaagagttatataaataatatttttggaaaggaataaatgggtttttttgaaagagggattttggttagttttagttggtattttaggtttttttatgaggagaaaatttttatttttaggtaaatttttttttttgttttttagaagttgtttttagttttatgtttgtttgtgtgtgtgttgtgagtgtagattatgggagatggggagtgggtagagggaggattttttaaaaaataaatgatatttttaatagataattttaaaataggttgaaatataagtaataaagataagtattttaaatttagaaaaggtttgggattttgaagttaaaaagtttagtaatgagaaattttaagggtagagtgggatttgttttgtaaaattagttgattaaatgtttattattgtataaggaagaatttttgaatttatgtggtttgtttttatgtgttttagaaattattttttttaggagtatagattttaagttttttaattataggttttttgtaatttttggtagttaagagaggtttttagtagggaaggtgggtattttattttttaaagaaagtatattagttaggataatttagaaagaaatttagaggtttggttttaggtttatattgaatttttatttttgggtattaggagtgtttttttttttaagtttttattgtaatttttgtttattatatagttataagaaaggtgggaattaatgagaataaatgttaaattatttaattatagttaatttttatagtatatttttttttaattttttagattttaattttttttatgttgtaatttttgttatatttggtaatgagttatttattatgtttattgatttaagttttttattaataatttataatttatttttaaataaaaataaatattaattgtaattttatttttttttagatatttttatttttttagtttttaaatattagaaattaaattttatgagttttttatttattaaatagtttaagttagtaaattgagttgaaattaatttgtttttttattagatatattggtaatttttttaaagttggaatgagagaagaggtttggggtttggggagtttgttttagaggttgtggta

SEQ ID NO: 3688 - DNA, 2485 bp, Artificial Sequence
  chemically treated genomic DNA (Homo sapiens)
tattatagtttttaaggtaaattttttaaattttagatttttttttttattttagttttagaaaaattgttaatatgtttaatggaaaagtaagttgattttagtttagtttgttggtttaagttatttagtaaatgaaaggtttataggatttagtttttaatatttgaaagttgaggaggtgaaaatgtttaaagaaaaataaagttgtagttgatgtttatttttatttaagaataggttgtaaattattggtgggaaatttggattagtgaatatgatgaatgatttattgttaaatgtagtaaagattataatatgaaaaagattgaaatttaggaaattaaaagaaaatgtattgtgaaagttaattatagttaaataatttgatatttatttttattggtttttattttttttgtaattgtataataagtagggattgtagtagggatttgaaaagaaaagtgtttttaatatttaaagataaagatttaatgtaaatttgaggttaaatttttgggtttttttttaaattattttgattggtgtgttttttttggaaggtggaatgtttattttttttgttaaagattttttttgattgttaaaagttgtgagaaatttatggttaagaaatttagaatttgtgtttttggaggaaatagtttttgggatatatgagagtaaattatatgagtttaaaggtttttttttatatagtaataaatatttgattgattggttttataagatagattttattttgtttttggggttttttattattaggttttttggttttaagattttaagttttttttaaatttaaagtgtttgtttttattatttgtattttaatttgttttaaaattgtttattaaagatgttatttattttttaaaaaattttttttttgtttattttttattttttatgatttatatttataatatatatataggtaggtataaaattaagggtaatttttaagaggtagagagaggagtttatttgggggtgagagttttttttttatgaaggggtttgagatattagttggagttgattaaaattttttttttaaggaagtttgtttgtttttttttaaagatattgtttatgtaattttttaattatagtataattaaattataagtattttgttatgggaaaatgtaaagttattaagtaatttaaatattattttgttttttttaggtagataatatatttattaagtgattaatgtatgttaagatatttttaatttttttggtattaatgttagtttaattatttgggattggggattataggtgaaatttatttattatattttttgatgggaagtagagtgttttatatgtttttttttaaaatagaattttaatttttggtttttataaggtttagagttttaatttgattgtaaaataagtttggatattgtttgatagtttagaatttttagtaggtggatgagttagatttgaattttaatttttgttaattgggtgtttttttgagtttgtagattttaggttttttaaatttttatattttgttgttatattgggttgtggtttgttgtgggttttatagaatggataatttaattaatttttgtttgtaaaataaaatagtgatttgttatatgtatttgtgaagatgtggttagagttgataatagtaagatatatttttttagtgttagtagtaaaattatggatatataaagataaagagtaattagggattgttgtataatttttttattgaaaatgttattaaaaattttatattgttattatttttatttgtttaaaaatagttatggattgggggtatttattttttttagataaaatgatgttgtatttatgagaagtaagaatgaattattggttgaagaaattgtaattgaaattattatgtgttaggtattggttattttggggatatattaatgaatgagaagtatgaagtttttagtatatttttttggagaaggatagatgataaagaagtgaatatataaataaatagatattataatatagtaaaaatatttagaaaagttaaaatttagtaatgtgatagattttagtaggttattataaattggtttattagggaaggttttaatgaagaattgatatttaattgagatttagatattttatgtagttatttaagtgtagagttttttaggtagaaaaagtatttaatggaaaggtgaagtttaatggtttgttattaaattaagttaataatagagaatatatatatgtttatattatatatataagtttgtattatatatatatataaagtgtatataatagtttattaagatttattatattattgtatttttgtttttttaaatgtttgtgttatattatattttgtttatgtgtttatttttttgtagtttgtttttttttataagaatgtgttttaggggagattagggatttta

SEQ ID NO: 3689 - DNA, 2432 bp, Artificial Sequence
  chemically treated genomic DNA (Homo sapiens)
ttaaagtggaagagtttttagggagaagtttttggaattgtttttagtgaaattaatataaatatgtatgatgtttgattgtttgagtttttatgtgaatatatttaaatatattataatatatatttaatatataggttatttatatatatataaaatatatattatattttttatattatatatttttgttatttattgttttttttatattaaatatttttggtaagtatgttaatgggtttatttattttgtagatgaatgagggttaagtttgtaatgggttttttgtgtttttagaaaatttgtaatttaattgggggatatatattgtttgatgaattttgaaatttgaggtgttatgttttagtttttttttaagtttttttaaagttgattatttaggtattgatatattttgtttatttataaagttatttttgagtaagggaggaattaaggtggaagaaagtttttaaaatttttttgtttaggggaaaattttgtttaaggtattgattattaatttagattttagtaaaagttttaaggggatagtgatttttttgtttaagtgtaatatgtgttgttagtgtttatttatattttaagtttttatttgttagtgaatagaagtttaatttttaaagtttaggatttgtattttttggtttgagggttttttttagattaagaaggtttttttgtttgtttttgtattaagttagtagttgatattattaataagtaattttttttttgtgattgatagtgaggtatgttttgtatgggttttttagaattttttattgggattgagttttagttgtttatagtggtgattggtttgagtaaatattttttattgattgtatttttttttttggtttatttttttatatttttattaatgttttttgggattattttttagataatttatttgtattgaaatttttatttggggttagtttttatagaatttttattaagatattaggaaagggggaagttttttgtaagtatatgtgataaaagaaagataaagtttagtttgttaaaagggattagagttataaatatgtttataaaaattttgttttgttatttatatttgatttataatgattatttgggaaatttgtttttttgttggggtagggatttgattgattatgtaaaggggaaatagatgtatttagtttgtggttttatatatttgttggatgagtaatgattataatttgttaggaggagataataaaaaaatttatataaaattttttattgtgtaagtgatattggttattgtagttggtaattagaaagttattttgaggatagaatttttttgtttattaatgtagagaaaatggttagtttgttttttatgttttagaatataatattggagatgttaggatttattttagaggagttatgatattagtaaaatataaaaaggatgtagtaaatgtgtgttatagtaaagattataaaataaaatttaagtattttagagtttttggggtaaattgaatttatgggaattgaaaaataaatggtttgaaaaaaagtatgttttttttatagagaataggaaaataatatattttttttttttatgaagagtaagtttttttggttttaaaattgtaattgagatattttttaatatataaaaatattattttataaggatttatttatagttttggtatttgtaattaggttttagtttaaaggttttttttttagtgtggatagatgttaatataggaatataatttgtaaataatgagagtaattagtatttttttttatttgtttttattatttaattttttgtttgatattgatgtttttttttgtagatttagtttttgtgggagtagttagggtgttagtgtttttatttattttatattttttattttaatatagttttagaaggttttgtatttattgtagggtgtgggagagtttgggatgatgaaggggttagttttataatattagtattattaataaattttaaatatttgaggaaaggggtttattttgaggtattttttagtttaatttaagtgttataataaagattagtatttgtatttgtttttatattttaagttttgatatttaataaaattaaaaaaaaaatagtgtttatattataatttaatgtatgttagtggaggggtaaagggatttagtttatgtagttatatagggatttaggttgtttttgtatattggttttataatgttttaggatataggttagtaagtattatgtttaaagagttagagagtaaatatttttagatttgtgaggtatatagtttttgttttaattattgttattatagtgtgaaagtttttataaataatatatgaataaatggttatagttgtatagtaataaaat

SEQ ID NO: 3690 - DNA, 2432 bp, Artificial Sequence
  chemically treated genomic DNA (Homo sapiens)
gttttattgttatgtagttatggttgtttgtttatgtattatttatggaggtttttatattatagtggtagtagttgaaatagagattatatgttttataaatttgaaaatatttattttttggttttttaaatataatgtttgttgatttatgttttaggatattgtagaattaatatataggggtagtttagatttttgtgtgattgtataaattaggtttttttgtttttttattaatatgtattaggttgtgatatgagtattattttttttttaattttgttaaatattaagatttggggtataaaagtagatgtaaatgttagtttttgttatagtgtttgggttgggttaaaagatattttagaatagatttttttttttaaatatttaaggtttattgatgatgttaatgttgtaaaattgatttttttattattttaagtttttttatattttgtggtgaatgtagagttttttagagttgtgttggaatggagggtatggagtaggtgaagatgttggtattttggttgtttttatagaggttgaatttgtaggagggagtgttagtattaaatgggaggttggatgatgggggtaaatagaggaggatattgattatttttattatttataaattgtatttttgtgttggtatttgtttatgttgaaaaggaaatttttagattaaaatttgattataaatattaaaattgtgggtgagtttttataaaataatgtttttatatgttaggaaatattttagttatagttttggggttagaagagtttattttttataaaaaggagaaatatattatttttttgttttttgtaaaaagagtatatttttttttaagttatttattttttaatttttatggatttaatttgttttaagagttttgaaatgtttggattttattttatgatttttattgtaatatatatttgttatattttttttgtattttgttggtattataatttttttggaatgaattttagtatttttagtgttatattttgagatgtgggaagtaggttagttattttttttatattaataggtagaaaagttttgtttttggggtaattttttgattgttgattataataattagtgttatttatataataaaaagttttatgtgaatttttttattgtttttttttggtaaattatagttgttgtttatttagtagatgtgtgaggttgtaggttgagtgtatttgttttttttttatatggttagttaggtttttattttagtaaagaggtaaattttttaagtggttattgtaaattaagtataggtaataggatagagtttttgtaaatatatttgtgattttggttttttttgataaattgaattttgttttttttttgttatgtatgtttgtagaggattttttttttttttggtgttttagtaggggttttatagaggttgattttgagtaagaattttagtgtagatagattatttgagaggtaattttagaaagtattggtaggggtatgggaaagtgagttagagaaaagaatgtagttaatgaagagtatttgtttaagttagttattattgtagataattggggtttaattttgatggggaattttagaagatttgtgtagagtatgttttgttgttagttataggaagagagttgtttgttggtggtgttaattattagtttggtatagaagtaggtaaagaagtttttttagtttagagaaagtttttaggttaagaaatgtagattttgggttttgaaagttgagtttttgtttattgatagataaggatttgggatgtgggtaggtattgatagtatgtgttgtatttgggtagaagaattattgtttttttagggtttttattgaggtttgagttaatagttagtgttttaaataaaatttttttttgggtaaaggggttttgagggtttttttttattttgattttttttttatttaagagtggttttgtaggtggatagggtatgttagtgtttaaataattagttttggggggatttggaaggagattgggatatgatattttaaattttaaagtttattaggtaatgtgtgttttttagttaaattataaattttttgggggtatagaaagtttattataaatttaatttttatttatttatagagtgaatgagtttattgatatgtttattggagatgtttgatatgggaggggtagtggatgataggggtgtgtgatgtgggggatgtggtgtatattttgtgtgtatatgagtggtttgtgtgttaagtgtgtgttgtgatatgtttggatgtgtttatatgaggatttaggtaattaaatattatatatgtttgtgttggttttattgagggtagttttaagagtttttttttaaggatttttttattttga

SEQ ID NO: 3691 - DNA, 2411 bp, Artificial Sequence
  chemically treated genomic DNA (Homo sapiens)
agagtttttttagaggtagtatttgaataattatgttattaaatgttattgtggtagtagagaataagtatgttaattttttttagttttttagaaaaaggatatttttgtttttttttttttaattttttttatttatttgggagagtatgttataaatgtggtttttaaatatatgaattgatgtttttattttaatagttaagaatatggtttttagaattatatagagttgaatttatatttagttttattatttattaggtatgattgttggtaagttaattttttgggatttagtttttttttttgtaatatgagggtaatgtagttataatattttaaggaagttttggggattaaatgagaaaatgtgagtttgaaaaagtggggtatattttttatgttttttgtggttttttttaattttgtaattttgtaataggatttaataaatattttttgtggatttgtaatgtggttttattttgtatgatttttagagtaattttatggagttaaattattttaaattttagtaatttgaaataataaatttttattattttttaaaattttgtagatgagttggttggttttttttatttgagttggtttggttaggtttttttatgtatttgtgatgaaatggaggaatagttgttggttggttgttttaggatggttataattatatatttggtagttggatggttattagtgttgtaggatgattagtaggtgtttttttttttttgtaggttagtttgggttggtggtttattttgtggttataagagagtgagaaaaagtgtgtaatattttttgaagtttaagtttagaattgatatatgtttatttttgttatatttgattagttaaagtaagttttaggttagtttaggtatagtaggtgaggaattagattttattttttgatgagaggagttgtaaagttatgtgtaagtttaggaagattttgtggttattttagtagttgattaggttatttagttagttttttggagttatatatgtgggttggtttttttaagttttttttgtttaaaaagttagatagagtttgtttttttagtagggtgtatattgtaggtttgggtgggttgtttgtttttgtgtttgttttgatttttagttatttttaggatgttttttttatggaggagaatgatttagttttgtttgttatgtgtattaagatgagttataagagagtattgtttttttgtaatgtaagaaatgtaatgtagttagaggttttgaaatttggtggggatagtggtagtagagattgtgatagttttgggatataggaggttattttggtttttagttttaggtgtttggagttattagatagttaaagttgtataaggtataggtatgatttgttaggttgtttagttaggttagggatgatagggtatgtttattttattagttaattagagataatttttgtttgaggaatgagtggaatttttagtttttagatgatgttgggtttgagttttttttgttagtatatttggagattttataagagttataaaagtttgtaaagggttttggagtgttttatttaatgaaattatatttttttttttggattgggttaaggaggggttatatatatttgatagggtgtttttagatgggggtgtgtagaggatgggtttttatttagttttggttattttttattttttttaaaaatttattgtgggttaggataaggagaaataagagattgtgattggtagagatataggaaggaatgttttaaaaagagtaaaaaatttgtttttatgtattttgttgattgagtttttgggaatggagtttttttttgaggaaatattataatatggtttagaggtggaaggttttgagaagggttttggtaagtaggggaaaatgtttttttaatggtttttttgattttaggtagagttttatttagtgatatttttgggtgagtgggtaaaatgagaaattttttttataattttttttgtttatagaaggtattaaatgaggtttggtaagaggttaggattaggtaagtttagaggttagaaattttagttaggtttatttagtatttaggaagagtagaggtttagtagtttttgagggaggtatagtttggtttttggaaaatggttttattgggttttattttttaggtatttggtttttggttttagagataatgttgagtttagtttttatttatgtgaaagtttttaaatttaaaagttagggagatgttttatattatatttagatagagggataaggaataaaatttatttattttttttttatgtgtttttttttgtaggttgtggttttattgtttttaggtggttggatggggttgtttt

SEQ ID NO: 3692 - DNA, 2411 bp, Artificial Sequence
  chemically treated genomic DNA (Homo sapiens)
ggggtggttttatttagttgtttggaagtggtggaattgtagtttgtagggagaaatgtatagaaaggaagtgggtgagttttattttttgtttttttgtttgggtatggtgtgaggtgtttttttggtttttggatttgaaaatttttatatgggtgagaattgaatttagtattgtttttagagttaaaaattaagtatttggagaatgaggtttagtagggttattttttaagagttaagttgtgttttttttaggggttgttgagtttttgttttttttgagtgttgggtaggtttggttgaggtttttggtttttagatttatttgattttggttttttgttggattttatttaatattttttgtgggtagagagaattgtaggaggaattttttattttgtttatttatttaggaatgttattgagtggggttttgtttgaggttagagaggttgttgaagggatatttttttttatttgttaggattttttttggagttttttgtttttgagttatgttgtggtatttttttaggagaaggttttatttttagaggtttagttagtaaagtatatgagagtaagttttttgttttttttgggatatttttttttatatttttgttagttatgattttttgtttttttttgttttggtttatagtgggtttttggaaggggtgagaagtgattggagttggataaggatttattttttatatatttttatttggaggtattttgttgggtgtgtgtgatttttttttaatttagtttagaagggagggtgtgattttattgaatgaggtattttaaggttttttgtaaatttttatggtttttgtgaaatttttaaatgtgttagtagagaaaatttaagtttagtgttatttgagggttgggagttttgtttattttttaggtggggattgtttttgattagttggtgaggtgaatgtgttttgttatttttggtttggttgggtaatttggtaggttatgtttgtgttttgtgtaattttggttgtttggtagttttaggtatttaagattgaagattaaggtggttttttgtgttttgaggttgttatagtttttgttgttgttgtttttattagattttagagtttttgattatattgtattttttgtattataagaaagtaatgtttttttgtagtttattttaatatatatggtagatagaattgagttgtttttttttatgaaagaaatattttggaaatagttaaaagttaaaataaatataaaaataaataatttatttaggtttgtgatatgtgttttgttggaaaaataaattttgtttggttttttgggtggagaagatttgggaaggttagtttatatgtgtggttttagaaaattggttgagtagtttaattgattgttaaaatggttatggagtttttttaggtttgtatatgattttatagttttttttattaaggggtggagtttagttttttgtttgttatatttgggttggtttgggatttgttttgattaattaaatgtggtagaaatgaatatgtgttagttttgaatttaggttttaaggggtgttgtatatttttttttatttttttgtgattataaagtgaattattagtttaggttagtttgtgggaggaggagaatatttgttagttattttgtagtattgatagttatttaattattagatgtgtgattgtggttattttagaatagttagttaatagttgtttttttgttttattatagatgtatgagagagtttggttaagttagtttagatgagaagaattaattaatttatttgtagaattttgaaaaatgatagaagtttgttgttttaagttgttaaggtttgggatggtttaattttatagggttattttgaggattatgtaagataaggttatattataagtttataagaaatgtttgttgaattttattatagagttatagaattggaagagattatagagaatataaaaaatatgttttatttttttaagtttatgtttttttatttagtttttaaaatttttttgaaatattgtgattatgttatttttatgttatggaaaagagggttgaattttaagaagttaatttgttaatggttatgtttagtaagtggtgaagttagatgtgaatttagttttgtgtgattttaaaggttatgtttttaattattaggataaaagtattggtttatatatttaaaaattatatttgtggtatatttttttaaatgggtaaaagaaattggaaaaggaaagataaaagtattttttttttggaggattgggaaaagttagtatgtttattttttgttattatgatgatatttgatgatatgattatttaagtgttatttttggaagaatttt

SEQ ID NO: 3693 - DNA, 2457 bp, Artificial Sequence
  chemically treated genomic DNA (Homo sapiens)
aatgttaaagggattttaatagtgatttatgtttggaaatagtttgtgggaatttgtgttgatttattggaggatttagtggaatatggtagttttaaggtagagttagtttgaaattttgtgaatatgttttaggataattagatggttagagtgagatggggttagggtgggggatattttgagttaaggagttagtgatttttagaagagtgaggagaaaatttaaggttttttttatgaaagggggtagagttgggataatatttaaggaggttagggggatgttgagggggtttggttggagggtttggtaggtgtatggagagtttttttttagataaagatttgggtttagtttttgagaagtattgaggtatttattaggttggaagtagagttttttttgtttttgttttggttatatttatagtttgttggtatttgttggtttttattttaggtttagttgagttaaggaattttaaggaatagttatttttttttatgtttattaaggtgattttttatggtttttgtgggatgtttggttatattgggtttagaaatttgtattttgtaaatttattggtttttttgtgattggggtttttttttgtgttttagtgtttttttgggaaatgtttaatttttttttggtttagttaaggagaaaggaatttttttagatttagttagagatgttggtttagtttgattgggagggaagggtgattttaataaggttgggggtggtagtggggataatgtgtgatttttttgggaagtgggattgtatatggtattggggtgggtagttttggttttttttgatttggttgtttttttttagtgttatgagttttgagtttggttgttttggtgatttgtttttagtttttatttattttttaattattttatgtttttttgagtttttttttatttttagtatagtttatatataatgtaagtgtttaaaagttgaattgtagtattgagttgaggggtggttagttttggtgagttttggtgttttattatggtttttttatggttgtttttattttttttttagaaaagttattgagaaatggaattttttgatattatttttagttaaagttgttgaaaatagtttagaggagtgaattttatagagttttatgttttgtttagatttttggggttttttgttttatggagtttgtagagttgtgtttagattttttattttggattgttatttggtattggttttttttatgtagtttttttgtttttattgtaatttgattttttgttaaattattttttttttggttttaaatttttgttgggaaagagatgaaattagtatttggagagttggaaagggaaaaatagttgttttttataaaatgggttagggagggggaagtggagtagtatagttggattttggtgggaaagttagagtttggtgggaatgtatagtttatagtaggagagataaatatataaatttagaggggtttagtggtagtagtttaggggtttgtttgttaatggtattttgtgttgtattttttagatatagttatattttatatttatattaattattttagggttgtagagattttttttattttagagaggtaggtataaaaaaaaaaaaaagatttttttttttttttagtttttttataagaataattatagtgtgtgtgtttgggataaatagagagtggtggggtttgtggtattaaggttgttaggtaaaattgtttaggttgggtggattttgtggtattttgtaattgtggttgtgtggttatgtgggtttttgataataattatgattttttaagaggagttagggatttggatttttatttaaaaattatttgagatttaaatattggtaattaatttagaagttttatggtattgagtagttagtagtatattgtgggttaagtaaaatatgtttgtgggtagagttggggttgagggttggagtttgagtttttttttatgggtgagaattgatatatgtattttagttaggagtaggtattgttagtattttatttattttttaaattttttttttttttttttgtttttgtgatttttttagttttgaagggtttttattttttgtagtatgtatttgatttattttatggtataatttgttttttattattttattttttatttgttttttttaatgataattttaatataatagtatataatagttgttttttgtttggttggttttttgttttttttgttttttttttgagatagagttttattgttgtttagtttggagtgtagtggtatgattttagtttgttgtaatttttattttttgggtttaagtaatttttttgttttagttttttaagtaattgggattaaggtgtttattattatatttagttaattttttgtatttttagt

SEQ ID NO: 3694 - DNA, 2457 bp, Artificial Sequence
  chemically treated genomic DNA (Homo sapiens)
attaaaaatataaaaaattagttgggtgtagtggtgggtattttagttttagttatttgggaggttgaggtaggagaattgtttgaatttgggaggtggaggttgtagtaagttgagattgtattattgtattttaggttgggtgatagtgagattttgttttaaaaaaaaaataaaaaaaataaaaaattaattaaataaaaaataattattatgtattattatgttagagttattattgaggaaggtaggtgaaaagtggaatggtaagaaataggttatattatgaggtaagttaggtgtatattgtaggaagtgaaagttttttggagttggaggggttatggaaataaaaaagggaggaagggatttgggggatgggtagagtgttgataatgtttgtttttggttggggtatatgtgttagtttttatttataaaggaggatttaaattttagtttttagttttaattttatttatagatatgttttgtttggtttatagtgtattattgattgtttaatattgtaaagtttttgaattagttgttaatgtttaaattttaggtaatttttaaataaaaatttagatttttggttttttttgaaaaattatagttgttattagaggtttatatagttatatggttatagttgtaagatgttatagagtttgtttaatttgagtaattttatttggtggttttgatgttataggttttattattttttatttgttttaagtatatgtattataattatttttataggagaattaaggggaaagagaaattttttttttttttttgtgtttatttttttaaaatggagaaaatttttatagttttaggatggttaatgtggatatgagatgtgattgtatttgaagaatatggtataaggtgttattggtaagtaagtttttgagttgttgttgttgggtttttttaggtttgtgtgtttgttttttttgttgtgagttgtatgtttttattagattttggtttttttattaagatttagttgtgttgttttgtttttttttttttagtttattttgtgaaaagtagttgtttttttttttttagttttttaagtgttgattttattttttttttgataaaagtttgaagttaggagggaaatggtttggtagaaagttagattgtagtgggagtaagaagattatgtggaggaggttgatgttgggtagtggtttaggatgaggggtttggatgtggttttgtagattttatgagataagaagttttaggaatttaggtggggtatagggttttgtggaatttatttttttgagttgtttttagtaattttagttaggggtgatgttaaagagttttattttttaatagtttttttggaagaggggtggagatagttatggggaaattatgatgagatattagggtttattggggttgattattttttaatttagtgttatagtttgatttttgagtatttatattgtgtgtggattgtgttggggatggaaggaggtttgagagaatatgagatggttaggaggtgaataaggattgaaaatgggttattaaggtaattaggtttaaaatttatggtattggggagggatagttaggttaggaggagttagaattgtttattttggtattgtgtgtggttttattttttgggggggttatatattgtttttattattatttttggttttattaaaattattttttttttttaattaagttgagttaatatttttgattgagtttggaaaaatttttttttttttaattaggttaaaaaaaggttgaatattttttaaaggaatattgaggtataaagggaaattttagttatggagaaattggtgagtttatagagtgtagatttttgagtttagtgtgattaaatgttttatggaaattatggaaggttgttttgatgggtatgggaagaggtggttgttttttggaattttttgatttagttgggtttgaggtggaggttagtaaatgttagtaaattgtggatgtggttggggtgggggtgggaagggttttgtttttagtttggtgggtgttttagtgttttttagggattgggtttaggtttttgtttgggaaggggttttttatgtatttgttaggttttttagttaggtttttttaatatttttttggtttttttgaatgttgttttggttttgtttttttttatgaggaaagttttgaattttttttttatttttttggaagttattggttttttggtttagggtgttttttattttgattttattttgttttgattgtttggttgttttaaagtatgtttatagggttttaggttggttttgttttggagttgttatgttttattgggttttttgatgagttagtatagatttttgtgggttgtttttaaatgtgaattattgttggagtttttttggtatt

SEQ ID NO: 3695 - DNA, 2446 bp, Artificial Sequence
  chemically treated genomic DNA (Homo sapiens)
tatatgtgtggagagattgtgaattgtgaattatatttatgtaattttgaatttgagttttgtttataagatttagtttatgttttttgtgttgtgaagttttttaggaatggtttgtggttgttttgtttattgttgtatttgatatagggttttgttaaggtatttattatatttgtttgtatatttatttttttattagattttgggtaagtttttaatttttaaattattattatttttttgagatagtgatttgttttgttgtttaggttggagtgtaatattggtgttaatatggtttattgtagttttgaatttttggattttagtgatttttttattttagttttttatgtagttgggattgtaggtatgtgttattatgtttggttgattttaatagtttttgtagagataggggttttgtaattttgtttaggttggttttgaatttttgattttaagtgatttatttaatttagttttttaaagtgttgagattatatgtatgagttattgtgtttggtttaaattttttattttatgttttttttgtttttggtttaatttagtgtttggtatgtggtagatatataggttagtgttataaatgattatatttttatatttgttgttttaaatgatggttttttattaagaatttgagaatttttgtttgtgggttttgtttgggtgtggattaggttaaagttttatggagttaatattttggggtaatatttaagtaatgaaaattagtagttagtggatgaatagtttagtatgggataattttggggtaggttttgtatagttatttggttagatttagtagtattgagttttggttgtttatagtagtgattgtttataattattttgtttttttttttagttttattttttttttattattttatgttttttgggttaaagaaattattattttggggtttgtttttgttggagtttaaattaagataattggttagttggttgattggttgtgtgaatgggtatgattagtagtaaagaaagaaatggaagtttgtgtgttggttgggttttggtatatgtgttgtttttatagtgtgtttagattatgttggggtatgtgtatagttaatagatttgatataggaaaaagtattttttagttgtttttattattttgttatttgttattttatttatttgttgtttttatgaaatgtttatttatgttagttaaaatggtatattgggtttggaattggttggggaaatgttaggttgatagaataggggggataattgaaatagtaattgtgtggatggtggtggtgatataaatttgtttttttgtgtagaaggtaggatttttagagtttaggaggttttttgtggaggaattggtatgtggtgaaggttgtagggagggggttttgggatttaggggtagttagagtagggttttttgttttgagagttttttattttttttttttagaatagaggagattgtttaaatatagaatttagtttgtttaaagttattgtttatttttaaatgtttagtttgttttttaattaattttttatggtgtagtttaagaaaaatgtgtggatttttatgtttgaggttagttgtaggatgtattttgtagaatagtgtgtgtttttgtaagttggggattgagtgttttgttttgttttgtttttttagggtaaaggggttattttaaaagtaggattgtttggattttagaagattggatatttatttattatttaaattttttttttttttttttttttttttttttgagatgaagttttgttttgttatttaggttggagtgtaatgggatgattttagtttattgtaatttttgtttttttagtttaagtgatttttttgttttagtttttttaattagttgggattataggtgtgtattattatgtttggttaatttttttgtatatttagtatagatggggttttattttgttggttaggttggttttgaatgtttgattttaagtgatttatttattttggttttttaaagtgttaggattataggtatgatttattgtgttgggtttattttttttttaatttattttagagagaaggtttttttatgttgtttaggttgtttttatatttttgggtttaaatgatttgtttatgttggtttttaaaagtgttaagattataggtgtgagttattgtgtttggttatggatatttatatattttttttataaatatttattgagtgtttgtgttgatttaggtattgttttgagttttaggaagaaagtagtgagtaaatttaataaaattttttatttttttgagattatagatttgtgggagggttggatagtaaataaatatatgtataaatgttaggagattttaagtgtgaagaaaagtataggggttaggtgt

SEQ ID NO: 3696 - DNA, 2446 bp, Artificial Sequence
  chemically treated genomic DNA (Homo sapiens)
atatttggtttttgtgtttttttttatatttaaaattttttgatatttgtatatatatttgtttattgtttagtttttttataggtttgtaattttgaagaggtggggaattttgttgaatttgtttattgttttttttttggagtttaagatagtgtttagattaatataggtatttaataaatatttgtagaaagaatgtataagtatttatggttaggtgtggtggtttatatttgtaattttagtatttttggaggttaatgtgggtagattatttgagtttaggagtatgagaatggtttgggtaatatagggagattttttttttaaaataaattaaaaaaaaaataggtttggtatggtgggttatgtttgtaattttagtattttgggaggttgaggtgagtggattatttgaggttaaatgtttgagattagtttggttaataaaatgaaattttatttatattaaatatataaaaaaattagttaggtatggtggtgtatgtttgtaattttggttggttggggaggttgagatgggagaattgtttgaattggggaggtggaggttgtagtgagttgagattattttattgtattttagtttgggtgatagagtgagattttattttaaaaaaaaaaaaaaaaagaaaagaaaaaaatttaaataataaataaatatttaattttttaagatttaaatagttttgtttttagaatgatttttttattttgagaaaataaaatagaataaaatatttaatttttagtttgtaggggtatatgttgttttgtgaggtatattttgtaattgattttaggtatgaaaatttatatattttttttgaattgtattgtggaagattgattggaaaatgaattgaatatttaaaaataaataatgattttaaataaattgagttttatgtttggataattttttttattttgggaggaaggggtgaagagtttttagggtagagggttttgttttagttgtttttgagttttagggttttttttttgtagtttttgttatatattaatttttttgtaagaggttttttgagttttgggagttttgttttttatgtaaaggggtagatttgtgttattattattgtttatatagttgttattttagttgttttttttgttttgttagtttgatatttttttagttgattttaagtttagtgtattattttagttgatgtgggtgagtgttttgtggggatagtagatggatggaatgataaatagtaggatggtggggatagttgagaagtgtttttttttgtgttggatttgttggttgtgtatgtgttttgatgtagtttagatatattgtgggggtagtgtatgtgttagggtttagttggtgtgtgggtttttatttttttttttgttgttaattgtgtttatttatatagttaattagttaattagttagttgttttggtttgagttttagtagaagtagattttaagatagtagtttttttgatttagaaagtgtgagatggtagaggggaagtgagattgaaagagaaggtagagtggttatgagtagttattgttgtggatagttagggtttagtgttgttgggtttggttaggtgattgtgtagaatttgttttagggttgttttgtgttgggttatttatttattaattgttggtttttattgtttaagtgttgttttagggtgttaattttatggaattttggtttgatttgtatttagataaaatttgtaggtagaaatttttaggtttttagtaagaagttattatttggaatagtgagtgtgagggtatggttatttgtaatattgatttgtgtgtttgttatatattaggtattgagttagattaggggtagaggaaatataaaatgggaggtttaggttgggtatggtggtttatgtatgtaattttagtattttggaaggttgagttgggtggattatttgaggttaaaagtttgagattagtttaggtaaaattgtaagatttttgtttttataaaaattgttaaaattagttaggtatagtagtatatgtttatagttttagttatataagaggttgaggtgggaggattattagagtttaggagtttgaggttgtagtgagttatgttggtattagtgttgtattttagtttgggtaatagagtaagttattgttttaaaaaaataataataatttgaaagttggaggtttgtttagagtttagtggggagatggatatataagtagatgtggtgaatattttggtagagttttgtgttaaatgtaatagtagatagaataattatggattatttttgggaagttttgtagtgtagggaatatgagttgggttttgtgagtaagatttgagtttagggttatgtaagtgtagtttatagtttatagtttttttatatatatg

SEQ ID NO: 3697 - DNA, 2476 bp, Artificial Sequence
  chemically treated genomic DNA (Homo sapiens)
agatttttgtttatttattgatatgtattttttagttatagatttatgtttttttatttgttgaaatgtttttaaatattgtttttaatgttttgtttgtgttgttggttttttgttatttagttaataatgaaatagttttagtgaatttgtagtagtagttgttttagttttagtgtttatttatttttgtagttgaattattttgaatattttttgatggtgtaagagatagttttattattttttttattggtttttttttgtgtttgttatggttggtatgagttattttttgtgtatgttatggtgagaagggatgaatgaggaaagatagggtggttttatatttgattttgggatagttattgggtaaggaagggtttggggttgtttttttaggttttttttaatgtgtgaaggtttgagttaggttagttggtagaggtgtgtgtatgtttaatttagaattgaatgttgaaggttttgtgatttaaagggaagaattattgggatttgatgttttagtaggggaaattttaagtttaaaaagttatagttagaatttagaattgtgttgttattttgtttttgagtttttttttatgtttagttttttttttgtggatgattgtgaagttgtttatatgttgtttttttttgtgaattgatttttgtaaatagtgataggattttatttaaatatttttgatttttaagggaaaaatagagtaatttttttttagtgtttttttgttgattttgtttgggggagaggttagtagagttaaggatgattttatttttttttagtaggattttttgggatgtatagaatttttttttttagttgtttttttgtgattagttatatttaatttataaatttttagtgtagatgatggggatatttaatattgggtttgtttatattttagtaggaggtgaaatatataaagtaattattaggttttttgaagttttaaggattttttatgttagtggtagaggtgggaggtgggttggtgaggtggggtagtttaggaattgtgttggtggggataggaaattgggttgaagggagatgtaaggttttggtgggaaataaatggtattgtgttgttgatggaaaaagattttggtaggattgttgttgtgagtgttttgtggtttagaaaggaattttttataggttggattaattattaaaaatgtttttatttttaggagtttttggtgtgtagtggagttttgttgggggaaatgatagtttggattatgggtgtttgtggtttggataagtgaggaagtttttttaaggtaaaaggaagttttgattgggattttaatttgttggtttgttgtttgagtttgggagttgtggtgttttatggagttgttgagggaagtttgttttttgagttagtattggttaagggagtttgtttgagtttagttgttgattgttattagggtttataataggttgtggggtttgtgatttagtgtttttatataggtataggatttgggtatggagaggggttgtgttgtgtaagatggttgaggttgtttttatttgagagttgtttagtttgtttttttttagttgtagggttttatggtggaagttgtattttgttttttagtgaattaatgttgttgtttatgtgttttttttttggtttgtttgtatgaattattgaagggttttaaaataaataaataaataaataaataaataaaaaatagttttttggattgtattttagaatgatgaaatattattttttggtatattttattaaatatttttaaaggttttttatgataatgaggaagtatgattataattgtttaatttttttgtgtttatattgatgttaatgggattaaattattttgttagtttaatgagataagattttaaatgggtgttttatgtattttgtgtgtgtgtatttaatgaagatttggtggttgtttttgatttatatttgggaattaattttttttttgtggttttttgttttgtttttttttatttatttttgaattaaggtatttttagtatagaaaattttgaaaatatagaattatgtttaaaaaggtagaaaaatggaggtaaaatatgtatttgaaatttgttataggtagtgttttaatattaggttttgtttttagaggaggaagatggaggagattttattattgaggataagtgattatgtttaataattaattaatttttatgggttggaagtatttattaatatttatttatatgttttttgtttttaagagattaaaattgatatattgtgttaattgttgattttataaaaaaaaaaaaaaaaaaaaaaaattattagaagaatttgttgataaagtaaagtttatgagatttattgaaataaggaagaatattattaggatatagttttatttatgtttaagttaggggagattaagaggt

SEQ ID NO: 3698 - DNA, 2476 bp, Artificial Sequence
  chemically treated genomic DNA (Homo sapiens)
gttttttaattttttttggtttagatatgaataagattgtgttttggtgatgtttttttttattttagtaaattttatgaattttgttttattagtaggtttttttgatggttttttttttttttttttttttttgtagagttaatagttgatataatatattagttttggttttttggaaataggaaatatgtaaataagtgttaatagatatttttaatttataaaggttggttaattgttaaatatagttatttgtttttggtaataaaattttttttgttttttttttttgaggataagatttggtgttggaatattgtttatgatagattttaagtgtatattttatttttatttttttatttttttaaatataattttgtatttttaaaattttttatattgaggatgttttaatttgagggtgaatgaaaggaaataaagtaaaaagttataagaggggaattgatttttaagtgtaaattagaagtgattattaagtttttattaaatatatatatatagagtatataaaatatttatttaaaattttattttattaagttagtaaggtaatttagttttattaatattaatatgaatatagaagagttagatagttataattatgtttttttattattataagaagtttttggggatgtttgataaaatatattagaaaataatattttattattttaaggtgtggtttaggaagttgttttttgtttgtttgtttgtttgtttgtttgttttggagttttttagtgatttatataaataagttaaggagagaatatatggatgatagtattgatttattggaaagtaaagtatagtttttattataaaattttgtagttgaaaaaggataaattgagtagtttttaaataaagatagttttagttgttttgtatagtatggtttttttttgtgtttgagttttgtgtttgtatgaaagtattaaattatagattttgtaatttgttataagttttggtaataattagtagttgggtttgggtaagtttttttagttggtgttggtttagagagtagattttttttagtagttttatggagtattgtagtttttaggtttaggtagtaagttgatgagttgagattttaattaaggtttttttttattttaaagaaatttttttgtttgtttagattgtgggtgtttatggtttaagttgttattttttttagtgaggttttattgtatgttggggatttttgaaggtagagatatttttaatggttagtttagtttgtaggaaatttttttttaagttatagaatatttataataatagttttgttaagatttttttttgttaataatatagtgttatttattttttattaaggttttatatttttttttagtttaattttttgtttttattagtgtagtttttagattgttttattttgttagtttattttttatttttgttattgatgtagaaggtttttgggattttaggaagtttaatgattattttgtgtgttttattttttgttgaaatgtgaatagatttaatattagatgtttttattatttgtattggaagtttatagattgaatgtggttgattatagagggatagttgaagaaggaggttttgtatattttaggaaattttgttggaagggggtgaggttatttttagttttgttggttttttttttaggtaaggttaatagaagggtattgggaagaaattgttttattttttttttagaaattagaaatatttggataaaattttgttattgtttatagggattagtttatggaagaggataatatgtaaatagttttatgattatttataaaaggggagttgaatgtagaggaaaatttagaggtagggtaataatatagttttgaattttaattgtagttttttgggtttggaattttttttgttagggtattagattttaataatttttttttttgggttataaagtttttaatatttagttttaagttaaatatatatatatttttgttagttgatttggtttaggtttttatgtattgaggggggtttgggggagtaattttaaatttttttttatttagtgattgttttaggattaagtataaaattattttgtttttttttatttatttttttttgttataatatgtataggaggtagtttatgttaattgtgatggatatagaggaaggttagtgaagggaatagtgagattgttttttgtattattaaggaatatttaaagtggtttagttgtaggggtgggtaggtattgaagttaaggtagttgttgttgtaggtttattgaggttgttttattattagttgagtggtagagagttagtgatataaataggatattgagggtgatatttagggatgttttaataagtggaaaagtatgaatttatagttgagaagtgtatattagtgagtgagtaaggattt

SEQ ID NO: 3699 - DNA, 2463 bp, Artificial Sequence
  chemically treated genomic DNA (Homo sapiens)
gtgatttgtttgtagaaataattttgaaagttttttgaggaaaataaaaattaagaagaatattttttttttttttttatataaattaaaatttaatagtattaaattattgggattagaaattaagtaatgtataatgtggtttttgttgagttaaataagatgttatataatggagaagaatttgaaaatgtataaaaaaattaatttatattattagaatttgtagtgaaattaaatttatgttaaataaaattagtttgtaggtgtataaattatgagggttttgtatttatgtaatataggtagttataaaaatatgttattgtattgtgtaaagatgtatagttattttatttggttggttttgtattttgtattttttttagttttggtttttgttgaattagaatttttagtatatattgtgttgtatttttgtaaatgattttttaaatggaattttgtatataatatattgtaatattgtatgataattatgtgtgaaaataatttttgaaatattttttggttgtttttttttttttttagagtaagaatatatttatgtattatgtagtgttatggatagatgaaatttgaattagggtttgtggttagataatgtattgtgggggtgagtagaaaagtttatattttttagaagttttttttgatatggggtaaaagttaaggagtagaaggaaaagattatttttttatttgaaagtgtttttattgttatttagtgttgtatttggtttagtgggatttagagtaaattataggtaatttgaatttggagttagttggggttttgtagatagttttattttgtttttatgtaatttttgtaatgttttgggtgatagtttagtgttgttgtaaaattgatagtgtagaggtttggattttttgttgttatattttttatgtttggaagggtgtttggtatatattaatagtaagtgtttaataaatttttgttggttgaaggaaggaaaatatgagtttagaagggtttttaatttattagtgggagagatttgtaaagattagaatgagaattgaatgggttgtttgtttttgatatttataatggattaaaagatgatagtttaatttatatggttgtttttttaattttttaaattaagattattatgttttgttgatttaaagtaggttatagtttttggatgtgaggtagttttgtagtttttggtgggatgagagtgggtttagaagaggaaaaggtagtgtgggtagaaagtaatattataagatggtttttggttttgttattgggtaatgtttttttgttaaaattataatataatatgtgtttttatttttttttttatgtaggtattttttattttttaaattgttaggaaatagatttgggtgaaggttggagggaataagaggagagtaaaaatatatatgttgggtggaggaagaggagaatgtatttttaaatttaaaaatatattatagttgaggtgggaggattgtttgattttaggagtttgagggtgtggggagttatgattttgttattgtgttgtagtttggatgatagagtaattttgttttttttttataaaaaagtaaaaataaaaatatgttataaaagttgaatgttggttaaaggaagggatttttttttttttttatgttgtatgtgttgttaaatatttttattttagtattatttttatatttttgggatatagaatagaaatagaaattgttgaagtagtttatattatgtggaggttataattttagatttataagaaaatataaaggataggaaatttagttatgaatgtttttatttataaatgtggttttgtttttattgggtagttgttatttttattttttttaagagatttgaaatgaggtagtgttttaatttttaatgtttgtttatgttgttatgtttggttatatttagttatttttggttttttattagtagttttagagaaatagaaatagtataagaaggattttgaagggtatagtgtgtgtggaatataggtattttaattatttggtagtatttgatagtaaaattttaagtgtttttatttttttggtttatttttatgatggtgaattagagattaaaagtattttttgttatttggttaattttaatttagttggaaatatgggaaagaaattgtttaatattgtaaaattttaaatatgtgataaggaaaggaaggaaagaaggtagagaggggttaggtgtggtggtttatgtttgtaattttagtattttgggaggttaaggtgggtgaattatttgaggttaggagtttaagattagtttggttaatatgtgaaattttatttttattaaaaatataaaaattagttgggtatggtggtaggtatttgtaattttagttatttgggaagttgaggtaggagaattttttgaag

SEQ ID NO: 3700 - DNA, 2463 bp, Artificial Sequence
  chemically treated genomic DNA (Homo sapiens)
ttttaagggatttttttgttttagttttttgagtagttgggattataggtgtttgttattatgtttggttaatttttgtatttttagtagagatggggttttatatgttggttaggttagttttgaatttttgattttaagtgatttatttattttggttttttaaagtattgggattataggtatgagttattgtgtttggtttttttttgtttttttttttttttttttttattatgtatttaggattttgtaatgttaggtgattttttttttatatttttaattgaattagagttaattaaatgataaaaagtatttttggtttttaatttattattatgaaaatgggttgaaaaaatgaggatatttagaattttattattagatattgttagatgattaaaatgtttgtgttttatatatattgtgttttttggagttttttttgtgttgtttttgtttttttgagattgttggtaggagattaggagtgattaggtgtgattaggtatgatggtatgagtaggtgttaaagattggagtgttgttttattttaagttttttaaagaagatgaaggtaatagttgtttaatgaggatggaattgtatttgtgaatggaagtatttatagttgggttttttgttttttgtatttttttatagatttgaagttgtaatttttatataatatgaattattttaatagtttttatttttattttgtgttttgggggtgtgggggtggtattagagtgaaagtatttggtagtgtatgtaatataaaaaaaaaaaaaaatttttttttttggttggtgtttaatttttataatatgtttttatttttatttttttgtagggggaagatagggttgttttgttgtttaggttgtaatgtagtggtgggattatagttttttgtatttttaaatttttgggattaagtgatttttttattttagttataatgtatttttaaatttggaaatgtgtttttttttttttttatttagtatgtatatttttattttttttttattttttttaatttttatttaagtttgttttttggtaatttgagaagtgagaaatgtttgtgtgggggaaaaagtggaggtatatgttgtgttgtaattttaatggggaaatattgtttaatgataaaattagggattgttttgtgatgttgttttttgtttatgttattttttttttttttgagtttgtttttgttttattgaaggttgtaaggttgttttgtatttagaggttgtgatttgttttaaattaataaagtatgatgattttagtttgaagagttgggaggataattatatggattgagttgttattttttggtttgttgtaaatattaaaagtaggtagtttatttaatttttattttgatttttatggattttttttattgatgagttagaaatttttttaaatttatgtttttttttttttagttagtaaggatttattgagtatttattattaatatatgttaggtatttttttaagtatggggagtatggtagtgaggagtttaagtttttgtgttattaattttgtaatagtattgaattgttatttagggtattgtagaggttatgtgaggatagggtggggttgtttgtaggattttagttaattttgggtttaaattatttgtgatttgttttaagttttattgagttaagtatagtattagataataatgaaaatatttttaggtgggaggatgattttttttttttgttttttaatttttgttttatattaggaggagtttttgagaaatgtgagtttttttgtttatttttatgatatattgtttaattataaattttggtttggattttatttgtttatgatattgtgtggtgtatgaatatatttttattttaaagaaaaaaaaaaatagttaaaggatattttaaaaattatttttatatatgattattatatagtattataatgtattatgtgtaaaattttatttaaaaaattatttataaaagtataatatagtatgtgttgagggttttagtttaataaaagttaaggttaaaaaaggtataaggtataaagttaattaaatgagatgattatgtatttttatatagtataataatatgtttttgtaattatttgtgttatgtggatataagatttttatagtttgtgtatttgtaaattggttttatttaatataagtttaattttattgtaggttttgataatgtagattgatttttttgtgtatttttaaatttttttttattatatagtattttatttaatttaataaaagttatattatatattatttggtttttggttttaataatttgatgttgttaagttttaatttgtatggaaaagggagaaaagtgttttttttgatttttattttttttaaggggtttttaaaattgtttttataagtaaattat

SEQ ID NO: 3701 - DNA, 2483 bp, Artificial Sequence
  chemically treated genomic DNA (Homo sapiens)
gaaggaatggtatggggtggaaaagtttttttttttttttagggttgggttttttttttgttgttttttgtttttttttgtaggtttgtttttttttttttatattgttgttgtttatatattatttggttagagttatttggtttttttttttttttttagataggttattgttttttgatataggtgttttaattatttgtgtgttttgttatggatttgagtttgttatttttatggtaaaagttgatgtgtagatttaagggattatgtagaatttttgtattattagtgttagaaaatagtttagatttatagaaatggattggtaagttaaatatttttttgtagaagttattgatagttttgttttttttattttgtatatatatagttatttattggtatatgttggggattggttagggtatatatatatatttaaatttgtatattttgagttttatagttagttttgttgtgttatatgaaaaatttgtgttatatgaaaatttgattttttatatataagtgggttttatattttttgaatgttgtatttttaatttttgtttggttgaaaaaaaatttgtatgtaagtgtaattgtgtagtttaaagttgtgttatttaagggttaatggatatatatatattttttttttaattgaagaaaagtttatttttagtggttagtttttattttgtgatgtgatattattttagtattgtttgttatttttttgaatattattaaattgatttaaaatatttttttaatttgtttaattaagaagttggaatttaaaaaattttattaggagtgttttgtgtgttttttgtaatatttagtttgttatgaagttaattagttgtgttatagttgaatgttagtaaaagaatgttaagttgtaaaaggagattagaagtatattttgtgatttattttttggtaggtggtattgtttgtttgaaattatatattagtgttattatatatagttaagagggtttttagaatggattattttattgttttttttttatttaagaattttattttttgatatagatggatgtagggatgggagttggggtagtttgggagatggaatttggtggtttaggtgttgaagggttgagatagatttaggatggttaatgataggaaatttatttggttgtttaaatatggtgttaggtaattagtagttatttaggtaattgatggggttggggaagtttagtaagaggtgatagtgggttttgatgataggattgatttgtttttggaggtaggttatggaagtaggtattatttagagatgtaggtaggtggttggttttggggatgtttgttagttgtagggatgggatgttaggttttgggaagagtaagagtaagatagtattttaggattagggtaattggagtttgtggatgttgttaagaaggaggtgggtattggggaaagagatgtaggagtgagtaggtggtttaggatgttaggtttggtaggattttaagagtaagtagattttggggtagttgaagggttaagaattgtggtgttgtgaagtggtttttaggattttttaggttttttttttaggaaggtttattaaagggttttaggtgtgaaaatagtggattatggaagtgggaataggatgggatatttttaagttgggagtttttggttagaagttattggattggaaattatggagggttttttttggaagggattgttattttatagtttgtgtgtgtgtttggggtgtgtgtgtaagtgagagtgtgtgtataggtatgtgagtatatataggttaatgtgtagggttgtgagtgtgtagagttgtaagtgtgtttatatgtgagtgtgtatggagttgtgagtatgtgttggtgtgtgagtgtgtgtaggtatgtgattgtatatatatatgtgaaatattggttgggaagttttttttaagtggttagaagatggaatgttgttattttagtaataattttgtgtgtgaggtttaagtgtgggttgtgtttataaggtagggattggagtattatttttatttttttagaaggtgtttgtttatgtttaatttttatttattagatgggtagattgataagtgagttttgatataataattttttttgttttgaatagagagtgttagaaaaggaagttagaagaggttttaggttgtttttattttgttggggtttttgtttgggtttttgtaatattaggagagtgagggtttttattttttagaaaatgtggtttggattggggagagaaatagggttatgattgttggagagatagggttgaagtaaagttagaattttgagtgattttagatttaagattgttttttttgtggttttgtaagtagtgaaggttgtagagaagattatagttatttattttttttttgtttggattttttttgttggggtttatgtagtag

SEQ ID NO: 3702 - DNA, 2483 bp, Artificial Sequence
  chemically treated genomic DNA (Homo sapiens)
ttgttgtatgggttttagtaggagaaatttgaatagaaggagagtgagtggttgtggttttttttgtggtttttattgtttgtaaggttatagaagggataattttgagtttgaggttatttaaagttttgattttgttttagttttgtttttttgatggttatgattttatttttttttttagtttaggttatattttttgaagaatggagatttttatttttttagtgttatagaagtttaggtagaggttttagtagggtaaaagtaatttgaagttttttttggtttttttttttggtgttttttgtttagggtgaggggagttattgtgttaaagtttatttattagtttgtttatttgataggtggaaattaaatataggtgggtattttttgagaaaatgaaagtggtattttaatttttgttttataaatatagtttatgtttagattttgtatataaggttattgttagggtagtagtattttattttttggttatttaagagggattttttagttagtattttatatgtatatgtataattatatatttgtatatatttatatattagtatatgtttataattttgtatatatttatatatggatatatttataattttatatatttataattttgtatattggtttgtgtatatttatatgtttgtatatatatttttatttgtatatatattttgggtatatatatagattgtggaataataattttttttaagaaaaattttttatagtttttaatttaataatttttaattagggatttttaatttgaaaatattttgttttgtttttatttttatggtttgttgtttttatatttaggattttttggtaggtttttttgagagagaaatttaagaagttttgagaattattttatagtattatagtttttgattttttagttgttttggggtttgtttgtttttggaattttgttggatttggtattttggattatttatttgtttttgtatttttttttttagtgtttattttttttttgataatatttatgggttttagttgttttggttttggaatgttgttttgtttttgttttttttaaggtttggtgttttatttttgtagttgatagatgtttttaaggttagttatttgtttgtgtttttgaatagtgtttgtttttatggtttgtttttgagggtaagttagttttgttattaggatttgttgttattttttgttggatttttttagttttattggttgtttgggtgattgttagttgtttagtattgtatttaaatagttagatgggttttttgttattggttattttgggtttattttgattttttaatatttggattgttaggttttattttttaggttattttggtttttatttttgtatttatttgtgttaggagataaaatttttagataaaaaaaaaatagtaagataatttattttaagaatttttttggttatgtgtaataatattgatgtataattttaaataagtaatgttatttattaagaaatgggttataaaatgtgtttttgatttttttttatagtttggtatttttttgttggtatttgattataatatagttaattggttttatgataaattagatgttataaaaggtatatgaggtatttttaataaaattttttaaattttaattttttagttaagtaaattaagaaaatattttaaattaatttaatgatgtttaaagaagtagtaagtaatattaaaatgatattatattataaaatagaaattagttattaaaaataaatttttttttaattaggagaaaagtatatatatatttattgatttttgaataatatagttttgaattatatagttatatttatatgtagatttttttttaattaaataaggattgaaaatatagtatttgagggatatgaaatttatttatatatggagggttaagtttttatataatatagattttttgtataatatagtagggttgattgtgggatttaaggtgtgtagatttgggtatatgtgtgtgttttggttaatttttaatatatattaatgggtgattatatatgtataaaatagaaaaaataaagttattaatagtttttataagaagatgtttggtttattgatttatttttgtaaatttgagttattttttgatgttgatggtgtaaaggttttatataattttttagatttatatattaatttttattatgaaaatggtaagtttgggtttatggtaaggtatataggtgattgggatatttgtattaaaagatagtggtttatttggaaagaaggaagaaagttaggtgattttggttaggtgatatatagatagtagtagtgtggaggagagaggataaatttgtaggggagagtaggggatagtagggagagggtttagttttgaaggaggaggagggtttttttattttatgttattttttt

SEQ ID NO: 3703 - DNA, 2493 bp, Artificial Sequence
  chemically treated genomic DNA (Homo sapiens)
gtggttttatttttttagttttggttttgtggttattgtgtagttttagtggagggggtagtttttttgtgttgtgtgtgttttgtttgttttttttgttggattgatgtgagttaaaatattggttatatgtttagtggtaataaattgggtatgagtgtaaatatatttgggttttgatggtttttttagttgttatatggtaggttttgtggggagggggtttttattttgttttggttttttgtttttaaatgtgtgggtagatttttttttttttgtgtttttttgagtaggagatttgggattttaggttttttttgatttttgttttttttttgtttttagtagtgttttggattttgtagtttttggtgagtttggattgttggttaataaggttgttatttataaattgtttggttgttaagatgttataaaattaaagggttagatgtggtatgttatttatgtgtgaaattgtgtttatattagatatgtggatttaaggttgatagtatgattttgtgggaggttatagattttttgttttggttttaggttttttttttagtatgattttttttttaggttgaggggtgttggttttgttgggaaagggatttatttttgtagtttaggaggaaagtgattttagtgtgtttgtgttaaaatgttatttgtttaggattaaaggtagtttttggggtttatttttgtagttttttttttttttttgtttttggtttttttttattatgggtttttgggaggttgttttattttttaggtagttgatatgttttatgggatttagatttgatatagtaagggtagtgtgttagagatgtttaattttgtgggtgggtgggatttgagggtggggttttttgagttttgagggaaggattttgggaagtggagtagtttatttggttgagggagtatttgaaattatttttgttttgggtggtggttgattttagtgttgtatgttatttgttttatttaatttgaggggtagttggagtattgggagaggtagttttggttttggaatatggaatttggtggttttgggtgttgtaggaaagggaagtaaatattttgttttaatagaaaataattgttttgttttttttttttagaaggtggttttaggattgtatgtttttaaattggttattttgtattttatttatatgaatttattaatagttattgtttttttattgttattattttattattttttgaagtgaattaaattttttttgtggttaataagtattgagttaggttttttatttttttttttatttttaaaatatttggggttttttgaatggtattttttgtttggttaaggaaaataagagatgaaaaatgttgttttattgtagggaaaaatataagtattttattttattattattagttattttaggtttgtgtttattagataattgtttttaggtggttgttaagggtggaaaaatgatgttgttgaaagagggtgggagagaaggggagaattaatatgagttgggggtggggaggagagatttatttgataggggtaaaaagagttataaaatgaatttttgaatttgaagtgttgagtaggaatagtgattttttgggtttgtttttttgggttttagatgagtttttagaaagttttagttaattgtagaaaaatttgggattagttttagggttataggagtggttgattttgggaaattatattgttttttattttttttttttggatttttatatttttatttatggttaaaaattaaattatagggtttatttttgggtttatattatttttaagtggaagtgttgagattatagattaattgtttttttgggtgaaaatattgttttatgattaaaattagataaggggatttgaaggtaggtttttatatttgtagtttttgtgggaatgggtgtttttgttttataagtgttttgtgaagaagtttatgttttttttttgtatgtattatagatatgtgttaggtagaggattgagatgtagataaggagtttagaaagttagtgtttggtgtttttagggtggaaaattgagagatatgaagtaaagagtatattaaggtaggttttatattattttttagttaggaaaatttattttaaattagtaaatgtagtagggtatttattagttaattgataataaaaatttatgataaagaagatgtagtggggagtaagtataaatgaaatatgattgtttagatataatttttgttttttttttttggttttatttagtaatttggtgttaaattttatatattatattttttaattttaatagattgtatgttgtttttagttttattattttttatgttatttttattttagaaatatttttgttttatttatggatttaaaatttattgattttttatattggaaaaatttttttttatgaagttttttgtagat

SEQ ID NO: 3704 - DNA, 2493 bp, Artificial Sequence
  chemically treated genomic DNA (Homo sapiens)
gtttgtggggagttttgtggaggaaggtttttttagtgtgaaaagttagtgaattttgagtttatgagtaggataggaatgtttttgaagtaagaatagtataaaagatggtggaattaagaatagtatgtaatttgttgaggttggaggatgtagtgtatgaagtttagtattggattgttgaataaggttaaagagaagaaataggagttgtatttaagtagttgtattttatttatgtttgttttttattgtattttttttgttatggatttttattattagttaattagtagatgttttgttatatttgttggtttaaaatgggtttttttaattagggaatgatgtaaagtttgttttgatatattttttgttttgtgttttttagttttttattttgggagtattagatattgattttttaagttttttgtttgtgttttaattttttgtttagtatatatttgtggtatatgtaggaagaaagtatgagtttttttatagggtatttgtgagataaagatatttatttttatgaagattataaatgtgaaggtttgtttttaaatttttttgtttaattttggttatgaagtaatatttttatttaaagaagtaattgatttgtaattttagtgtttttatttggaggtaatgtaaatttaaaaatagattttatagtttggtttttaattataaataaagatgtaaaaatttaagaaaaaagagtgaaaaatagtgtaattttttaagattaattatttttgtagttttgaagttagttttaggtttttttgtagttaattaaagttttttaggagtttatttaaagtttaagagagtaaatttagagagttattgtttttgtttagtattttaggtttagaggtttattttatagttttttttgtttttattaaatgggttttttttttttatttttagtttatgttggtttttttttttttttttatttttttttaatagtattatttttttatttttaatagttatttaaggatagttatttagtgaatatagatttggggtaattggtaatagtaaagtgaaatgtttatgtttttttttgtagtagggtaatattttttattttttattttttttggttagatggaagatgttatttagggaattttaggtgttttgaagatgaaaaggaaggtagggggtttggtttagtgtttattaattatagagagaatttggtttattttaagaaatagtaaaataatggtaatggagagataatgattgttaatgaatttatgtgagtaaagtgtgaggtgattagtttggggatatgtagttttaaggttgttttttgaagaaggaaagtaaaatgattgttttttattagaatagagtatttattttttttttttgtagtatttagggttattggattttatattttgaggttagggttgttttttttagtgttttggttgttttttaagttaaataaggtaggtgatatgtgatattggagttgattattgtttgaggtaagaataattttaggtgtttttttagttaggtgaattgttttgttttttaaaattttttttttagggtttaggagattttatttttaaattttgtttatttatagagttgggtatttttagtatattatttttgttgtgttagatttaggttttatgaaatgtattaattgtttggaaaataaaatagttttttaggggtttgtaataaaaggaagttaagagtaggggaaagaggaaagttatggaaataaattttagagattgtttttaattttggataggtggtattttggtataagtgtattgaaattattttttttttgggttgtaggggtgaattttttttttggtaagattgatattttttaatttggagaggagattgtgttgggggaggagtttggagttggggtgagaggtttgtgattttttgtgaagttgtgttattggttttggatttgtgtatttagtgtaaatgtggttttatatataaataatgtgttatatttggttttttggttttatggtgttttagtgattgagtaatttatagatggtgattttgttaattagtagtttgggtttgttaggagttgtggagtttaaggtattgttggggatggaggaggggtgagggttaggagaaatttggggttttagattttttgtttagaggggtgtaggagggagggaatttatttgtgtgtttgggggtagggggttgaggtggggtggaagttttttttttgtaaagtttattatgtggtagttgaaagagttattgaagtttaagtgtgtttgtgtttatatttaatttattattgttgaatatatggttaatattttgatttatgttagtttggtaaggaaaataaatagagtgtgtgtggtgtgggggagttgttttttttgttggggttgtgtggtggttgtggggttggagttaggagggtggggttgt

SEQ ID NO: 3705 - DNA, 2443 bp, Artificial Sequence
  chemically treated genomic DNA (Homo sapiens)
gaaataaaaataaaaaattaaaaaaaaaaaaaaagaaaagaaaagaaatgaaagatggaatttttaagagttttgggttattaaaatgaaataaatatatgtttatgttattattatgtaaaggtatttaagtttttgaaatatattttatttatttattttttaagagtttgagttgaatttatttagaaaattttatgttttgttaatagattaggtttatgatgatgatttttaaatttagtaatttatatattttttattgttattgttttatgtatgggtggttattgtattatttttattttgtagatgagggagtggaggtgttaggttgttaatgagttggttagggattgttggaagtaagtgttaggagtgagattggaatattgtatatttttatttggttgttttttttttgtagaatgtgtagattgaaataaaatgagtttgataggggttttatttagttttggattattgtttttttttgtagagttagttttgatgagggttatttttataggaaagaaattagtagaggaattagttttggatttttaagaagttaaggtgtattataataattttgtttttaaaatttttgggataggttaagtagtttatttattaaatgtatatagaatgattgttatttgtttagtagatgagatgtttgggaggttaagagaggaaattgaagtttatgtggaggtttgtggtttatagtagttttagttattaggttttttttttttttttgaaagttgtagagatgtgtatgtttgtagtttgttgagaaatttggttttgggttagttaatttgaattttatttatatatatttttttaaggtgtgagttgagaaggggtttttagatgtagatgtttaggaataaattttaggtagttggtgggatttgttttttggttattgtttatgttttttttgttttttttatttttgtatttattttgttttagatatttggttttgtgtagttttttttatgttagataggaggtaatatttattggaagttgttggtgttgtagtgtgttggtttgggttgagatggtgtgaaaattttgtttgttttgttgttttttaatttttttaggtagtgatagttttttggtttgttttattggtaatgtttgttgtggggttttattaatttattatatttttaatgtgtagttgttgtaggtagtgtgattttttggtgttttgttgggttgttatatttggaattgatttgggatttaaaaaggttgtggattgaggaaattttaaagtgttgtttttttttatttttggttatttatttttgagttgaggtagtgggatttggttaagttgagttaaagtgaaattgttgaaattaagaaagatagtagttaatgtgatggtagtgggtggtgagaattttttttttttttttagttttgtggattgttagtttggatgtttgagtggggttttgttaattttgtttgttgtttttgttgttaggtttggtatttgttttttatttttatatgattgtttgttttgagtttagtgagtgttgtttgtatttttggttgttgtagatagtagtttgattttttaagttggatattgttttgatttttttttggtttatagattatattataattttttttttttttataagtgtaagtatttttttgtagtatttaaaggtttttgatgtagtggaggtttttaagatttttttttttttaagttggtgtattgttttttttttattttgtttttatgttttaaatttaattgtatggatattattaattgtatgttaaatggtgatgttagaaatgattttttgtaatgatttagaaaaagttttattttttataaaggtttttttttttttttttatgatttagttttatatatgattattgtttgtaataaagattaagttttgtaatttattatgtttttttttgatttttttgtttttatggtattgttttttgttttatgtttgagtattttttttttttttttagtttttattttttggtgggttgtgttaatagtgtagtaagaggaatttttggaaggaggttaaatttggttttggattatttttttttaatatatattggtttttgaaaattagattttgtttgttatttggtttgtttttttagtgttgtgttattttgatggtaatgttgatggattttaagtttgttttgtagagtaatgtataaggtttttataagtatattaattttaaaagaaaaattgttagatgtaaataatatttatatgattgatgttgtaaagatataaattaatttttaatatttatttttaaggaatattattttataggggtttgatgttgtttttaatttttttttaatataggtatttgtgttgtaggattttgtggtatgt

SEQ ID NO: 3706 - DNA, 2443 bp, Artificial Sequence
  chemically treated genomic DNA (Homo sapiens)
atgtgttataaaattttgtaatataagtatttatgttggaagagagttaaaggtaatattaggtttttgtaagataatattttttgggaatggatgttaagagttagtttgtgtttttataatattagttatatgggtattgtttgtatttgatagttttttttttaagattaatgtgtttatgaaaattttgtgtgttattttatgaggtaagtttgaaatttattagtattattattggaatgatataatgttgggagagtaaattaaatgataaatagaatttggtttttagaggttagtgtgtgttgaagagaaatgatttgaagttaaatttggtttttttttagaaattttttttgttatattgttggtatagtttattaaagggtgggggttgagggaggagggagggtatttggatatggagtgggagatagtattatggggataggggagttggaagggagtatgatggattgtaaaatttgatttttattgtaaataatagttatatgtaaaattaagttatggagaaagaaaaaaaaatttttgtgaaaaatgggattttttttggattattatggaaagttgtttttaatattattatttgatatgtagttggtgatgtttatgtaattggatttgaggtgtaagagtggaatggggaggggatggtgtattagtttaaggggaggaaaattttgaggatttttattgtgttaggaatttttagatattgtaaagggatgtttgtgtttatgagaagagggagaattgtggtgtggtttgtaggttaaggggaaattaaagtaatgtttagtttgagaaattaggttgttgtttgtggtagttagagatgtagatagtatttattgggtttagggtaaataattatatagagatggaaaatggatgttaggtttggtagtaagagtagtaggtagggttagtgaggttttatttaggtgtttggattgatagtttatgaaattgagagggaggaggggatttttattatttattgttgttatgttggttattattttttttgattttagtagttttattttggtttaatttggttagattttattattttagtttagaaataggtggttagaaatagaagggaataatgttttagagtttttttgatttatagtttttttgagttttaaattaattttaaatgtggtagtttagtgaagtgttaagagattgtattgtttgtagtaattgtatattggagatatgatgaattggtggaattttatggtaggtgttgttagtggagtaggttaagaggttgttattgtttgggagagttaggaaatagtgggatgggtagggtttttatattattttagtttaggttagtatgttgtggtattaatagtttttaatgggtgttgttttttgtttggtatgggagaagttgtataaaattaagtgtttgaaatagagtagatgtaagagtggggaagatggaagaggtatgagtagtaattagagagtaaattttattagttgtttgggatttgtttttagatatttatatttgggggtttttttttagtttatattttagaaaagtgtgtgtgagtggagtttagattggttggtttgagattagattttttaataggttgtaggtatgtatatttttgtagtttttaaggaagggagggaggtttggtggttgaggttattgtgagttataagtttttatatgggttttagtttttttttttgattttttaggtgttttatttgttggatagatgatggttattttgtgtgtatttggtgggtgggttatttagtttgttttaggggttttgaaagtagaattattataatatattttggttttttgagaatttagagttgatttttttgttgattttttttttatggaggtggtttttattaaagttagttttgtagggagaagtaatggtttggaattgggtgaaatttttgttaggtttattttattttaatttatatgttttgtgggagagaggtagttaggtgggggtatatagtgttttagttttatttttgatatttatttttagtagtttttgattagtttattaataatttggtatttttatttttttatttgtaaaatgggagtaatatagtgattatttatgtataaggtagtggtagtgaggaatgtataggttattgggtttaaaaattattattataaatttagtttattgatagaatatggggttttttaagtgaatttagtttaaatttttgaaaagtaaataaatggagtatattttaaaggtttgagtgtttttgtatgatggtgatatggatatatatttattttattttggtgatttaaagtttttaagaattttattttttatttttttttttttttttttttttttttttggttttttgtttttgtttt

SEQ ID NO: 3707 - DNA, 2469 bp, Artificial Sequence
  chemically treated genomic DNA (Homo sapiens)
taaattttgtttgttatttgttttgtaaataaagttttattggaatatatgtatgtttatttgtttatgtattgtttttatgttgtagtggtagagttgagtagttttaatatagattgtatggtttttaaagtttaaaatatttattattttgttttttataaaaaagtttgttgatttttgttttaagaagtttttaaatagatttatatttaaaatgtagtaatggttaaatttatagtaatgattttttttgttaggaagatggaaggtttttttattgtaaaatatttgtagattttaatatttttttttgttatgttttgtttaatagatagataggtatggagaaggtattatgtggtagtaagggaggtgggtgttaagggtgtattataatattgggaagtatattttttaatattaggagtttatgtgatttagttgaagagagaatatttgtattagttaaaagggaatatttagtagtatttaaataaaagttattttatatgttattaagtatattataagaatttttagaaagaagtattattttttgtttaatagtttagaggatttttattagtaaatgaaaaatgatagttttattttattttttaaatatgttaaaattattttgagttgttgggtattagaattgataggtgttatgtatttaagtttatttgaaaaatatattttaataatggagtgagattttgttttaaaaaaattttaaatgtttttttttaattgaaaaaatttattatttttagatagataagtaaataatttttgtaaatttgagttatatttttttttttttttttaaaatttagtttaatataattgaaaattgaagtttgattttttaagtttataagggataaaagagagataggatagatagaaataattggtaatgaggagttattgggttttggttttatgggagataatagtggttttatagaaggtaatggtggatttttagttaattgaagtttgggtggaatttagttgtataattaagaagttgaatttgttttattttatttttttataatataaagagtgtgaaaaggttattttaatgtttagagagtggttttttttggaaaatatttttgaatatattatggagtagtgttaattgtagtataaaatgttttagaaattttgtaatttatgagtttaatggtatatttgaggattatgaggttttttttgtttatttataatagtttggtgattgatttagtagagaggaagtaaaatgaataattttgattattttttaatattttttttgttttgttgattttagagttttaggggtatagtatttgtaggaattgtatgtttttttggtaatattttaaaattaaatttaaaagatgaagaagaaaaatggttattagatagttataaatatgttattatttgtaaatggtattgttttgtggatatgaagttttttattgtttatttgtttttaagtttaatgatttatatataaaggtgtaaggatttattgatattgtgttttttttttgttgatattattagtttgagaattaaggataatggatagttgtatataagtttaagttttgtatttattttttagtttttttttttattttttagttgtgtttgttttttttttgaaatttgtaaagtaggaataataataaagttattattttttgtagggttttgaaggatttttttgagataatgtaaagtattaggtatataattagtttaaatgtaatttaattgtgtttttttattttaatatatatgttattatttatttttagtgtagagaattaatagaatataaataattttgaagatttatataatatttatatgttgtaaaattttgtttgtggagtttttattgtagtttgtatgatttaaatgatgttatgtagttttttaaatatttttagatattaaggaattttatattgttgtgttattttttaaatgtttgtatttttttgttttttttttttttaatttttttgaatttgtttatttagtgaataaaattaggaagaagtggatgttgtaagaatatttatgtgtttaaaggttgtggttgttttattatagttatttattagtagttttagtatgtagttagagattgtagaaaaaagaattatttttttttttgatttgaggatgtatttttagagtgtttttggggtaatggatttaaaattaaaattttaaatgttagtttttaagtgtgaatttttttttagtatttttgttttttttttataattttttattttattgagttttagagagtagatagtttaggttttttgatttggtagattaatgaggaaggataattaaagaaagtttaaaggtattttttatattaaaatattttattttttttttattgtaggtgtagttaaaagtattaatgttatattt

SEQ ID NO: 3708 - DNA, 2469 bp, Artificial Sequence
  chemically treated genomic DNA (Homo sapiens)
gggtatggtattagtgtttttaattatatttgtaatgaaagagaagtgaggtattttggtataaaagatatttttaaattttttttagttatttttttttattgatttgttaaattaagaaatttaagttgtttgttttttggaatttaatgaaataaaaggttataaggagagaataaaagtgttgaagaaaaatttatatttaaaaattagtatttaaaattttgattttagatttattattttagaaatattttggagatgtatttttaaattagagaaaagaatgatttttttttttatagtttttgattgtgtgttgaagttgttggtaagtaattataatggggtaattataatttttaaatatataaatatttttatagtatttatttttttttaattttatttattggataaataaatttagagagattgagagagagagagatagaaaaatgtagatatttaaaaagtgatataatagtgtaaaattttttaatatttggaaatgtttaaaggattatgtggtattgtttgaattatataggttataatgagggttttataaataagattttgtaatgtgtgaatattatatgaatttttaaaattatttgtattttgttgattttttgtattagagatgggtagtgatatgtatattaaaataaaaaaatatggttgagttatatttaggttaattatatgtttggtattttatattattttaagaaaattttttaaaattttataaagaatagtaattttattattatttttattttatagattttaaaaaaaaaataaatataattgaaggatggaaagggaaattaagaagtagatgtagaatttgaatttatatatagttatttattgtttttagtttttgggttaatggtgttaatagagaggaagtataatgttaataagtttttatatttttatatgtggattgttgaatttaaaaatagatgagtaatgaagagttttatatttataaagtaatattatttgtaaataatgatatatttataattatttaataattattttttttttttattttttgagtttgattttaaagtattgttaaaaagatatataatttttgtaaatgttgtatttttaaagttttgaagttagtaagataggaaaaatgttaaaaggtgattaagattgtttattttgttttttttttgttaaattagttattgggttattatgagtggatggaaaaaattttgtaatttttaggtgtgttattaaatttataaattgtaagatttttaggatattttatattatagttgatattgttttatggtatgtttggggatattttttaagagaagttattttttgaatattaaaatgatttttttatattttttatgttatagaaaaataaaataaaatagatttagttttttaattatgtagttaagttttatttaagttttagttgattaagagtttattattgttttttatgaaattattattgttttttatggagttaaagtttagtaattttttgttgttagttatttttatttattttgttttttttttattttttataggtttggagagttagattttagtttttaattatattaagttgaattttaaaagaaaggggaaaagtgtggtttgagtttgtaaaggttatttatttatttatttagaaataataggtttttttaattgagaaaagatatttgaaatttttttgagatagagttttattttattattgaaatgtattttttaaatgggtttaaatatatgatatttattagttttggtatttaataatttaagataattttgatatatttggaggataaaatgaggttgttattttttatttattaatagaaattttttgaattattagataaaggatgatatttttttttggaaatttttatagtatatttagtgatatgtgaaatagtttttgtttaaatgttgttaaatatttttttttaattaatataggtgttttttttttagttaaattatataaatttttaatgttaaggaatatgttttttagtgttgtgatatatttttagtatttattttttttattgttatatggtgttttttttatgtttatttgtttgttaaataaggtatggtagagagaagtattaaaatttgtaaatgttttatagtaagaaaattttttatttttttggtaaaagaaattattattataaatttggttattgttgtattttagatataaatttatttgaaagttttttagagtaggagttagtaaatttttttgtaaagagtaaaatagtaaatattttaggttttggaagttatatagtttatgttagaattatttaattttgttattgtaatatgaaaatagtatataaataaatgagtatgtatatattttaataaaattttatttataaaataagtggtaggtaagatttg

SEQ ID NO: 3709 - DNA, 2442 bp, Artificial Sequence
  chemically treated genomic DNA (Homo sapiens)
agtttaataattatattttggttataggttaaaatagtgtttataaatagttttataaaataagaagaatttttttgtattttttaaagtattaaatttgtgattttttttttttttttttttttttgagatagggtgttattttattatttagtatggagtttagtggtgtaattatggtttattgtagttttgattttttaggtttaggagatttttttattttagtttttgggtagttgggattataggtgagtattaatgtgtttagtaattttttttttgtatttttgtagagataagtttttgttatgttgtttaggtttgttttaaatttgtgggttaaggtgatttttttgttttggatttttaaagtattgagattatagaggatagttattgagtttggttttatatttgttttaattttattttagaaattttattgtttaaagtagatgttaaaattttttagtagaagtaatggttgtgataaagttttagagtagagagttattaagtttgaaaaataatagtaggttatatgaatttttgaagaaattagttgtttattttttttaaggagagaagtagttaagaagttgaaaaaatatgaaagttatattgtttattttattgtaatttttaaatttttttttgggtataagtttttttagaggataattggaaaggttatatatttagtgtatgtaaagaattttggtttgttttttattgtattaggaatgaaagaaagatattattggttagtgtgtagggttttttggggagaagttgagttgaagtgatttagtatgttttatgttgtttgattaatgttaagtgagggggttattgagtgaaagtttatagtaatgttattttttgtaattgaaaatgttatgtaaaaaataaaatatgttaatagtttttgttgtttgttttatattttggagagttgtgtatattttaagttatttttgtaatttaaaagaattgtaattatagagattgtgaggggagtagttggtttgtaaagttgtttggggtaaatttgttagagtttatgagtaaatataatttgaaaatagaggttgtttgtggggaaattagttgtttttttaataaaataaaaggaagagttttgtttagggtaatgtgatgatgatgtgtaattgttttgtattaattataatttttttttttgtttttttattgtttagtttttttttattttatagtaagaaattgaggttgtatattgtatattgggaatatttaaattggaaataattaaaatatatattttatttatagtgggttttatgtgaggagaagtaaagattgttatagttttttgagtatatgagttaatgatgtgttttgtatttttttgattttttatattttaattgtttttgttttttatttgggggtagggaattttgagaggtatggaatatagatttgtatgagtagaaatgtatagtttttgagtatgtgaggggatggtgtggagaaggttgggtttattatgtggttttttggtattatttttttttagtttttttttttagtgttaaagtaagtatgttattaagaatgttttaaattagaaattggtttaagattattgtagtattttattaggttgtgtttttagaatatgatgaataaatggatttttaaaatgaagttttaaaaatgatagttaaaaaaggaatatagatttattgaaggaaaaaatttataaaagattttgtgtgtgtgtgtgtgtgtgtgtgtgtatgtgtgtgtgtgtatgtatgtgtgggtgtgtgtgtgtgttgtaagtatatttaatatatatttatattgaatgaagttattggtaaagtaaagtaaaatttttgttttttagatttaattaggatattattttgatggaggttaagttagtaaaaatatagttagaaattgggtataaagggtaaattgattgtaaattttggagattgtttgtatgattgggttgtatgattgaagtttaaaaagtaaaaagtgttttatatagaattgtgagtgtgtttttggttatggttagttataaagggaagaaatatgaaagttatttttaaaatgtttggagatagaaattttgtgggggtaaatttaaggggttagaatgtatttttatttattgtgtgagtttttaaattgtgaagaaatattatttttagaatgagtttaaagttgatttaaagtgataattaaaggtaatgaattgagaaataaaagtgtgaaagatatgaaatattttatttgtttaatttttataaaaatttaatgaaaaaatgaaaaagtgttttttttaatagtaatttatagtttttggtttagagttgggatatgtggaaggaatatagatatgtttttttaaattgtttggtatttttggattag

SEQ ID NO: 3710 - DNA, 2442 bp, Artificial Sequence
  chemically treated genomic DNA (Homo sapiens)
ttagtttaaggatgttaagtaatttgggagagtatgtttgtattttttttatatgttttagttttgagttagaggttgtgaattgttattgaggaagatatttttttatttttttattgagtttttatggggattaaatggataaaatgttttatgttttttatatttttattttttaatttattgtttttagttattattttgagttaattttgaatttattttagaaataatatttttttataatttgaaaatttatataataaataagaatgtattttgattttttggatttatttttatagagtttttatttttaaatattttgagaatgatttttatattttttttttttatagttagttatgattaaaagtatatttgtaattttatgtaagatattttttattttttaagttttagttatgtaatttagttatataaataatttttaagatttataattaatttgttttttgtatttagtttttagttgtgtttttgttaatttagtttttattaaaatgatgttttaattaagtttgaagaatgggaattttgttttattttattaatgattttatttagtatggatatatattgaatgtatttataatatatatatatatttatatatgtatatatatatatatatatatatatatatatatatatatatatagagttttttgtaggtttttttttttaatgagtttgtattttttttttaattgttatttttggaattttattttgaagatttatttgtttattatattttaaaaatataatttaataggatattgtaatggttttaaattaatttttggtttgaaatatttttgataatatgtttgttttgatattgaagggagaaattggagaaaaatagtgttaagaaattatatgatgaatttaattttttttatgttatttttttatatgtttaaaagttgtatgtttttgtttatgtaagtttgtattttatgttttttaaagttttttatttttaaatgaggaatagaggtagttaaaatgtggaaaattaagaaaatgtagaatatattattaatttatatatttaggaagttgtggtaatttttatttttttttatataagatttattataaatgaaatatatattttaattatttttagtttagatatttttagtgtgtaatatataattttaattttttgttgtagaataaaggggaattgggtaatgagaaagtaaaaaaaaaagttgtagttaatgtagaatagttgtatgttattgttatattgttttgagtaaaatttttttttttattttgttgaaaaagtaattgatttttttatgagtagtttttgtttttagattgtgtttatttatgagttttgataggtttattttaagtaattttgtaaattagttgttttttttataatttttgtggttataatttttttaagttgtagggataatttaaaatgtatatagttttttaggatatgaggtaggtagtaggaattgttgatatattttattttttgtatagtatttttaattatagaaaatggtattgttatgaatttttatttagtggtttttttgtttgatattaattaggtaatataaagtatgttaagttattttagtttagtttttttttagaaaattttgtatattggttgataatgttttttttttatttttgatgtaatgaaaaataagttagagttttttatatgtattgagtatatggtttttttagttattttttgagagggtttatatttagaagggaatttggaaattgtaatggagtgggtaatatagtttttatatttttttagttttttggttatttttttttttgaaaaaaataaatggttaatttttttaaaagtttatataatttgttattgttttttaagtttagtgattttttattttaaaattttattataattattgtttttgttgaagagttttgatatttgttttaggtagtagagtttttgaaatgagattaagataggtgtagggttaggtttagtggttgttttttgtaattttaatgttttgggagtttgaagtaggaggattattttagtttataagtttgagataagtttgggtaatatgatgagaatttgtttttataaaaatataaaaaaaaaattgttggatatgttgatgtttgtttataattttaattatttgggggttgaggtgggaggattttttgagtttgggaggttaaggttatagtgagttatgattgtgttattggattttatattggatgatagagtgatattttgttttaaaaaaagaaaaaagaaaaaaaagttataggtttagtattttgaagaatataggaaggttttttttattttataaaattgtttataagtattgttttggtttgtagttaaaatatgattgttaaatt

SEQ ID NO: 3711 - DNA, 2396 bp, Artificial Sequence
  chemically treated genomic DNA (Homo sapiens)
agtggtttatgtttgtaattttagtattttgggaggttgaggtgggtagattatgaggttaggaaattgagattattttggttaatatggtgaaattttgtttttattaaaaatataaaaaattagttgggtatggtggtgggtgtttgtagttttagatatttgggaggttgaggtaggagagtggtgtgaatttgggaggtggagtttgtagtgaattgagattgtgttattgtattttagtttgggtgatagagggagattttattttaaaataaataaataaataaatttttaaaggagatttttttttttttaataaaaattatgtattggattagttatttttttaaatttttagtttaaaataatgtgggtagttttataaggaaatatatatattggattatatgaaatgaattgttaatatttgttataaatttatgaaaatattaagtttaaatggttttgtttaatatttatgtaatataattagtaaattttaggtattgtgtgatttaggtagagtatatgtgtgtatatgtgtgtgtgtgtgtgtgtatgtatgtatatgtatgtgtgtatatattttgtagagtttagggttttttgttaaatttttgggtttaagtgatttttttgttttagttttttaaagtgttaagattatagttgtgagttattgtatttgatatatgtagaaaatattttattgtagtataaaatatatatttgagaggaaaagaataagagagagaggtttttaatttaaatatagttaattaaggaaaaaataaaattaatatttgaatgaatattgaaatttttttaaaaaaagataaatgagggggaaattatataagtaagtaaggttttatatatatggtgttttagaaattaattagtggatagatttagaatttatatttttttttttaaaatgttttttggtagaagttattttgtaggataaattggaattaaaagagttatgaaaattgtataatgggatgaaggggttttttttgttggggaatagatagttgatatgttggatggggttagggtttaaataaaggtttttgttgagtgggagtaggtataagatagatggtttgttaaatattgttagtatgtttgtgtagtgttgtgtggtggttagagtttggataatggttattagggtattgtgtagtagtgtattggttaattttagtttagttaaagttattgtttatttttgttggttttgtaaagattaaggtagtttttttgttttgaatgtattatagttgtttagtaaagtatttttgaagttttgtttgaatttttattgttaagaggggttaagtaaaaggtggtttgtgtaaggatttgttttaagtttatatgtgaagttgtttttttttaattaatttggattatttttgatttttatttttgggtaaaattttttagagttataggggtttttttttttagtgagtttttttttgtgtggtttgaaatgtatttgttggggatttatattttttagatttatattttttattgggattgatttatttgttatttttgtggaaaaaggtaaatattattgtaaattttatttggtgaattatggggaggtggtggttttaattaaatgtgtttgtttttggaagggggtttttggttttttatttttatgtatagaagaaaatagagtttaattgggtttttgtagttaatggaaatgtatttggtttagttagttgttaggttgagtttttgttgttttgggttttaatttgttttttttggttgtttgtagataaagggagagtagttgtgggttatgtagaggggatagtttttttggttttgtttatagttttaaagtaaagtagggggtgtagttattatttgggtatgttaggaaagggtgatggttgattggtttagtatttttaatagtttaaatgtttttatttttttttaaaggtagtgtatatttatttttatttaattgaattagtgttgtatttattttaggtagttttttttgtttaaattagattatttttagttataaaattaagaaagtgtgtttagtagattaagttttaaaagtggatttgttaattatatttatagaagtaaagagagtaagagaatttttatatatttttttttttttttttttttttttttttttttttttttttttttttttttttttttttttttttttttgtttttttttttttttttttttttttttgttttttttttttttttttttttttttttttttttttttttttttttttttttttgttttttttttttttttttttttttttttttgttttttttttttttttttttttatgtatgtattatatatttttatt

SEQ ID NO: 3712 - DNA, 2396 bp, Artificial Sequence
  chemically treated genomic DNA (Homo sapiens)
ggtaggggtgtgtggtgtatgtatgagagagagagagagagagaaataagagggagagagggagagagagagagaaataagagggagagaaggagagagagagggaaagagagagggagagagggagagaggtagagagagagggagagagggagagaggtagagagagagggagagagggagagagggagagagagagagaaaagagagagagagggagagagggagagtatataaaaatttttttgttttttttgtttttgtagatgtagttaataagtttatttttagggtttaatttgttgggtatatttttttgattttatagttagaaatgatttaatttaggtagagggggttgtttgaagtaaatatagtattggtttaattaggtggggatagatatgtattatttttaaaagaagataaagatatttgaattgttggaaatattaaattgattagttattatttttttttaatatatttagatagtagttgtattttttgttttgttttgggattataggtagagttaaggggattgttttttttgtatgatttgtagttattttttttttgtttgtaaataattgagaggagtgagttggagtttagagtagtagagatttagtttagtagttgattgggttaggtgtgtttttattggttgtagaggtttggttgagttttatttttttttgtatataaagataagaagttaagggtttttttttgaaagtaaatatgtttaattggaattattgtttttttatgatttattggatggaatttataatggtgtttatttttttttataaaagtagtaaatgaattaattttaataggaaatataaatttaggaaatataaatttttagtagatgtattttgaattatataggaaaggatttattgagaaagaaggtttttgtaattttagagggttttgtttagaagtaagagttaagagtggtttagattagttgaggagaagtaattttatatatgagtttaaaataagtttttgtatgagttattttttgtttggttttttttagtagtgggaatttagataaaattttaggaatgttttgttgggtagttgtggtgtatttaaagtagagaaattgttttaatttttgtaaaattaataaagataagtaatagttttagttgggttgaaattagttaatgtgttgttatataatgttttggtgattattatttaggttttgattgttgtatggtattgtgtaagtatgttggtaatgtttaataaattatttgttttgtatttgtttttatttaataggggtttttgtttgaattttggttttatttagtatgttagttatttattttttaataggggaagtttttttattttattgtataatttttataatttttttgattttagtttgttttatagaatgatttttgttagagaatattttggaaagggagatatggattttgaatttgtttattgattagtttttagagtattatgtgtgtgaaattttatttgtttatgtgattttttttttatttgtttttttttaagagaattttaatatttatttaaatgttgattttattttttttttggttagttgtgtttaagttagaaattttttttttttgtttttttttttttagatatatgttttatattgtagtaagatattttttgtatatgttgggtgtagtggtttataattgtaattttagtattttgggaggttgaggtagaaggattgtttgagtttagaagtttgataggagattttggattttataaaatatatatatatgtgtatgtatatatatatatatatatatatatatatatatatatatatattttgtttaaattgtatagtatttggaatttattgattatattatataggtgttagatgaaattatttgaatttaatgtttttatagatttataataaatattgatggtttattttatatggtttaatatatgtatttttttgtaaaattgtttatattattttagattagagatttgagaagataattgatttaatatatggtttttattaaaaaaaagaaagttttttttgagaatttatttatttatttattttgagatggagtttttttttgttgtttaggttggagtgtagtggtgtgattttggtttattgtaagttttgttttttaggtttatgttatttttttgttttggttttttgagtatttgggattataggtgtttgttattatgtttggttaattttttgtatttttagtagagatggggttttattgtgttagttaggatggttttgattttttgattttgtgatttgtttgttttggttttttaaagtgttgggattataggtgtgagttatt

SEQ ID NO: 3713 - DNA, 2417 bp, Artificial Sequence
  chemically treated genomic DNA (Homo sapiens)
tgtttttgggaagtggagttagtatggtagatagaataaagttgtagttgttttagtatttaatagagatgagatttggatatgaataattgtaatataagatgggatgtgatttagtaatgtgagatagagtgttgtgggagtttagggattgtttttgaaagtgaggttgtagtttgtaaaggtttttttttttttttttaaagtaaaatttgtaaaagtagtattgttttttggaaataagtaaaatgttattaattgtatgaaataaaatatgaaagttttttttttttttttatttttatgttttagtgtaatttatggtttgtaataggatttttttagaatgttttttttgagtatatatatagagtattttttttaaaagaaataagatagtagtagtattatgtatttttaaaaattttaatttgttttttaaaaggttatatatttatatagttttgaattgaaaagatataaatgtagagttttttttttgttttttttttttaattgtttagtttttttttttagagatagtgttgttagttttttaagtttttttgtagagattgtttttttttatatatatttttatttatttttttttttttatttttttatataaatagtattatattttatattttgtattttggtttttttatatatgttgtgtattttaaagatgtagtttaggtgttattttaggtatgttttggttttttttttgataagtatgaagttttttatgataatttagtgatatggaggtagatttgtatgatgttttgggtttgtgatttgaggttttaaggattagagggtaaggtagtagtatttggtttttatttttttttggtttaattgagttttgggggtttgtgtattgttttgagtgtttggttgaatttgtatattttgttggattaattttgatattgttttttttttattttttttgatgaaggttgttttattgaattttgtttgttggggaagttttttattgttgagagtagtagttaaaaaagttgttagttatgtggttgggtttttatttttgtagaggtaggttgagttatagtttggtggtgtggatttaggtaggaattggttaatattttgaattttgagttgttatttgttttgtagtttgttgggatgtttagtttagataatatataaagttttttggatatgggataaatttaggtttatggaaagagtaggaaggttaaagtgtgtggtattttgggtaatgatgaaggtgtaattagggagttgatatgtttgttttaaagttaagaattttaggataatttgttatttagttgaagttagtgtagttgttataaaaaagtttggggataaaagtatgttttttatttgtttttttgtttttttgtatatttattttattttttaaagttgtagtaaaggttgttgatattggaaatgtttgatgatttttgttattttttttgtaaatgaataagagtttgggtttaggttaaattatggttttatgtgttgaaagtattagttttttgaaatagttttataaatgttgatattttatttagattaggagggttaggggaaaggtttaagtaagtattaggttttattatgaaagaatgattttaatagattaaatttggtttgatggtattaaatgttttttttttatttttttttttttttttttttaaagtattattggttagagaggaaatagaaatttgggttgttagatttgaagagatttatatagtatgggattggtgttttagaatattgtaggtgtgtgaatgtatgaagagttgtatttaagtgttattgtttagtttgtttgggtattgatggttttaggtttttttttaggagtaagggtgggagatatttttagtgggttaagatattagttagtggttataatttgtaatgtgaaaagtagtttggggtagttttatttaagtttgtttagtggtgaagagagaggagaaggttgtagttttgtattgatgtatttttattattatatttagggatattttgtgatatagatgagtggggttttttttttttttttgtaaaattttggttttatatatagtagagtttttttttttttttttttttatatatatatatatgtgtgtgtgtgtgtgtgtgtgtatgtatatatatatatgtatatgtatatatatagtattttttttttttttttttttttttgagatggagtttttttttgttgtttaggttggagtgtagtggtatgattttagtttattgtaatttttgttttttgggtttaaataatttttttgttttagttttttgagtagttgagattataggtatgtattattatgtttggttaatttttgtgtttttagtgtagatga

SEQ ID NO: 3714 - DNA, 2417 bp, Artificial Sequence
  chemically treated genomic DNA (Homo sapiens)
ttatttgtattaaaaatataaaaattagttaggtgtggtggtgtgtgtttgtaattttagttatttaggaggttgaggtaggagaattgtttgaatttggaaggtggaggttgtagtgagttgagattatgttattgtattttagtttgggtaatagagggaaattttgttttaaaaaagaaagaaaaagaaaagaatattatatatatatatatatatatatatatatatatatatatatatatatatatatatatatatatatatatagagagagagagagagaaaagttttattatgtataaaattaaagttttataaaagaaaaaaaaaaattttatttatttgtgttatagagtgtttttgagtatggtgatagaggtgtgttagtgtaaggttatagtttttttttttttttttattattaagtaagtttaaataaggttgttttagattgttttttatattataagttatgattattgattagtattttgatttattggaaatgttttttatttttgtttttgaaagaagatttgagattattagtgtttaaataagttgggtaatagtatttggatgtaattttttatgtatttatatatttgtaatgttttgggatattagttttatgttatgtgggtttttttagatttgatagtttaagtttttattttttttttgattaataatgttttaaaaaaaaaaaaaaaaaaaggtgggggaagggtatttgatgttattagattaggtttagtttgttgaaattatttttttatgataaaatttagtatttgtttaggttttttttttgatttttttggtttgagtgaaatgttagtatttgtgaagttgttttaggaagttgatatttttagtatatagagttatggtttggtttgagtttagatttttatttatttatgaggagaatagtaaaaattattaaatatttttaatgttagtaatttttattatagttttagaaaatagagtaggtgtgtaagaagatagggaaataagtaaaaagtatgtttttgtttttaggtttttttgtagtaattatattggttttagttggataataaattgttttggaatttttggttttggagtaaatatgttagttttttggttatgtttttgttattgtttaaagtattatatattttaatttttttgttttttttataggtttgggtttgttttgtatttaggaaattttatatgttgtttaaattgagtattttagtaggttatgaggtagatggtagtttaggatttagaatgttgattaatttttatttggatttatattattaagttgtaatttagtttgtttttgtagaaataggagtttagttatgtggttaatagtttttttaattgttgtttttagtaatgaggaatttttttagtagataagatttagtaagatggtttttattgagagaaatgaaaaggaagtaatattaagattgatttaataggatatataggtttaattaaatatttaagataatatgtaagtttttaaagtttaattaagttaggaggagatgaggattaggtgttgttattttgttttttagtttttgggattttaggttataaatttaggatattatgtaggtttgtttttatgttattagattgttataagaggttttatatttgttaggaaggaagttaggatatgtttgaggtggtatttgaattatatttttaaaatgtataatatgtatgaaaaaattaaggtatagagtgtaaagtatgatgttatttgtgtaaaaaaataagagaaggagggtaggtaggagtatgtataggaagaaatagtttttgtaagggaatttaagaaattggtagtattatttttggggaggggagttgagtagttgggaagaaaaggtaggaggaagattttatgtttgtatttttttaatttagaattatgtgaatgtataattttttaaagaataaattaaaatttttaaaaatgtataatgttattattattttattttttttaaaaaaaatgttttatgtgtgtgtttagagaaaatattttggaagaattttattgtgaattatgggttatattgggatgtgggagtaggggaaggaaggagatttttgtgttttattttatatagttagtagtattttatttgtttttaaaaggtagtattatttttgtaaattttattttaaaaaaaaaaaaaaaaatttttataaattgtaattttatttttaaaaataatttttaaatttttatagtattttgttttatattattgaattatattttattttgtgttatgattatttgtgtttaggttttatttttgttaaatgttggagtaattgtaattttgttttgtttattatgttggttttattttttagggata

SEQ ID NO: 3715 - DNA, 2449 bp, Artificial Sequence
  chemically treated genomic DNA (Homo sapiens)
aaaaataatttttatttttatgtttgtaaatatgtttatttatatttttttagttattttttttgtaaatattttgaataaaaaggattttgttttatggttgatttttatttaatttatttattgagataggggtttattttgttatttaggttatagtgtagtgatataattatggtttattgtagttttaattttttggtgttaagtaatttttttattttagttttttgagtagtttgggattataggtgtgtattgttatgtttggtgaatttttaaatttttttgtagagatggggttttattatgttgtgtaggttggttgtgaatttttgggtttaagtgattttttagttttggttttttaatatgttaggattataggtatggttgatttttatagtttttttttatttaaaatgtaatatgtagtgattttatagtttttttttaattttatttttgtgttttgaaagtgattagtttagtttttgttatagtagagtttttagtaattaattttagtaataaaattttataattgtgggatggaatagtgtgttaattgtgtttttggagaaatttatgtttaatttgtatatagaatgtttatagatttttgtttattagtttggttggaaggatagggtttgttgtaaggatagtaattttatttagggtttttttagaggtttgagaggttttgttaaggttttgggtttaggggtttaaggtgggagagggtgagagaaaataatgtgttaatgtagttttgagtggtttttaaataggagtagagggaaggttgtgaggggagttggttgttttttttggagttagaaaggttgttgtttaattttttggattttttattatagttgggtagggagagggttagattgggtatgatttttttgaataggtttttttaaagttttttggttgaattgattttttttttagagttaaggaagtagtgtttgggtgaagttaatttttttatttttaatatatttttttagagttaggtgagtttggaagtttaggtttttggaaggtagagttatatagggtaagaggtttaaggagttgtgaattttggttggagaaattttttttttggttttgttaaatttaataggtataattgtattttgttgattttaatttttttggtgggtttaattggttttggtattgttttattttttgttttgtttttgtagaggtaaagagggtgtttgtatagttggtgtagggtggggaagtttttttttgagggtgggtaggggttttggtagtttttaggtgggtggaggaagtttttttgtgttttatttttgtgtttttaagggagtgttgagaagtttggggatttttagggagtagttggttggagtaggtagttttgtagatttggaattaggttagatttttattttagtgggaggtattgtaggggagttggtgggaatagatgaattttttatttggggtgtttatgatattattaggtttttatagtgttgtaggtattgtgttattgggtattttttatatgtgtgttggttaaatgtttgtagttatgttgtgagagggaggtaatggggtagagtagttatgagtagagttttgggttagatgggtttaattttaattttatgattttgttttgtgatttagtttttttgttatatttgtgaaatggggattaaagagttgatatttatatagtatttgttatgtttatatttattgttgtaatgttttatttattttttgggaggtagatgttttttttatggatgaggaaataggtgaagatattgttttaagtttatagttattggttgtagtgttttattgatagattttttaattattgtatggtagggagttgtaagatttgaaggaaggatatttatgaagttgtttattttagggtttggtttattttagaaagagtttaataagagtaattatttgggaataataattataataaaagtagtattaatgtttttgaagttgttttaggttggattttggttttattgggaggtggttttggatttgaatgtgggtagtttgaagttatttattagttgagtgattgtggggataagttatttttttttgtgagtattagtttttatatttttaaaatggtgtaatattggtttttatagttttttttgaggatttagggagttggatttttggtatagtttggtttggttgttggtgggtatttaataaatgattggtattgataattataataataataaggagatgttagtaaggtttagtatagggaggtaataaattttagtttggagttttttggttaattagttatttatttattagatattgatgggtaagtttattttgtgttggggatgtgtttagtttttggtttttagggggtttttagatagtg

SEQ ID NO: 3716 - DNA, 2449 bp, Artificial Sequence
  chemically treated genomic DNA (Homo sapiens)
tattgtttgggagttttttgaaggttaggggttaaatatatttttagtatagagtggatttgtttattagtgtttgatgagtaaataattgattaattagaaggttttagattggagtttgttatttttttatgttggattttgttggtatttttttgttattattgtggttattaatattagttatttattgagtgtttattaatggttaggttagattatgttaaagatttagttttttggatttttagaagggattgtaggggttaatgttatattattttaaaggtgtggaaattgatgtttatagagggaagtggtttgtttttatagttatttagttagtgaatggttttaaattatttatatttaaatttagagttattttttaatgagattaaaatttagtttgggataattttaggggtattagtgttatttttgttataattattatttttaaataattatttttattgaattttttttaaaatggattaggttttggggtaagtagttttatgagtattttttttttgagttttataattttttattatgtagtgattaggagatttgttaatgaagtgttgtgattagtaattgtgagtttggaataatgtttttatttgtttttttatttgtaaggagagtatttgttttttaggaggtagataaagtattataatagtgagtgtgagtatagtgagtgttgtataaatgttagttttttaatttttattttatagatgtgataggaaaattgagttatagggtaaagttatagagttgggattggatttatttaatttaaggttttgtttataattgttttgttttattgttttttttttatagtatggttgtgagtatttagttagtatatatgtaaagagtgtttaatggtatagtatttatagtattgtgggggtttgataatgttgtggatattttaggtagagggtttatttgtttttgttagtttttttgtagtgttttttattgggatgagagtttggtttggttttgaatttatgggattgtttgttttagttagttgttttttgggagtttttaagttttttagtatttttttggaggtataggggtggggtatggggaaattttttttatttatttaggggttgttagagtttttgtttatttttaagaaggggtttttttgttttgtattagttgtgtagatattttttttgtttttataggggtaggataggaagtggggtaatgttaagattaattaaatttgttaggggaattaaggttagtaggatgtaattatgtttgttggatttaataaggttagagggaaggtttttttagttagagtttatggttttttaggttttttgttttgtgtagttttgttttttaggagtttaggtttttaggtttatttagttttggaagaatgtgttgggggtgaaggggttaattttatttaggtattgtttttttggttttggagaggaaattagtttagttaagaggttttaaaaggatttgtttggagaagttatgtttagtttgattttttttttgtttagttgtgatggaaaatttaaagagttgagtaataatttttttgattttaaagagagtagttaattttttttatagttttttttttgtttttgtttgagagttatttaaggttgtattagtatgttgtttttttttgtttttttttattttggatttttgagtttagggttttggtaggattttttaggtttttggaaaagttttaggtaaggttgttgtttttatagtagattttgtttttttagttaagttagtaagtagaggtttgtgggtgttttgtgtgtaaattggatataggtttttttgaaaatgtaattgatatattgttttattttatagttatagaattttattgttaagattaattattgggggttttattgtgataaggattaaattggttatttttaggatatagagatgaaattgggggagagttatagaattattgtatattatattttaggtgaaaaaagattataaaaattaattatgtttgtaattttagtatgttaagaggttgaggttggaggattatttgagtttaggagtttatgattagtttgtgtaatatggtgagattttatttttgtaaaaaaatttaaaaatttgttaggtgtggtagtgtatatttgtggttttaagttatttaggaggttgaggtagaaggattgtttgatattaggaggttgaggttgtagtgagttatgattgtgttattgtattatggtttgggtgatagggtgggtttttgttttaataaataaattaaataaaaattagttatagagtgggattttttttgtttaaaatatttataaagaagatggttggagggatataaatggatatatttataggtgtagaaatagagattattttt

SEQ ID NO: 3717 - DNA, 2340 bp, Artificial Sequence
  chemically treated genomic DNA (Homo sapiens)
ttttttttttttttagtttagtttatgtaggttttgttttagtattgtgagtagttgttttttttagttatatttgagaaattgaagaagtttttaggtttaaagttattgttataatttgtgtttttttttttttttttttggagatggaattttgttttgtagtttaggagggagtgtaatggtattattttggtttattgtaatttttggtttttgggtttaagtgatttttttgttatagttttttgagtagttgggattatagatatatattattatgtttggttaatttttgtagttttaatagagatagggtttttttatgttggttaggttggttttgaatttttggttttaagtgattttattgttttggtttttaaaagtgttgggatgataggtatgagttattatatttagtttataatttttatttttgttaggttttttaaaagtttttattgttagtgtaggtagttgtttggaagttattttaggttattttttttattttttaggtaggtgaattaagattatttaggtgtgaggttggtttgagttagagatggtttgggagagtttttggggggtagggagggtttagtttttttaggtttggttgtgttttttgttttttatttataattaggtttagggttggggggtgtatattaaggaggggtaggaagtgtttaagaagtagaattggttttgtgtttttagtggtggtgggtgtttggggtaggaggaggttatttgattttttttttattgttttggttatgatttttttttttttttttttgttttttttttttttttttttttttttttttttttttttttttttttatggttggggtagttagtattttgggttgtagttgagaatttagtgttttttaattttgttagtattttagtgagaggaggggtggggggagattgtatttagagttttagggataggggtatttttggggttgttttattttgggagggttaaggttaggttgtttttaattttattgttttttgtttttgttttttttattttttagtagtagagttgtttaaatttggttttaggagggaatgggggaggtagtggtaggtgggtgttgttagaggttagggtgttgtttttgtttagttggttggtatttttgttgtttggaggagggtaggggggtttggtagtttttttttggaaagggagatgtttgtattttttgatatatattgagtaatgtgtaaatgatatgtaaattgagttttaaattagtattttagttagggaatagtttgagagttgtttttgggatgagagtagaaggattagagtttagtgtttaggggttttagtgggggtggggtggggtggggggtggtatagagtgtttagggttgggtgttgggagatttagttttttgttagttgtagggttttgttttagtggttggattttttgggttttagtttaagggtagggttatggttttttttgtttgttttagtaaagtattgggtatattttgttatgtggttaagtatgtgagttttgtagttattttgtttaggtttgaattttggttttttatgggttagttgagtgaattttttaattgagtatttaggtaagtagttagtggaattgggtgtttgttttagaatagttattttttttttttggaagttgggtatgggggtatgatgtgagagaatttgggttttggaattagaattggattttaggttttatttagttagtgaggttttttgagttttattttttttatttgggaaatgggtttaggattttaaggttagttgtgatgtttatgtgatgattttgtatatggtgggtatatataggtttttttatggtgtagttttattgttgtttgtatttatgtgatttttagttttattttgttttattgttttttttttttttgtttttttgttttggtttttttgtttttagatgtaaattttttgtggttttttttttttttgtttttttttttaattggtgattttggaaaagttattgttttttagagttttagtttgtatattttttaaatgggagtaaatgagaggtggataatgagttttgtttggggtttgaggtttatttttataagattgtttatttattattttaaagggttattaggggtaggttgtgtttttaattttattgggtatggtgtgttgggggttttattttttagtaattttgtttaattttagataattgtttttttgttttttggttggggttgatatgagttgaatttagttttttgttatttaaaagttattttttg

SEQ ID NO: 3718 - DNA, 2340 bp, Artificial Sequence
  chemically treated genomic DNA (Homo sapiens)
taggaagtggtttttgggtggtaggaagttggatttagtttatattagttttggttgaggggtaggagagtagttatttggggttaaatagagttattgagaagtggagtttttaatatattatgtttgatagagttgagggtatagtttatttttggtggttttttggaatgatgggtgggtggttttgtaaagatgagttttaggttttagatagagtttattgtttattttttatttatttttatttagaagatatgtagattgagattttgagaggtaatgatttttttaagattattagttaagaagagagatagaagggaaaaagattgtaagaaatttatatttagagatgaaaaagttaggatagaagaataaagagaagaggagtgatgggataggatggagttaggagttatatgaatgtagatagtagtgaggttgtattatgggaaggtttgtgtgtgtttattatgtgtaaggttattatgtggatgttatagttgattttgagattttgaatttattttttaaatgaggggagtgagatttagagagttttattggttgagtgaggtttggaatttagttttgattttaaagtttaggtttttttatgttatgtttttgtgtttaatttttagggaagggaagtggttgttttaaaatagatatttagttttattagttgtttgtttgggtgtttgattgaggaatttatttagttggtttatggagagttagggtttaaatttaggtaggatggttgtagaatttatgtgtttaattatgtgatagggtgtgtttagtgttttgttggagtaggtagagaaagttatggttttgtttttgggttgggatttagagggtttagttattggaataaagttttgtagttggtaagaaattgagttttttaatgtttagttttagatattttgtgttgttttttattttattttatttttattggagtttttgggtattgggttttggtttttttgtttttattttaaaagtagtttttaagttgttttttggttgagatgttgatttgaagtttggtttgtatgttgtttgtatattatttagtgtatgttagaaggtatgaatatttttttttttgggagagggttgttgggtttttttgtttttttttagatagtaaaaatgttagttggttagatgggagtgatgttttggtttttgatggtatttgtttgttgttgttttttttatttttttttggagttaaatttaggtagttttgttattgagagatggggagagtggaggtaggaaatggtgaggttggaggtagtttggttttggtttttttagagtggagtagttttaggggtgtttttgtttttaaagttttgggtgtagtttttttttatttttttttttattggaatgttggtggggttggggaatgttgggtttttagttgtagtttagggtgttggttattttagttatgaaggaggagggagggagggagggagggagggagggagggagggagtgagggagggagggaggaggttatggttggggtagtggggaagggattagatagtttttttttgttttagatatttgttgttattggggatatagagttggttttgttttttggatattttttgtttttttttggtgtgtattttttaattttgggtttgattgtgggtggggggtaggggatatagttaggtttgaggggattgaattttttttgttttttaaaggtttttttaggttatttttgatttaggttagttttgtatttgaatggttttggtttatttatttgggaaatggaaggggtggtttagaatgatttttaagtagttgtttgtattgatagtaggagtttttgggaggtttgatagaaatgagggttgtgggttgggtgtggtggtttatgtttgttattttagtatttttggaggttgaggtagtgggattatttgaggttaggagtttgagattagtttggttaatatagggaaattttgtttttattaaaattgtaaaaattagttaggtatggtggtgtgtgtttgtaattttagttatttgggaggttgtagtaggagaattgtttgaatttaggagttggaggttgtagtgagttgagatggtgttattgtatttttttttgggttatagagtaagattttgtttttaaaaaaaaaaaaaaagaaatgtgggttgtggtagtggttttaggtttagaaatttttttgattttttaggtatggttaggagaggtagttatttatgatgttgggatagaatttgtgtgggttgaattgaggaaaggaagaa

SEQ ID NO: 3719 - DNA, 2438 bp, Artificial Sequence
  chemically treated genomic DNA (Homo sapiens)
tgtttagaattttatagtattttatatagttttatatatgtatatgggaatttttttttttggtttttatatttgtttagtattgattttttagatgtatttattgatttaataaattttttttgagggttttttttgtggaggttttgggttaatttataattagaatgattggaataggaataaataattagttgttttgtgttgttgtttttgtttttttatttgtgagatggggattttagttttgttatatgggattgttaatgttaggagtgaatgtgtggaaagtttttggtttgtgtttggtttatagtgttatttaagtaaggttattttggttagttaaaagtattttatgtttagttttatgtagaatatttggtatatattatttttttgagtttttgtttaagtttttagtagttggggttattgtttttattttttagatgaggaaattgaggtttagagaagaggtttatagtttgtaggttgttttattgattttatgttatgttatagtgttgttttagtttgttttgttattttttatatatatatatatatatatatatatatatatatatatattattttttttggttagaaggttttttttatttgtatatagtatgtttagtttttttgagttgtttatttatatttttgtgaaatggggatattagtttgtgttagtttttgtttattttttttagggtattggattttaagggttaagagtgaagattattttgttttgttttttggtatatagtaggtatttgataattattttaaaattaaaggaataagtaagtggttttatggttattgaggatagagtttggaattgaatgtagggtattttgaagttggagtttatttttatattattgttttttttatgttattagtaggtattgaatgtgttagtgagtgaatgaatgaaattaagattttaggattttagttaagtgttttttgagttttattttttggtagtgtggatatgagttaagttttagttattttggatggtggtgggggtggtggggttgatgggttgtttgaagttggttgttaggagtttgtttggttatagttgttagtaggagagattagttggtggtgtagggtttattggtttgggtttggaatttgagttgtttttagaggtttagtttttttttgggtttttataaattggtttttgtttttgggttggttaagatttagtagtttgggttttttgtttgtttgtggtatttgtgttgagttggtggggtaaatgggttagttttttttttgtttatgtttaggatgttgttttaggattaaatggagatgtaattttttatataaatttatgataatttagatggagtgattgtaattggttttttaatgggggttttgtttagagttggtggttagaattgggtggtttgtttgaggtaggttttatttaaatgataataaagtaataatattgaggatttgtatagtgtttagtattttttttagtttaagtagagttttatgtttatggatttggtttttttttgaggttgtttggataggtgggtggtggggggtgttaagtttaggagataggtggttatatttttgggttttaggatatagagttttagaatggttggggtaaggttttgtatttattggtttatttgtgtttttatttttgaaattgttattaattagtgtttttttgggttagttgttagtttaggttttgggggtattaagataatgagagttgtttaggtaggttagagggagaaggttataatggttagtatagtatgatatttgagagtatgattaagagatgattaatagttagatagtttgagtttaaattttattttatttttttttaaaaaaattttttttgagatagggttttgttgtgttatttagattggagtatagtggtaggattatggtttattgtagttttgatttttaaggtttaagtaatttttttattttagttttttaagtaattggattataggtatgtgttattatatttggttaatttttttatttttttgtagagatagagttttattgtgttgtttatgttggttttgaattattgggtttaagagatttttttgttttagtttttgaaagtgttgggattataggtgtgagttattgtgtttagtttttattttatttttgatttgttttttgaattttattaagttatttaatttttttatgttttagtttttttagttataatatgaagttgtagtgaaagtttttgtgaagatgaaatattttaatagtgtttggtatgtggaaggtgttatatataagttattgttgtgatttattttaagttttagttttggtgttagggtgattttgggtatgtgatttaatttttttaaatttttatt

SEQ ID NO: 3720 - DNA, 2438 bp, Artificial Sequence
  chemically treated genomic DNA (Homo sapiens)
agtggaggtttaaagaggttaagttatgtgtttaaggttattttgatattagagttagagtttggaatgaattatggtaatgatttatatatagtattttttatatgttaggtattattaaggtgttttatttttataaaaatttttattgtagttttatgttatggttggggaaattgaggtatggagaggttaagtaatttggtaaggtttaagagatgagttagaagtagagtaggggttgagtatagtggtttatatttgtaattttagtatttttagaggttgaggtgggaggattttttgagtttagtagtttgagattagtgtgggtaatataatgagattttgtttttgtaaaaaaataaaaagattagttaggtgtagtgatatatgtttatggtttagttatttgggaggttgaggtgggaggattgtttaagttttggaggttgaggttgtagtgagttgtgattttgttattatattttagtttgggtgatatagtgagattttgttttaaaaaaaatttttttaaaaagaagtggagtaggatttgagtttaggttgtttggttgttggttattttttggttatgtttttaaatgttatgttgtattggttattgtagttttttttttttgatttgtttgagtagtttttattgttttggtgtttttgaaatttggattagtagttagtttgaggaggtattagttagtgatagttttaggaataaggatataggtaagttagtggatgtgggattttgttttagttattttgaagttttgtgttttgaagtttaaagatatggttatttgttttttgggtttagtgttttttattatttgtttgtttagatagttttagggaaggattagatttataaatatgaggttttatttgggttgggaggagtgttgggtattgtataagtttttaatattattgttttattgttatttaaatggagtttgttttaaataggttatttagttttagttattagttttggataaaatttttattgaaaagttaattataattattttatttaaattgttatggatttgtatagaaaattatatttttatttagttttaaagtgatgttttgggtatggatagaggggaggttggtttatttattttgttagtttagtgtgggtgttgtgggtagatagaaagtttaagttgttgggttttggttggtttaggaataaaggttagtttgtgggggtttagagagaagttgggtttttgagggtagtttagattttaggtttgggttgatggattttgtattgttagttggttttttttgttggtggttgtggttagatgagtttttgatagttggttttaggtggtttattagttttgttatttttattattatttaaggtggttggagtttggtttatgtttatattattaggaaatgaaatttagggagtatttgattgggattttgagattttggttttatttatttatttattgatatatttagtgtttgttagtagtatgagaaaggtaataatgtagaagtgagttttagttttagagtgttttgtatttagttttagattttgtttttagtagttatgaggttatttgtttatttttttagttttgaaatagttgttgagtgtttattgtgtgttagagaataggataaaatggtttttatttttggtttttaaagtttagtgttttggggaaaataaataggggttgatatgggttagtatttttattttatagaagtgtaagtaggtagtttagaggagttgggtatgttatatgtaagtgagaagggttttttagttagagggaatagtgtgtgtgtgtgtgtgtgtgtgtgtgtgtgtgtgtgtgtagggggtggtgaggtaggttggagtagtattgtggtatgatatgagattggtggggtaatttatagattgtgggttttttttttgagttttggtttttttatttgaggaatgggggtgatgattttagttgttggggatttggataagggtttagggagataatgtgtgttaggtgttttgtgtggagttgggtatgggatgtttttggttaattaggatagttttatttagatgatattgtgggttaaatatggattgagggttttttatatatttatttttaatattgatagttttatgtggtagggttaggatttttattttatagatggggaaatggaggtaatagtatagggtagttaattatttgtttttgttttagttattttgattatgggttagtttagggtttttatagagaagatttttaaaaaggatttgttgaattagtgaatgtatttggaaggttggtgttgggtaggtgtgggggttggggaggaagatttttgtgtatatgtgtgaagttgtgtggagtgttgtgggattttgagta

SEQ ID NO: 3721 - DNA, 2364 bp, Artificial Sequence
  chemically treated genomic DNA (Homo sapiens)
ttaatagatatagaaaaaaagtttgataaaatttaatatttttttataataaaaatgtaaaattaggaatggaagagaatttttttaatttgataaagggtatttatgaaaaatattgttaatattaaatttaataaataatgaaagttttttttttagaattagaaataaagtaagtgaaaattataattttggttagttgtggtggtttatatttgtaattttagtattttgggatgttgaggtaggagaattatttgaatttaggaggtagaataaaattataattttagaaaaagtatgtgttttgtatttgttattgtgagtttgatagtttgttaatatttgaagatttttgtgattggatatggtagtttatatttgtaattttaatattttggaaggttaaggtaggaggattgtttgagtttaggagtttgagattagtttggttaatatagtaagattttatttttatttttttttttttttttttttttgagatagagtttttgttatttaggttggagtgtagtggtgtaatttgagatttgttttgagattaaaaagtttgagaattattgttatagaaaagtattaggatatgtattaaaatggttttggaagtattgtttttaattataatttattgggaatattttatatatttattagtagtataatatgttatatatatatatatatatatatatatatatatgtatgtatatatttagtgttttagataagggaggttatgtttaaggtagtttatttttaaatttttatttaaagaaattttgaatgttttttgggtttttgttggattttagaatttttgtttttatttttagttattgtaaatgaattttggttttatgtttatagtaattagttttagttttggtattattttaaaggaaaaatgttaaattatatttgtttgaggtttttggaatggtttaaaagtttagggaaaagggtgtatagggtaggaaagtggggtgagtgaggtattatttttttagttagaaagtgtagttttgttaggagttttttggttagtgttatttttttttgtatattgtgttgttttaggttgtgtagaagttgtagtttttgtttagttaaaaggttttgggagggtaaaaagatagtatgagtggaaggttttagttaggtgtttttgagtttttttttgaggttgtattaggttgtgtattaggagttttttttggtattgatttagggtattgggttgggttattgttttgtgtttggtattgtggtaaaattgtttgtagtgagtagggatgtgtatagtagataggaattaaaggaaaggagaaggatagtgattttggggttatttgttttgagttgattttttatttttagttttttttatagtttttttagttttgggttttgaagaggtatttttttttttgtaaagttggtttatttttatttggattatttttaaaaattattaaggttagttttgtttttgagttttagagtttgttaatatttaattatttattattttggttattttaggtgtggtttatggattaatagtattggtattatttgtaggttatttaaaattgtaggattttagttttattttaggttttgttgaattagaagttgtgtttatgtttttggggatttttaagtatattgaagttttagatgtttttattagtttggttaatgtatagtttgaatattatatgtttaagttaaatgtatattttttaatgattttttttgtaaaataaaataaaataaaataaaaattttattttattttagaatttttgagttattttttattgtttttttttttttattttatattaatttattagtaaattttttatgttttatttttaaaaaatatttagaatttggttaggtgtggtggtttaggtttgtaatttttgtattttgggaggttgaggtggtgaattatttgaggttaggagtttgagattagtttggttaaaatggtgaaataattgtgtttattgatgttgaaaggttgagtatggtgagaatagaaaagtgattatttatagttttttattttattgttttttttgattagggtttttggttgagtttttgttttttttttgtttttaaatgttggaatgttttaggtttttagattttttttttttgtgttttgttaatgttgttatttagttttatttatataatgatagtttttaaattgatatttttagtttagaattttttttagaatttaatttatatagttaattgtttattatatatgtttatttataatttaataagaattttatagttaatatgtttaaaattgag

SEQ ID NO: 3722 - DNA, 2364 bp, Artificial Sequence
  chemically treated genomic DNA (Homo sapiens)
tttagttttggatatgttaattgtgaaatttttattgaattgtaagtggatatgtgtggtaggtagttagttatatgagttgagttttggggagaattttaggttggaaatgttaatttgggaattattattatgtagatggagttggataatagtattaatagagtatagaaaagagaaatttgagaatttggagtgttttagtatttagaggtagggaggaagtagggatttagttaaggattttgattaggagaggtagtgaggtaggaggttgtaggtggttatttttttgtttttattatgtttaattttttagtgttagtagatatagttgttttattattttggttaggttggttttgaatttttgattttaagtgatttattgttttggttttttaaagtgtggggattataggtttgagttattatatttggttagattttggatattttttgaaggtagagtataaagaatttgttgatgaattgatgtggaataagagagaaagagtagtgagagatgatttgaaagttttgaggtgaaatagggtttttgttttgttttgttttgttttgtgggggggattattggaaagtatgtatttggtttgggtatgtaatgtttaagttatatgttagttaagttggtggagatgtttgaggttttaatgtgtttaggaatttttgagggtataaatgtagtttttgatttagtagggtttggggtggggttgaggttttatagttttaaatagtttgtaggtgatattagtgttgttggtttatgggttatatttggggtagttagggtagtaggtggttaagtattagtgagttttggagtttaagagtaaggttggttttaatgatttttgggagtggtttaaatagagataggttagttttgtaggagaaagggtgtttttttagagtttaagattgagagggttatgagggaggttgggggtgggaggttagtttagagtaagtggttttaaggttattgtttttttttttttttttgatttttgtttgttgtgtatatttttgtttattgtagatagttttgttatggtgttgagtgtaggatgatgatttggtttaatgttttggattgatgttgagggaaatttttggtgtatagtttggtatggttttgggaagggatttaggggtgtttagttggggttttttgtttatgttgtttttttgtttttttagaattttttggttaagtaaggattgtgatttttatgtggtttgagatggtgtaatgtgtaaaagaaggtggtattggttaagaagtttttggtaaaattgtgttttttggttgaggaggtaatgttttatttattttatttttttattttgtatatttttttttttaagtttttgaattattttagaggttttgggtaggtgtgatttaatattttttttttggaatgatgttagggttgggattaattgttgtgggtataggattaagatttatttgtagtagttaagggtgaggataagagttttagaatttagtagagatttagggaatatttaggatttttttggatgaagatttgagagtaggttgttttgagtatgattttttttgtttgaagtattaaatatatatatatatatatatatatatatatatatatatatatataatatattgtgttgttgatgggtatgtgagatgtttttaatgggttgtgattagaaataatgtttttgagattattttggtatatgttttggtgtttttttatggtagtggtttttaaattttttggttttgggataggttttagattatattattgtattttagtttgggtgatagagattttattttaaaaaaaaaaaaaaaaaaaaaaatggagatggggttttgttgtgttgattaggttggttttaaatttttgagtttaagtagtttttttgttttggttttttaaagtgttgggattataggtgtgagttgttatgtttagttataaaaatttttgagtgttggtaagttgttaagtttataatggtagatataagatatatattttttttgaaattgtaattttattttgttttttgggtttaagtgatttttttgttttagtattttaaagtgttgggattataggtgtgagttattataattagttaaagttgtaatttttatttgttttgtttttgattttagggggaaagtttttattatttattaagtttgatgttagtagtgttttttataaatgttttttattaggttgaggaagtttttttttatttttagttttgtgtttttattgtgaaagggtgttagattttattgaattttttttttgtgtttattaa

SEQ ID NO: 3723 - DNA, 2386 bp, Artificial Sequence
  chemically treated genomic DNA (Homo sapiens)
ggtaggagaattgtttgaatttgggaggtggaggttgtagtgagttgatattgaattattgtattttagtttgggtgatagggtaagattttattttaaaaaaaaaaaaaaaaaaattaggttttgatgtttaataggttggttttattatttataatttataatgtgtaggatttggagtaaattattttatttataggatttttagtttttttttttgtaaagtggagataatatttattttttagggatagtgtaggaggatgaaagagtgttgagttagtggttaatataggttgagtatttagtggatggtagtaattgttattattattattattatattattatattattataatataaaatattgagtaaatttgggatattttggtatttaatatttgttttttttttttttttttttattttttttttttttttttttttttttttttttttttttgtttttttatttttttttattttttttttttttattttttttttatttttttttggtatatttggttgtagttgtaaggagtggtaggagtttatataggaaaaggaggtgtggttagattttggggggatttgaatgttagagggagtttgatttttagtttaggggtaatagtgagttattaaagtttgtggtggagtagaaataagttgtggtgaaagtggggaagtgagtttggtagtagagattgggaaggggttgtgagggtagaagttggagttagagaggtgagttatttagggagtttaaaggttaagtgagagagatggggaagtagaggttgtatttttgtttagagtttgtttgggagaagtagttttattttttatgtttattttgtttataaaatttagttggagtatttatttttgtgtgattttagataagtgtttaatttttttgagtagtagtaaggttattttagtttttggtgatattttttggttttttagtaaagatatttttggattttataggtttttattattttttaggttgttttttgtttagagattaatttgtttatttttttgtttggagatgaattgagggaattaattgtttattagtgtaggtttttttaattttgtattgttttgttttaaatgtttattttttggtaaaatatgtttttgttgttgataaggttgtttggaaaatgttaattttatttttgaattaaaatttgtttttttatttttgttttaataaaaatgaagtatttggaaatattgttatggtgtagaagagaaagatttgatataatttttaaaatgtttttaattatgttgatttttgaatggtttgttttttaattttgattttttttttattttttaattttttgaggtagtatttatattttttaataattttttattaatatttatgagaaggggtgggtaataatggttgagtatattgtattaatttaatttttatttgttttagtgtgtttatttaattattaagggatttgggttatttagtataattatttatttggaattagatttggaggtatttggattggaaatagggaattaagagtaaaatgaaaattgaattttttttgttttttttttttagttgtttttttttgattgtgtgttaatgttttaggtagttagtagggtttagaggataaggttttgtgtttgttgggtagtttttgaaggaattggtttgtgaggggttgaatgtgttttagatgttttggttttggtaggaattttttattaatagtagttttggagttattgtaaggtttagtagtgggttagttgtattgttttagttaagagtatggttagttagagttagggtgtttaggagatgttggggtattggtttaatttggatatgtagtgtggatagatttttgattataggttttgtggaggtgagagtttgtgatatggggtttaaataatatttgtttatttttgaatttttgtttaattgttattttttttaagaagttttttttggtttttagataaggttagttttttttattatatatattttttgttataattaggatgggtttggttatagtattttgtttattgtgggtgtttatataatggtttttaattagttgtttagggtttgttttttttaatagttagttttgtgggagtaggttttatggttgttttggttatgtgtttttagtatttagtaatgtttagtatagagatgtttaatagtatttgttaattttttgattgattgattttattattgatttttgatttttaagtttttgtttttttatttgtaaaatgaagttaagaatatttattttgtaggattgttgtggggatttagtgttttttatgtaaagaggatgta

SEQ ID NO: 3724 - DNA, 2386 bp, Artificial Sequence
  chemically treated genomic DNA (Homo sapiens)
tgtattttttttatatggaaaatattgagtttttatggtaattttataagatgaatgtttttagttttattttgtagataaggaaatagaggtttgagaattaggagttaatagtagaattaattagttaagaagttaataaatattgttgagtatttttgtgttgggtattgttagatgttaggaatatgtgattaggatagttatgggatttatttttatggaattgattattgggagaaatagattttgaataattaattagaaattattgtgtgaatatttatagtgggtaaggtgttatgattaagtttattttggttgtaatagaaggtgtgtgtaataggagaagttaattttgtttggggattaggaaaggttttttggaggaggtgatagttaagtgggggtttgaggatgagtaggtgttatttagattttatgttataaatttttatttttatagggtttgtgattaaaagtttgtttatattgtatgtttaggttgggttaatattttagtattttttgaatattttaattttggttggttatgtttttggttgggatggtgtaattggtttattgttgggttttgtgataattttaaggttattgttgatgagagatttttgttggggttagagtatttggaatatatttagttttttatgagttagtttttttaggagttgtttggtgggtatggagttttgttttttaagttttgttggttgtttggagtgttggtatatggttaggaagaggtggttgggaggggaggatgaagagaatttgatttttattttgtttttggttttttgtttttagtttagatgtttttagatttaattttgaataaataattgtattgagtaatttgggttttttggtgattaagtaaatatgttgaggtgggtggaaattgaattagtgtggtgtgtttagttgttattatttgtttttttttatgaatattaatgaggggttattaagaaatgtaaatgttgttttagggggttgggagatggggagggggttagggttagaggatagattgtttagaagttagtgtgattgaaggtattttaaaaattatgttagattttttttttttgtattgtggtaatgtttttggatgttttatttttattaaaatgagggtaagggaataaattttaatttgaggataaaattagtattttttaagtagttttgttagtggtaaggatatattttgttagaaaatggatatttggggtggggtggtgtgaggttgggggagtttgtgttgatggatgattagtttttttggtttatttttaggtaagggagtaaataaattaatttttgagtagagagtagtttggaagatgatggaagtttgtaggatttagaagtgtttttgttaggaagttagggggtgttattaagagttaagatggttttattgttgtttagagaggttaagtatttgtttgaggttatatagaggtgggtgttttggttgggttttgtgggtaaggtgaatgtagagaatgaggttattttttttaggtgagttttagatagagatgtagtttttgtttttttattttttttatttgatttttaggttttttggatagtttatttttttggttttagtttttgtttttatagtttttttttaatttttgttgttaggtttatttttttatttttattatagtttgtttttgttttattgtaggttttagtgatttattattgtttttaggttgaagattagattttttttgatatttaagtttttttaggatttgattatattttttttttttgtgtaagtttttgttattttttgtagttgtaattagatgtattaaggaaggatgagaagaaagtgagaagaaggggaataaaagaaggtgagaagatagggaaaaaggaggaaggaagaaaaggagggagaaaggtagggagaaaggaagaggaaataaatgttaagtattaaaatattttagatttgtttaatattttatattgtaatgatgtggtgatgtgataatgatgataatgataattgttgttatttattgagtgtttagtttgtgttagttattggtttagtgtttttttatttttttgtattgtttttagaaagtagatgttatttttattttatagaggaggaaattgagagttttgtaggtaaaatgatttgttttaggttttatatattataaattataaatgatagaattagtttgttggatattaaaatttgatttttttttttttttttttgagatggagttttgttttgttatttaggttggagtgtagtggtttaatgttagtttattgtaatttttattttttaggtttaagtaatttttttgtt

SEQ ID NO: 3725 - DNA, 2734 bp, Artificial Sequence
  chemically treated genomic DNA (Homo sapiens)
ttttttgttgtttttggtttttagtttttggtttaagtatggtttttagtttagataaggtttttttaggaggtttaggagttttgtgggaggtagagtgtagataaaggtttggagtttgtttatgtggaaaatttgggtttgtggtgattgtgaattatatgggtagaggggttagatttggggtttttatgatgggaatatgatgtgattgtggaggttagttaaggtttttgttagtggtgagtggaatagataaagaaattagttattagaggagagaagtattttagattggagtgggaggttatatattggttttttgtgttgttttttagaggggaattggggtagaggggtttttttattttatgaggttggttgggtttaatttaaggaatttttgtttttttatttttgttggaatttttattgtagtttattggatttttgtatgagatatatttggggtgtttagtgagtaggtagatttttagatatttattttgaaaagttagtttgaaagagaatatttaggggtggggtttggttatagttagtttttttagagagttttaagtttagtaatatttaataattttgtgtttaggttaatggtgtttaattttagttgtggattgtgattatttggggaattttttttaaattttgatatttagattttatttaagattaattatgttagaatttttggggtgtgttttgggtatttatatatttttaaagttttttagttgttttagtgtgggtttaaggattgttttagttttagattaattttaagagttttaagatgaatatttggggaaaaggagaagttatgagttttagataagagaaataatttgtttaaggttatataaggtggtgatggtaaagtttgttttgaaatttaggttttttttttgattgtgggttaatttttttttgatgttgtatttttttttaaaaattagagtttaggtaggtaatgtttatagtattttattttaataatattggaaattggtatagttagggttattatagtggtggggtgggagttttgatggtgattaggggagttgtaagttttttgttttatttaaattttgggtagtaatttagaaaatttaattaaagggggagaaatggggatattttgtgttttttgttttttgttataatgagtgaaatatattaggttgtaaaaggaaatgttgtttgagatgtagttttgatgttttattgttaagttttatttattgatgtaaatgtaattgttggaaattggagtttttattaatatatatatttttatatatttggggttttttttgtttttttttttttttttgggtttgtttatttattttttagggttagttttgttgttttttgggtatgtttatgttaagtttggagttttgtattggttttatatttttttatggtagataagattttaatagaattttattgttttttagagtttagtaatgtattttggaaattaggtggttatatattaaagttattgtttttttttataaatgggtttttttaaagttagtgattatgggggttttgataagtttttatgaagttttattttatatgttattggtgtgttaaaaggtgtaattttaggtttatattgtttattgttaggggttgatatatttaagtagtttttttatgaattaggtagtttaggtattttttttatttttggtattgatagatgagtaaaaggaagttatttagatggtgttatatagggttttagtttatgtggtgaatgatttttaatgtttggtttaatttatttttaaatgaaatttgttattgattttggattaaaaggataaattttatagttgttattattgatagagttatagtgtttaagtgatattttttaaggaggggagggagggtggtttgtttgagttaaggggagggtatggagattttttagggagtttggtttagtagtaaggggtagtgtaagattttatgtttagagggaagtttaaaaatattattttttttaattgaaatatttgatgtgatgtttatttttgagttttatttatataatggaaatagtagtgatatttgttttatggtatttatatgattattagaggtatgttagttgtttttagggatgggaggttttttattttttgtagtatttttagaatgaaatgagtgataggtgttatttattttagtgaatttttagagattgttttttgggttagtttttgtttattttttgtttttattaggtttttggtttttatggtgtttagagattatatttgtattgggaagtagataagaggtataattatataggggaggaggatgggttgggatgtgtttgtttatatttagtttttgttttattttattgtgtaattttgtgtaggttatattatttttttgagttttgtttttttatttgtaaaagaaggaagggtataatagtagttttaggggttgttgtatgaattataggagattatgggtgtgaatgtgatttgtaaattgtaaagtgtagtttaggtgttgtaggaaatataagtgggatagtatagtatagtgggaggtttttgagttgggagataaaggatttggatttagttttgttatgagtggttgtgtggttttgagaaagtgaattattttttttgggttttagttttttaaggtgttaagaggg

SEQ ID NO: 3726 - DNA, 2734 bp, Artificial Sequence
  chemically treated genomic DNA (Homo sapiens)
tttttttggtattttaagaaattaagatttagagaaagtaatttatttttttagagttatatagttatttatgatagaattggatttaggttttttgttttttaatttagagattttttattatattgtattgttttatttgtattttttgtagtatttaaattatattttatagtttataaattatatttatatttatgattttttataatttatataataatttttgaggttgttattatattttttttttttttatagatggagaaataaagtttagaaagatgatgtaatttgtataaagttgtatagtgaggtagggtagaggttgaatgtgaatggatatattttagtttattttttttttttgtgtaattgtgttttttgtttgttttttaatgtaagtgtaatttttgggtattgtggaagttgagagtttagtggaggtagaaggtaagtaaagattagtttaggaaatagtttttaggaatttattagagtgggtgatgtttgttatttattttattttgggaatgttgtaggagatggaaagttttttatttttggaggtaattaatatgtttttagtggttgtgtggatgttatgaggtaaatattattgttatttttattatataaatgaggtttagaggtgagtattatgttaagtattttaattgggaaagatgatatttttaaatttttttttaagtatgggattttgtattgttttttattgttgagttaagttttttggagagtttttatattttttttttgatttagataggttatttttttttttttttttgagaggtgttatttgagtattgtggttttgttagtggtaatagttgtaagatttgtttttttaatttagaattaataataaattttatttaaaaataaattaaattaggtattggaaattatttattatgtgggttggagttttatatagtattatttaaatggtttttttttgtttatttattaatgttaagagtgggggaaatatttaggttgtttgatttatggagaaattatttaaatgtattagtttttaataatgagtaatgtaagtttggagttgtattttttagtatattaataatatgtggagtgaggttttatgagagtttattagagtttttatggttattggttttgagagagtttatttataagggggaataatggttttagtatgtagttgtttaatttttagaatgtattattgagttttgaggagtaatggaattttattaaagttttatttgttatgggagggtatgaaattggtgtggaattttaggtttggtatagatatgtttagaaagtagtagggttgattttaggaggtgggtgaataagtttagagggagaggggggagtaggaggggttttggatgtgtgaaaatatgtgtgttaataagagttttggtttttagtgattatgtttatattagtgaataaaatttggtaataaaatattggagttgtgttttagatagtatttttttttatagtttggtgtattttatttattataataggaggtagggagtgtgaggtgtttttatttttttttttttaattaaattttttaaattattgtttaagatttggataaagtgaaagatttatagtttttttaattgttattgaggtttttgttttattattgtggtggttttgattgtattggtttttaatattattaaagtgaaatattgtgggtattgtttgtttgggttttggtttttaaaaagagatgtagtattaggaagaaattggtttatggttaggaaagaggtttgggttttaggatgggttttgttattattattttgtgtgattttgggtaagttattttttttatttgagatttatgatttttttttttttttagatgtttattttgaggtttttagaattgatttggagttggggtagtttttggatttatattgggatgattggggagttttaagaatatatgggtgtttagggtatattttagagattttgatataattggttttaggtgagatttgggtattagggtttaaaaaaaattttttaggtgattatagtttatagttaggattgaatattattggtttaaatatagagttattagatattattggatttgagattttttggagaggttggttgtggttaggttttatttttgggtgtttttttttagattggttttttggggtgggtatttgggaatttgtttgtttattaagtattttaggtgtgttttgtgtagggatttagtgggttgtagtgaggattttaatagaggtgggaggataagggttttttgaattgagtttagttagttttgtggaatgaggaggtttttttgttttagtttttttttggagggtagtatagggagttgatatgtgattttttattttggtttggggtattttttttttttgatgattgatttttttatttgttttatttattgttggtaggagttttgattggtttttatagttatattatgtttttattataggaattttaggtttggtttttttgtttatgtggtttatgattgttgtagatttaggttttttatatggatggattttgagtttttatttgtattttgttttttgtagggtttttaggttttttaggaaggttttgtttaggttgagagttatgtttgggttaagggttaggagttagggatagtaggggg

SEQ ID NO: 3727 - DNA, 2441 bp, Artificial Sequence
  chemically treated genomic DNA (Homo sapiens)
ggatattttttaggatttttggtaaaggtaggagttagaatgaatgaattttttgtgtttaggtttttttgttgtttttggtttttagtttttggtttaagtatggtttttagtttagataaggtttttttaggaggtttaggagttttgtgggaggtagagtgtagataaaggtttggagtttgtttatgtggaaaatttgggtttgtggtgattgtgaattatatgggtagaggggttagatttggggtttttatgatgggaatatgatgtgattgtggaggttagttaaggtttttgttagtggtgagtggaatagataaagaaattagttattagaggagagaagtattttagattggagtgggaggttatatattggttttttgtgttgttttttagaggggaattggggtagaggggtttttttattttatgaggttggttgggtttaatttaaggaatttttgtttttttatttttgttggaatttttattgtagtttattggatttttgtatgagatatatttggggtgtttagtgagtaggtagatttttagatatttattttgaaaagttagtttgaaagagaatatttaggggtggggtttggttatagttagtttttttagagagttttaagtttagtaatatttaataattttgtgtttaggttaatggtgtttaattttagttgtggattgtgattatttggggaattttttttaaattttgatatttagattttatttaagattaattatgttagaatttttggggtgtgttttgggtatttatatatttttaaagttttttagttgttttagtgtgggtttaaggattgttttagttttagattaattttaagagttttaagatgaatatttggggaaaaggagaagttatgagttttagataagagaaataatttgtttaaggttatataaggtggtgatggtaaagtttgttttgaaatttaggttttttttttgattgtgggttaatttttttttgatgttgtatttttttttaaaaattagagtttaggtaggtaatgtttatagtattttattttaataatattggaaattggtatagttagggttattatagtggtggggtgggagttttgatggtgattaggggagttgtaagttttttgttttatttaaattttgggtagtaatttagaaaatttaattaaagggggagaaatggggatattttgtgttttttgttttttgttataatgagtgaaatatattaggttgtaaaaggaaatgttgtttgagatgtagttttgatgttttattgttaagttttatttattgatgtaaatgtaattgttggaaattggagtttttattaatatatatatttttatatatttggggttttttttgtttttttttttttttttgggtttgtttatttattttttagggttagttttgttgttttttgggtatgtttatgttaagtttggagttttgtattggttttatatttttttatggtagataagattttaatagaattttattgttttttagagtttagtaatgtattttggaaattaggtggttatatattaaagttattgtttttttttataaatgggtttttttaaagttagtgattatgggggttttgataagtttttatgaagttttattttatatgttattggtgtgttaaaaggtgtaattttaggtttatattgtttattgttaggggttgatatatttaagtagtttttttatgaattaggtagtttaggtattttttttatttttggtattgatagatgagtaaaaggaagttatttagatggtgttatatagggttttagtttatgtggtgaatgatttttaatgtttggtttaatttatttttaaatgaaatttgttattgattttggattaaaaggataaattttatagttgttattattgatagagttatagtgtttaagtgatattttttaaggaggggagggagggtggtttgtttgagttaaggggagggtatggagattttttagggagtttggtttagtagtaaggggtagtgtaagattttatgtttagagggaagtttaaaaatattattttttttaattgaaatatttgatgtgatgtttatttttgagttttatttatataatggaaatagtagtgatatttgttttatggtatttatatgattattagaggtatgttagttgtttttagggatgggaggttttttattttttgtagtatttttagaatgaaatgagtgataggtgttatttattttagtgaatttttagagattgttttttgggttagtttttgtttattttttgtttttattaggtttttggtttttatggtgtttagagattatatttgtattgggaagtagataagaggtataattatataggggaggagga

SEQ ID NO: 3728 - DNA, 2441 bp, Artificial Sequence
  chemically treated genomic DNA (Homo sapiens)
ttttttttttttgtgtaattgtgttttttgtttgttttttaatgtaagtgtaatttttgggtattgtggaagttgagagtttagtggaggtagaaggtaagtaaagattagtttaggaaatagtttttaggaatttattagagtgggtgatgtttgttatttattttattttgggaatgttgtaggagatggaaagttttttatttttggaggtaattaatatgtttttagtggttgtgtggatgttatgaggtaaatattattgttatttttattatataaatgaggtttagaggtgagtattatgttaagtattttaattgggaaagatgatatttttaaatttttttttaagtatgggattttgtattgttttttattgttgagttaagttttttggagagtttttatattttttttttgatttagataggttatttttttttttttttttgagaggtgttatttgagtattgtggttttgttagtggtaatagttgtaagatttgtttttttaatttagaattaataataaattttatttaaaaataaattaaattaggtattggaaattatttattatgtgggttggagttttatatagtattatttaaatggtttttttttgtttatttattaatgttaagagtgggggaaatatttaggttgtttgatttatggagaaattatttaaatgtattagtttttaataatgagtaatgtaagtttggagttgtattttttagtatattaataatatgtggagtgaggttttatgagagtttattagagtttttatggttattggttttgagagagtttatttataagggggaataatggttttagtatgtagttgtttaatttttagaatgtattattgagttttgaggagtaatggaattttattaaagttttatttgttatgggagggtatgaaattggtgtggaattttaggtttggtatagatatgtttagaaagtagtagggttgattttaggaggtgggtgaataagtttagagggagaggggggagtaggaggggttttggatgtgtgaaaatatgtgtgttaataagagttttggtttttagtgattatgtttatattagtgaataaaatttggtaataaaatattggagttgtgttttagatagtatttttttttatagtttggtgtattttatttattataataggaggtagggagtgtgaggtgtttttatttttttttttttaattaaattttttaaattattgtttaagatttggataaagtgaaagatttatagtttttttaattgttattgaggtttttgttttattattgtggtggttttgattgtattggtttttaatattattaaagtgaaatattgtgggtattgtttgtttgggttttggtttttaaaaagagatgtagtattaggaagaaattggtttatggttaggaaagaggtttgggttttaggatgggttttgttattattattttgtgtgattttgggtaagttattttttttatttgagatttatgatttttttttttttttagatgtttattttgaggtttttagaattgatttggagttggggtagtttttggatttatattgggatgattggggagttttaagaatatatgggtgtttagggtatattttagagattttgatataattggttttaggtgagatttgggtattagggtttaaaaaaaattttttaggtgattatagtttatagttaggattgaatattattggtttaaatatagagttattagatattattggatttgagattttttggagaggttggttgtggttaggttttatttttgggtgtttttttttagattggttttttggggtgggtatttgggaatttgtttgtttattaagtattttaggtgtgttttgtgtagggatttagtgggttgtagtgaggattttaatagaggtgggaggataagggttttttgaattgagtttagttagttttgtggaatgaggaggtttttttgttttagtttttttttggagggtagtatagggagttgatatgtgattttttattttggtttggggtattttttttttttgatgattgatttttttatttgttttatttattgttggtaggagttttgattggtttttatagttatattatgtttttattataggaattttaggtttggtttttttgtttatgtggtttatgattgttgtagatttaggttttttatatggatggattttgagtttttatttgtattttgttttttgtagggtttttaggttttttaggaaggttttgtttaggttgagagttatgtttgggttaagggttaggagttagggatagtaggggggtttgggtataggaaatttatttattttggtttttgtttttgttagaagttttagggagtgttt

SEQ ID NO: 3729 - DNA, 2473 bp, Artificial Sequence
  chemically treated genomic DNA (Homo sapiens)
agtaattatgttataagggtggtgggtgggttaaatgagttgagttttggtatataagtaatttagtatggagtataataaatgtttattttgtgtttgttgttattgtttttaagttttttttttggtttttattggtgtggagtattttattgttttttttttttatagatttttattttgttatttaggttggagtgtagtggtttaattatagtttattgtagttttgaatttttgggtttaagagattttttttttttagtttgttaagtatttaagattataggtatgtattattatgtttagttaagtttaaataaattttaatttatttttatgttattttatttattgtgtagatagggttttgttttgttattttgggttggagtgtagtggtaggattttggtttattatagttttaattttttaggtttaaatgatttttttgttttagttttttagtagttgagattataggtatgtattattatgttttgttaatttttgtattttttgtagggatggggttttgttatgttgtttaggttggttttatttgttttaatttaagtattttttttgttttagttttttaaaatgttgggattattgttgtgagttattatgtttggttatatatttttttttatttaaggttagaagaatttttaattttaattaattttttttggttaaatagttttttttttaattattggttaagttgaaagtagagattaaaaaatattatattattatttggttagtaaagaaatttttttttttttattattattattttttttttttttttttttgttttttttttttttttttttttttttttttttttttttattttttttttttttttttttttttttgtttgttttggtttaatgaaaggttttataggatgttgtttgtggtgttgatttgtttttttgttttgtttaaattttgtatgtaaatgaaaagataatatagttattgaatgttgaagttggggatattttttaagttaatttttgtgtttgtggtgtggttatggttttggttattatttttggttatagtgttttggagatgttgatgttgatttggattagaggtgttagtttgggtattgttagtttttatagttattgattagagttttagggtataggtagttagtaatttatttgggtgttttagggattgttattggtaaagtgatggttttatagggattaaatgtgaagttaaagtaggatatgtaggttggagataaggttaagaatagattttttttagtgtttaagtgttgtttgttagaaattgatagttttatggttttggttggtgataggtatagggtgataataatattatatgattagtattattggaggataggttgttattggtttttagagataaggaaataatgggtgatttttttgtttagggaaaggtttgtatggagtttttagggtaaagtagtaagatttaaagtgtgtttttgatttttggtattttattagtattttttttttttagtaggtttttagagtttttttttgttatttagggatttgtggtttttattgtgtatttattattttgatttttgttttttggagttaattatgttatttttagagtataggtgttagtggatgataatagataagtagttttttttttagttttttgtattatagatgttgttaagggaatggagtgggagaatagagtttttttgaggtggtttatgtaggttatggatttagtattaatagtttttttttagtattggatttttgagaaataaaaaggttgggtgtggaggggtttttatattttttagtgtttttttattttattttattggagtaaagttgttgattttatatttggggatatattttgggatgggttttattgttttggtttggttatatttttttttttattgttgtgtaatttttttttattatagttttaatagttatgaaatggggatttagtatatttaggttttagttttttttttgattttagtttgatgaatgatttagggattatagttaagttattttattttttggttttagtttttttaattgtaagttggggttatttatttgtaattattagatttgttaggtggtatgaagttttagtgagataaatatatgtgagggttgggtggtgggagatttgagatttattttttattaattaggtttattgagtatagtgtggagtattgttgggttttagtttggaggtttgttttgtttgattttttaggtggtaagattatttttttgtttttttttttttttatgtttaggttgtgattttttatgggtttattttttatatttttttgtttttttttttttatgtttgttttttaattggtttttgtttttgtttttttttttgattttttatgtatatttgtaaattttattt

SEQ ID NO: 3730 - DNA, 2473 bp, Artificial Sequence
  chemically treated genomic DNA (Homo sapiens)
gagtgaggtttgtagatatatgtaaaagattagaaaaaaaggtaagaataagaattagttgagagatagatatgagagaaagaaaataggagggtatgagaggtgagtttatgagaaattatagtttaagtatagaagaggaggggaatggggggatgattttgttatttggggagttaggtagagtagatttttaagttgagatttagtagtgttttatattgtatttagtgggtttggttagtggggggtaaattttagattttttattgtttagtttttatatatatttattttattggaattttatattatttggtagatttgatagttatagatgagtagttttaatttatagttgaagaaattgaggttagggagtgaagtgatttgattatgatttttaaattatttattaagttggggttagggaaagaattaggatttaggtgtgttgagtttttattttatggttattggggttatggtagggaaaggttgtgtagtagtgggggaagggatatagttaagttagggtagtggaatttattttaaaatatgtttttaagtgtagggttaatagttttgttttagtggggtggaatgggaagatattagaaaatgtgggagtttttttatatttaatttttttattttttaagaatttagtgttggagagaggttgttagtgttgaatttatggtttgtataaattattttgagaaagttttgtttttttattttatttttttagtagtgtttgtggtgtagggagttggggagggaattgtttgtttgttattatttattaatatttgtgttttagagataatatgattaattttagagaataggggttagaatagtgggtgtataatggaggttatgggtttttgggtgataggaaggagttttgggggtttgttgggaggagggggtgttggtgaggtgttaggggttagagatatattttagattttgttgttttgttttgggggttttatgtaggtttttttttaggtagaggggttgtttattgtttttttatttttgggagttagtgatagtttgttttttaatgatgttgattatatggtattgttattattttgtgtttgttattggttagggttgtggggttgttaatttttgataaatagtatttgagtgttaaagggaatttgtttttggttttatttttgatttgtgtattttgttttagttttatatttggtttttgtggggttattattttgttaatagtagtttttggggtatttagataagttgttagttgtttgtgttttggggttttagttaatggttgtggggattggtagtgtttaggttggtatttttggtttaggttagtattagtatttttggggtattgtggttagagataatggttagagttgtggttatattataggtatagagattagtttggggaatgtttttagttttaatatttaatagttgtgttgtttttttatttgtatatagagtttgaataagatagaaaaataagttagtattatggatagtgttttgtgaggttttttattaagttaaagtaagtagggaagaaaggaggaaaggagaaggtaagggagggaggagaaagggagggaaagggggaagaggtaaaaggaaaaggagaggaaatggtgatggtaggggagggagagtttttttgttggttaaataatggtgtggtattttttagtttttatttttagtttggttagtggttgaagaaaagattatttgattaaggaaggttaattgaaattaaaggtttttttgattttagataaagaaggatatgtggttaggtatgatggtttataatggtaattttagtattttgagaggttgaggtagaaggagtgtttgagttaaggtagatgagattagtttgggtaatatgataaaattttatttttataaaaagtataaaaattagtggggtatggtagtgtatgtttgtagttttagttattggggagttgaggtaggaggattatttgagtttgggagattgaggttgtagtgagttaagattttgttattgtattttagtttagggtgatagggtaagattttgtttatataataaataaaatagtataaaaataaattaaaatttgtttaaatttagttgggtatagtggtgtatatttgtggttttagatatttggtagattgaggaaggaggattttttgagtttagaaatttaaggttgtagtgagttatgattgagttattgtattttagtttaagtgatagaatgaaaatttgtgaaaaaaaaaagtaatgagatattttatattaatagagattaaagaaggaatttggaagtaatgatgataaatataaagtaagtatttgttgtgttttatgttaagttatttatatgttagaatttaatttatttagtttatttattatttttatgatatagttgtt

SEQ ID NO: 3731 - DNA, 2500 bp, Artificial Sequence
  chemically treated genomic DNA (Homo sapiens)
atgatagattggattaagaaaatgtggtatatatatattatggaatattatgtagttataaaaaatgatgagtttatgttttttgtagggatatggatgaaattggaaattattatttttagtaaattattgtaagaataaaaaattaaatattgtatatttttatttataggtgggaattgaataatgagaatatatggatataggaaggggaatattatattttggggattgttgtggggtgtggggaggggggagggatagtattaggagatatatttaatgttaaatgataagttaatgggtatagtatattagtatggtatatgtatatatatgtaattaatttgtatattatgtatatgtattttaaaatttaaagtataataataaaaaaaaaaatagatatgatataattataaaaaaagaaagaatagtatattagagggaaggagtagtttttattttttattttttattttttttgagatagttttgttttgttatttaggttggagtgtagtggtataattttggtttattgtaatttttgttttttaggtttaagtaattttttttttttagttttttgagtagttgggattataggtatgtattattatatttggttaatttttgtatttttagtagagatggggttttgttatattggttaggttgattttaaatttttgattttaggtgatttgtttgttttagttttttaaagtgttaggattataggtgtgagttattatatttggttagtagttttatatatttaggaaaaaagtattagatgtgatttttaagttaataataatttagaatagaaaatttaaatattgttttagtgtttggtttagttttagtttaatgttgtattttgtatttgtttattgtaagatgtgaatgttttatttaatttttttggtagatgtatttttttttatatttttttaaaaattgaaagatgatttttttattttttatttagttttgaaagggaggtatagttaatgattttgtatgtattttagaaattgatttttttagattttaatagaagttatttaagtgtatagatgtttgttggttttatatggaggttttgttggttatgaaaaaatatttttttttaattttttgtttaatttgttttaagttggtaatgaaatttgtgaatttgtgttttttttttataggaaaaatagaattttgattttttttaaaaattagaatgtaataggataatggagaaattagttttaatagtatattttttgtttgttttagagtggtgatgtaaatatgatgatgttatgtttttggggtttttgaggtttttgttaaaagtatagtagtttaggtggatttgtgtttattgtatgtttttttggtggatttttgttgataaattgtatgtttgtttttttgaaatagtattatgaagttgttaatgtttttgtataaagattattttattttgtttgttttggggataaagattttgtattaattattttgtttttttttggagtgaagagttgaagaggtaataggaaatgtttatttattgagtttttattgggtattaattgtggatatttatagaaggggtttgagtaagtatttttttattgtttaggggttagagtagagaatagaaaggaaatagtttggtttttggttttataaaataaataagaataaaatagaatattgaatatttgtgttttttttattattttaatgtatgtattttgtagattttgtatttaaatatgtagaataggttaatgaaagaaaatgttaaggttgggtatagtggtttatatttgtaattttagtattttgagagtttgaggtgggtggattataaggttaggagtttgagattagtttggttaatgtagtgaaattttgtttttattaaaaatataaaaattagttgggtatggtggtgggtgtttgtaattttagttatttgggaggttgaggtaggagaattatttgaatttgggaggtagaggttgtagtgagttgagattgtattattgtattttagtttgggtggtagagagattttattttaaaaaaaaaaaaaaagaaagaaagaaagaaagaaaatgtttttaaattttattatttagagataaaattatttatttttggagagtatttttttaaattttgtttttttttaatggtttttagttgaggataattttggttgtttgtgtatatttggtaatgtatggaaatatatttggttgttatatattaggaaggggtgtttttggtatttagtgggtagaggttgaggatgttattaagtattttatattgtaaaggatagtttttttttttattataaagaattatttagtttaaatgttagtggtgttgaggttaagaaattttgttatagatatatggatgtgtagttttgtgataattatataattaagtttatattatgttagttgtttattatttt

SEQ ID NO: 3732 - DNA, 2500 bp, Artificial Sequence
  chemically treated genomic DNA (Homo sapiens)
aggatgatgagtagttggtatagtatgaatttgattatgtaattattatagagttatatatttatatgtttatagtagggttttttggttttagtattattggtatttgagttggataattttttgtggtggagagaggggttgttttttgtagtgtgggatgtttagtggtatttttagtttttatttattaaatgttaggaatatttttttttagtgtgtgataattaaatatgtttttatatattgttaaatgtatgtaggtggttaaaattgtttttagttgagaattattggaagagagtgagatttggaagaatgttttttaaaagtgaatgattttgtttttgggtggtgagatttgagggtattttttttttttttttttttttttttttttttttttgagatggagtttttttgttatttaggttggagtgtaatggtgtaattttggtttattgtaatttttgttttttggatttaagtgatttttttgttttagttttttgagtaattgggattataggtgtttgttattatatttggttgatttttgtatttttagtagagatggggttttattatattggttaggttggttttgaatttttgattttgtgatttatttattttggatttttaaagtgttgggattataggtgtgagttattgtgtttggttttggtatttttttttattagtttgttttatatgtttgaatgtagaatttataaagtgtatatattaagatggtgaaagaaatataaatgtttaatgttttattttatttttatttattttgtggaattagaggttaagttgttttttttttgttttttattttggtttttggataatgaggagatatttatttaaattttttttgtgggtgtttatagttggtatttagtaagaatttagtaaataagtattttttgttgtttttttagttttttgttttaggagagagtaaggtgattagtgtaaagtttttgtttttagggtaaatagaatggggtggtttttatgtaaagatattaataattttatgatgttattttagaagagtagatatataatttgttgatagaaatttattaaagaagtatgtggtaggtatgaatttatttaagttgttatgtttttggtagaaattttaaagattttaaaagtatagtattattgtgtttatattattgttttgaaatgaataagaaatgtgttattgagattgatttttttattattttgttgtgttttgatttttaaaagagattaaaattttattttttttgtagaaagggaatatagatttatagattttattattaatttaaaataaattgagtaaaaaattagaggggaatgtttttttatagttagtaaggtttttatgtaaaattagtaaatatttgtgtatttgagtagtttttgttaaggtttaaggaagttagtttttggaatatgtgtgagattattgattgtgttttttttttaaaattgaataagaaatgaagaaattattttttagtttttaaaaaagtgtaaaaaaggatatatttgttaagaaagttggatggggtatttatattttataataaatagatgtagaatgtagtattgagttggaattgggttagatattggggtagtgtttggattttttgttttaagttgttattaatttaaaaattatatttagtattttttttttaagtatataaaattattggttgggtgtggtggtttatgtttataattttagtattttgggaggttgaggtgggtagattatttgaggttaggagtttgagattagtttggttaatatggtaaaattttatttttattaaaaatataaaaattagttgggtgtggtggtgtatgtttgtaattttagttatttgggaggttgaggaaggaggattgtttgaatttgggagatagaggttgtagtgagttaagattgtgttattgtattttagtttgggtgatagagtgagattgttttaaaaaaaataaaaaataaaaaataaaaattattttttttttttggtgtgttgttttttttttttttgtgattatgttatatttgtttttttttttattattatattttaagttttagggtatatgtgtataatgtgtaggttagttatatatgtatatatgtgttatgttggtgtgttgtatttattaatttgttatttagtattaggtatattttttaatgttattttttttttttttttatattttataatagtttttagagtgtgatgtttttttttttgtgtttatgtgtttttattgtttaatttttatttatgagtgagaatatgtagtgtttggttttttgtttttgtgatagtttattgagaataatgatttttaattttatttatgtttttataaaggatataaatttattattttttatggttgtatagtattttatgatgtatatgtgttatatttttttaatttagtttattat

SEQ ID NO: 3733 - DNA, 2333 bp, Artificial Sequence
  chemically treated genomic DNA (Homo sapiens)
tttgtaattttagtatagtgggaggttgaggtgggaggattatttgaggttaggagtttgagattattttggttaaaatggtgaaattttatttttattaaaaatataaaaattagttgggtatggtggtgggtatttgtagttttagttatttaggaggttgaggtatgagaattatttgaatttaggaggtagaggttgtagtgatttaagatggtgttattgtattttagtttgggtaatagagtgagattgtgttttaaaaataaaaattaaaattagaatgtaggatatttaatatttattgttttagttttgttggggaggggtataataagaaaaattttatttggtattttgaaataaattagtattggggtgagtttagtggggtagttgatggttgagttaggttggtgtgatggaaggagttgtgagggttttgtagtttggagtatttttggtttttttagtagttattataagatggagtaggtagggttgtagttggatagtttagttaggaaatgttagttatgaatgagtgttttatggttgttttgggaatgtgtgttaggattggaattttgtagttgaggatttgaaatgttttgattaggtggttaaagagtatgattttaggttgggtgtggtggtttatatttgtaattttagtattttgggaggttgaagtgggtggattatttgaggttaagagtttgagattagtttggttaatatggtgaaattttgtttttattaaaaatataaaaattagttaggtatggtggtgtatgtttgtagttttagttatatgggaggttgatgtaggagaatggtttgaatttaggagatggaggttgtagtgagttaagattgtgttattgtattttagtttggatgataagagtaaaatttttttttaaaaaaaaaaaataaaataaaattgtgattttataataaggttatgttgttagggattatgtattgatgtttttagggagaaatgagaaggaatatagtaattgaataagatgatgtttgtttatgatatttatgatgttttttaaggtttgagatatattgttttttgtttaattagttattgtgattatatttttatggagattattatgtttgtatttataatagatatgtgtgtatttattaaaggaatatagttgttaaatgtatgttttgggtttagggtggagtggttttttatagtatagttattggagttgttgtaaaaagtgttagaaaataagtaaggagttgtttttatttatgaagagaggttttttttggtattaggttttgggtttaggggagtgtgaaatttaggaaggtggggtgtatatgtttatgataaaagttttaaaggtgtagatttattttttttttttttttttttaaatgtgtgttaaagatttttaagtttattaattaatgaagggattagtaagatgttaaaaattggtttaggagagaatgtagagaatagatattaatataggtaattaggaatgttttggttaagagatataaaattggttttttttaagagtagtaaggagaatggggagaagatttagttttttattaaaaaaatttgagagttaataagtgtttagtagagtgagtggtgtttggatggaggggtggataggttggatgggatttaagtgagattgtgttatttagatttgggtagtgttttagggatgtttagtagaggggtaggaggttgtgggggatgttgttgtttgggttttgttttttttgtgttaagtatttttagttttttgtataggttttaaatgtggtaaatgtatggtagattttggggtatgaggggatgagaggggattttttagaagagtagagtgggaatagattatgaaagtttgggattgtagattttagttttgttatgggataagaaattagttttttttagatattatttggtatttgtttttgttttagaattgagagtagtaaagggtttttgtgtttgttttgtttttggttttttttttttttttttagagatagggttatgttttgttttttaggttggattgtagtggtataattgtagttgattgtaattttaaatttatttttgggtttaagtaatttttttattttggttatttgttaatttttatttttgttttttggtagagatagggttttgttatgttgtttaggttggttttaaatttttgtttttagtgatttttttgagttggttttttaagatgttggattataggtgtgagttattgtatttggttttttttttgttgttttgtttaatgggattt

SEQ ID NO: 3734 - DNA, 2333 bp, Artificial Sequence
  chemically treated genomic DNA (Homo sapiens)
aaattttattggataaggtagtaaggagaaggttaggtgtagtggtttatgtttgtaatttaatattttggggggttaatttaggaggattattagagataggagtttaagattagtttgggtaatatagtaagattttgtttttattaaaaaataaaaataaaaattagtaggtgattggagtgggaagattatttgagtttagaagtgagtttgagattatagttagttataattgtgttattgtaatttagtttgggagatagagtgtgattttgtttttagaaaaagaaaaaagaagttaggagtaggataaatatagaagttttttgttgtttttagttttgaggtagaaatgagtgttgaatggtatttgagagggattggttttttgttttatggtagagttagggtttgtaattttaagtttttatggtttgtttttattttatttttttggaaggtttttttttatttttttatgttttaaggtttgttatgtatttattatatttggggtttgtgtagggagttggggatgtttagtataaaaaggataaggtttagatagtggtattttttatagttttttgtttttttgttaagtatttttggagtattgtttaggtttgggtagtatagttttgtttgagttttatttggtttgtttatttttttgtttaagtattatttattttattgagtatttgttggtttttaaatttttttaatgaaagattaaattttttttttattttttttattgtttttggaagaaattaattttgtgttttttgattaaaatatttttaattatttatattaatgtttgttttttgtatttttttttgagttagtttttaatattttattggtttttttattaattaatgagtttaaaaatttttggtatatatttgaaaaaaaaaaaaaagagagtgaatttatgtttttggaatttttgttatgagtgtgtgtattttgtttttttgggttttatatttttttagatttagggtttgatattagagagagtttttttttatgaataaggatagttttttgtttgttttttgatattttttgtagtagttttgatgattgtgttgtaaaaagttattttattttgggtttagagtgtatgtttggtaattgtgtttttttaatggatgtatatgtgtttattgtgagtataaatataatggtttttatggagatatggttataatgattaattagataaaagatagtgtattttaagttttgaaagatattatggatgttataaatgaatattgttttatttggttgttgtatttttttttatttttttttagaaatgttaatatgtggtttttagtaatatgattttattatgaagttatagttttgttttgttttttttttttgagaaggagttttgtttttgttatttaggttggagtgtaatggtataattttggtttattgtaatttttgttttttgggtttaagttatttttttgtattagttttttatgtagttgggattataggtgtgtattattgtgtttggttaatttttgtatttttagtagagatggggttttattatgttggttaggttggttttaaatttttgattttaggtgatttatttgttttagttttttaaagtgttggaattatagatgtgagttattatgtttggtttgaagttatattttttagttatttggttagaatattttagatttttaattgtaggattttaattttggtatatatttttaaggtagttatggggtatttatttatggttggtattttttgattgggttgtttaattatagttttgtttgttttgttttatgatggttgttaaggggattagggatgttttaagttatggggtttttatagttttttttattgtattagtttgatttagttattagttgttttattgggtttattttaatattgatttgttttaggatgttagatgggattttttttattgtgtttttttttaataaggttggggtaatgagtattaaatattttgtgttttggttttggtttttgtttttgagatgtagttttattttgttgtttaggttagagtgtagtggtattattttgaattattgtaatttttgttttttgggtttaagtgatttttatgttttagttttttgagtagttgggattataggtgtttattattatgtttagttaatttttgtatttttaatagagatggggttttattgttttggttaggatggttttaaatttttgattttaagtgatttttttgttttagttttttattgtgttgggattatagg

SEQ ID NO: 3735 - DNA, 2492 bp, Artificial Sequence
  chemically treated genomic DNA (Homo sapiens)
agaggtattttggttgtgggagaaaagtaggttaattttggtatgattgtttttttttgggatagtgagataagttttttaggattagttggggagttttagagaagtttggtattggtaatgttttgagagtttatttttggagttaagggatttaggttttttattgtgtatgtttattttttgggtaaggtattggatggtaggattttaagtagaggtaggaaagggtaatttttagttttttgtagaaggtttgattgtgggggtagttagttgggattgtttagttttgaagtagagattgagaattttgtttgtttgtgtgattattatttatgtttattttttttttgagttttagtttttttattggtaaaatgggaagagaatggattagagagtattttttttttatttttaaattatagagtttttttttttttttttaagataggttttgttgtattatttaggttggagtgtagtggtgtgattatagtttattgtagttttgattttttggatttaggtgatttttttgttttagtttttttagtaattgggattataggtataggttattatgtttggttaattttgtatttttattttttggtagtaatagagtttttttgtgttgtgtaggttggttttaaatttttggttttaagtgatttttttgtttgtttttaagtgatttttttgttttgggattataggtgtgagttgttatgtttagtttatagataatatgtattgagtgtttattatatgttaagtattgggttaagtttgttgtatgtagtattttgtttatattttataataattaagggggtaggtatttgtttgttttatagatgaggaaattaaggtttttagtagtaaagtaaattttttaagtttatttagtatgggaatgatagatataggtttgtaatttaggttttgttgatattgaaatttgggatgttagtaattttattttgttgtttgttagttttgttaggttttttaggatggtttttattttgagttatatttttaggaatattttgttattttttattttttttttgggtttatattatgaaagttttatgtagagtttgttattttagagggatatatattatttaaatttgataagataatttaattttattttgtgtttgttattggtgataaaattaggagatttttatgatttagtatttttagtaagattgttaggaatttattatataaggtttaattggatttttttttgtagatggttgggagttatgggttggaatgtaatttggtaatatatttggggaaataaatgtaaaatgtttgttttagagatttagataaggtagtaggtttttaagttttttaagaattggatttgttttttttgggttttgaagggtgatttggggaggatttatgttgttggaggaggagggaatggtgggttttttttttttttattttttgattttttttgttttagggaaggaatgtgagtgtatttgagatttggagtttagtaattgtaattttttgagaggtagtaatttagagtagatttgggggtgggaggataggatggtgggtagtggtgagattaaggttatgaggattgtgtgtattgaaagaggggtgtaggatgattaaaatgatggggaattgggtttttattagttgtttgggatttgttatagagttattttttattgttttgagaggtttgtgttttttttaaatatatttttaggattggtgtggtttttataaattgggtttttaaatagattttattttttggatgtgagtttatatttagatttagatgatttttgtatataagtttatagatattttaagattttgaggtttattgtgagggtgttttaaatttatggtttattttaaattttgattttttgtaggtgtgggtttatagatgggtttgtggtttattttagtttttatagtatttatgtgatttttgttattggaaggaatggtaataattatatttatttttgtatttatttaatagatttgttgaattttgaggttggagttttataagagttagttttaaatttagggtttattttttagtgtagatattttttaaatttttgtttatatatagatttggtataattttagatttagttagttgtttaagttagattttagttttttagttattagtagtatttgagagttatttttttaataagtttatattaagttttgaggatttggtatttttagttttaggttttggtttttgtgtagggaagttgttgtaatattattgatttgggaagtttgaggtttgtttttgtgtatttgttttgtgattttaagttttttttatggggttaggaaggtggtggagatatttttatttgtttttgggttttttgatgttttaatggattttagtattagaagttttttttttttttgagttggagttttgt

SEQ ID NO: 3736 - DNA, 2492 bp, Artificial Sequence
  chemically treated genomic DNA (Homo sapiens)
gtgagattttgatttaaaaaaaaaaagggtttttggtattggagtttattgaagtattggggagtttagggatagataaaaatgtttttgttgtttttttggttttgtagaaagagtttagagttatagggtaggtgtgtaagggtagattttaaattttttagattagtggtgttgtagtagtttttttgtataaggattggagtttgggattggaggtgttagatttttaaggtttggtatgagtttgttgagggggtaatttttagatgttgttggtagttagagggttggagtttagtttgggtagttaattgaatttggggttatgttagatttgtgtgtgagtagaggtttgggggatgtttgtattagagaatgaattttgaatttggggttggtttttgtaaagttttaattttaagatttggtagatttattaggtgggtgtaaaagtgaatgtggttgttgttattttttttaatggtaaaaattgtatggatgttgtgaaagttgagatggattgtaagtttgtttatgagtttatgtttgtgagagattagaatttgaggtaagttatgaatttggagtgtttttatagtgaattttaaaattttggagtatttgtgagtttatgtatgggggttatttgaatttggatgtgaatttatatttaaggaatggggtttgtttgggaatttagtttatgggggttatattagttttagaggtgtgtttgggaaggatgtgggttttttagggtagtaaggagtgattttatggtagattttgagtagttagtgaagatttagttttttattgttttgattattttgtattttttttttaatgtatatagtttttataattttggttttattattgtttattattttgtttttttatttttaggtttattttgaattgttattttttagggaattatagttgttgaattttaagttttaggtgtgtttatattttttttttggggtaagaagagttaagggatgaggggagaaagagtttgttattttttttttttttgatagtgtaaattttttttaaattgttttttagggtttaggaaaagtagatttgatttttggggagtttggaggtttgttgttttatttaagtttttggaataagtattttgtatttatttttttaaatgtgttgttgaattgtgttttagtttatggtttttagttatttgtagagagaaatttagttagattttgtataataagtttttgataattttgttgaggatgttgggttataaaagttttttggttttattgttggtaatagatatggagtgaaattgagttgttttattaaatttagataatatatatttttttagagtagtaggttttgtatggggtttttatggtatgagtttaggagggggatagggagtggtagagtgtttttggggatgtggtttagggtgggggttgttttggaaagtttggtaggattgataggtagtagggtagggttattagtattttaggttttgatgttaataagatttggattataaatttgtgtttattatttttatgttgagtgaatttggaaaatttattttattgttgagggttttggtttttttatttgtaaagtaggtagatgtttgtttttttgattattgtgaaatgtaaataagatgttatatgtaataggtttagtttagtgtttggtatgtagtgagtatttaatatatgttgtttgtggattggatatggtagtttatatttgtaattttaaggtaggaggattgtttgagggtaggtaggaggattgtttgaggttaggagtttgagattagtttgtataatatagggagattttgttattattaaaaaataaaaatataaaattagttaggtatggtggtttgtgtttatagttttagttattagggaggttaaggtaggaggattatttgagtttaggaggttaaggttgtagtgagttatgattatattattgtattttagtttgggtgatatagtaagatttgttttaaaaaaaaaaaaaaaaattttgtaatttgggaatgggagaaaaatattttttggtttattttttttttattttattggtggagaaattgaagtttagagagggagtggatatggatggtggttatataggtaggtggggtttttagtttttgttttagggttgagtaattttaattgattgtttttgtaattaggttttttgtaagaggttggaagttgtttttttttgtttttgtttaaagttttgttatttagtgttttgtttaggaaatggatatatatggtaggaagtttgggttttttggttttaggaatggatttttaggatattgttagtgttgggtttttttagggttttttagttggttttgggaagtttgttttattgttttaggaggggatgattgtattagaattgatttattttttttttatagttaagatgttttt

SEQ ID NO: 3737 - DNA, 2301 bp, Artificial Sequence
  chemically treated genomic DNA (Homo sapiens)
gatagtttttagtagattttgatgttggtttgagagtttttggagtaggtggtttataagttgtggaatagagattaagtatggtatattaattgtgtgtttagttttgagttaattgttatatgtttttatagtgatttaataaggtatgtgtgaagggtttatttttatatataattagtgtgagtttttattgtttttattttaggtaattgttatattatttttttgagatgggttttagtttttttagttattaatgaataaagaaaagtgttaagaagagaggtggtttgttgagaattatatggttaggggttaattttaaagtagtgagtttttgttttagtatattttgtttttattttttgatttagttttgtagttgaatggtgttttttaatttttttaattttagtttttttatttgtgaaatggaggagttggattattgggttgggagtttttgatattatgtgtgattttgtatgatttttttttttttttgtattttagtttttttatttgtaaaagaagttgttagtattttattttaatgttatttataaatgttgttttaaaataaaatttttggtgagggaaggttttaagtttagttttttggaaataggttttgagttagagttttgtttgtgggaggtttattgggggagagtttttaggaatattgtggtaggggtgagggaagtaggattatgtggagggagaagttgaattgtgaagtttttttagtaggggttttagttgtttttatagggaattttggagttgggatgttttaaattgagtaaggggttaggtttttgaatttatgtatttattagatattggatatgggtttttgtttttttatttgtttaaaggtatgatgtggggtgaggtagttgattttggttgagggttgttagtagttatagggttaaaattgttttgggtggtatgatttattatataaaatttgttaaaaatttgggttgattttagttttggaaataatagtaggtaagatgtggtttgagtttgggtttatttagttgggtttggttttgttttgagggtttgttgtttgttgtgattatagtaggattagtgttttagattttgtttaaagtttggtggttattgtttgttttgtagtttattttttgtagttttttgaggttttagtgattatgttattgaaaattttgtttttattttgttaattttgtagtaaattataggtttggggaggtgtgggttttttttttaaataagatttaattttatttagttgtttttatttttattttatatatgggtttttttttttttattattttgggtttgggatttatggtttttttttgtaggtagttggtaattatggtaagttttttagggaggttttaggttggagtttttttagttttagattttagtatggttggttgtttttttttaggatgggagaggggagaggttagagatggtaggaatgggttttaggggttaaggttgagaggttatagtaattttagtaattatgagaattttaatattattatatttgatttttataataattattattttttttattatatagatgggtaaattggggttagggagtatgaggttattgttaaggttataattaaggaagtagttgattttggggttgaggtgtttaagtattttggtatattttttttttttttagttgttgtttttggatgtttaaattttttttagattttagtttttgtttatatttttttagtgatggggaaattatttttttttggtaggtttgttatttttttaatgattagatatagttgttaaataattgattaggttttgtgattttttagaagggttattttgatattgattgttttttgtgatttggttgttaatttttttttgtaaattgattttttatggtttgttattatagtaggttgtttggggtttttttgttgtttagtgttttgttttgttttaggttttttttatttatttttattttgttttaattattagttttgtttttatttttattatagaatattaaagttggaaatttatgattttttatttttttgatggagagaggtttagagaggggatgtatttttttagtgtatagggtgaattgatagtgtgggttttaaattttttgttaataaaataataaatagtattgagtatagttaatttttgttaagtgtttgataattattattttaagtatttatgaatgtaatttatttattttttatataattttatgag

SEQ ID NO: 3738 - DNA, 2301 bp, Artificial Sequence
  chemically treated genomic DNA (Homo sapiens)
tttatagggttatgtgagaagtaaatggattatatttgtgaatgtttagaatggtggttattaagtatttgataaaagttagttatgtttagtattatttattattttattggtggaagatttgggatttatattgttaatttattttgtgtattagagaagtgtattttttttttgggtttttttttattaggaaaatgaggagttatggatttttagttttgatattttgtgataggaatggagatagggttggtaattggagtaggatgggaatgaataagaaagatttggggtagagtgggatattgagtagtaaggagattttaggtagtttgttgtggtggtaaattatgaaagattagtttgtagaagagagttagtagttagattatagagggtagttagtgttaaaataatttttttgaggggttatagggtttgattaattatttggtaattatgtttaattgttagagagataataggtttgttagagaggagtgatttttttattattaggggaatgtaagtaggggttgagatttaagagagatttgaatatttaaaagtagtagttggggaaagaaggagtatgttagagtgtttaaatattttagttttagagttaattgtttttttggttgtgattttggtagtgattttatgttttttggttttagtttgtttatttatataatgggggaaatgatggttattgtgagggttagatgtggtagtgttgaagtttttatgattgttggggttattatgattttttggttttggtttttgaagtttatttttgttatttttggtttttttttttttttattttaggagaaagtggttggttgtgttggagtttggggttaaggaggttttagtttgaagtttttttaaggagtttgttatggttattagttgtttgtaaagagaggttataaattttgagtttggggtggtgggagggagggaatttgtgtgtggggtgggaatgggggtagttaagtggaattgaattttgtttaaggaggaggtttatgtttttttaggtttgtaatttattgtgaggttgataagatgaaagtggaatttttagtggtataattgttgggattttggggagttgtgggagatgagttgtgaggtaggtggtggttgttaggttttaagtaagatttggggtattgattttgttgtgattatagtaagtgatagatttttggagtggggttaggtttagttggataagtttaggtttaggttatgttttgtttgttattgtttttagggttgaggttggtttgagtttttagtaggttttatgtgatggattatattatttaggatggttttgattttgtagttgttgatagtttttagttaaagttagttgttttattttatgttatgtttttaggtgggtgaggggatagaaatttatgtttaatatttggtagatatatggatttaaaggtttggttttttgtttgatttggagtattttagttttagagttttttgtgggagtagttgaggtttttgttgagagagttttatagtttaatttttttttttatgtggttttgttttttttatttttgttatggtgtttttgagaatttttttttagtgaattttttgtaggtaaagttttggtttaaggtttgtttttagggagttggatttagggtttttttttattaggagttttgttttaaagtagtgtttataagtagtattggagtaggatattggtaattttttttatagatggaaagattgaggtgtaggaagggaagaaaattatgtaaggttatatatggtgttaggggtttttagtttaatagtttaatttttttattttatagatggaaagattgaggttgggagagttgggagatgttatttagttgtagagttgagttagggaatggaagtagagtatgttggggtggaagtttattgttttggagttggtttttagttatgtggtttttagtaagttatttttttttttgatatttttttttgtttattggtaattggagagattaaagtttattttaggaggatggtgtgataattgtttaaaataagagtaataagagtttatattggttgtgtgtgggaatgagttttttatatatattttgttgaattattgtgaaaatatgtagtagttggtttggggttgggtatatagttagtgtattatgtttgatttttgttttataatttgtggattatttgttttagaggtttttaggttaatattagaatttgttagaagttatt

SEQ ID NO: 3739 - DNA, 2351 bp, Artificial Sequence
  chemically treated genomic DNA (Homo sapiens)
tataaaatgttttagggagttattgaatttttttaaggggtagtagataaagtataattttggagtagggagatttgttgtgttagtttaggagatgttggttgttgtaatagggaaattttgatattttagggatttggtttaataaagtgtattttttgtttatagaaagtttatttggtggtagggttgagggtgggtgggggttttttgttttataaagttatttaggtatttaggttgatagagattttatgtttttaatatgtggtttttaaggtttttttggattttataagttagatgtgataggatagagtatgaagggttggtgtggggtatttttgggagtggtgtatattattttttttgatttattggttggaatttagttttatagttatgtaattttaaggagagtgggaaattttgtgtttaggaagaagaggaaatggatttggagagttatattagtttttgttatatttggttttgaatttagattttgttatatattatttgtgggattttagtttttttaatatgtttgagttttagtttttttattaaagggtaaatggtgataattttttaggaggtatgatgttgggagggttttttgagttttttttttaatatttttatgtagttgtggtttttatttgtagagttttagtttttatgtataattgtttatatatttgttaatttttttggtaataattttttttttggagggtaaattttattagaataggggttatattgtttttaattagagttgtagttttaataattggtttggtgtttagtatttagtaggtatttaataaatatatgttggggaaatgaatggatggataagttaatatgaatatatatgtgttaagatttatttttttaaaaatttttttttaataaatatttgtatttttatgttttattatggtgtggtgagggggagggaggggggaagaagatgaggaggaggaggggtattttttttttatttttattggagtttaaattataaatagttttagttggaatttgattgtagatttttttagtaaagttagtatttttaggattttttattttggatggggattgggagtgtttttttattaattatagttttttaattaatagttttgagtttggaataaaaggtgtttattgggagaatgttagtgggttttgaattttggttgtttgtttttatttggaggatttggtgttttggggagtaggtatggtatggtttagtgttgagtttggtaggggatggggtttggagggtgagtagttggtaggttggttgtttgtttttattttggatatttttatatagagttgatttgattttgagtaggttgttggtagttttgttttttttaggttgatgttgatgttattggtttggggtggggttggatagtgaagttgttatgttttttaggtggttttaatgtgtatagtttgaaaaatattgttttagggatggtaggtttggtagaaggtattgagatgggtttaaaggtttaattgagtgatttagagatggatatttatttaaggtatgtttaatgtttaggtagattaaaggtttattttttttttttttttttgttggtggatgtagtaggaatggaatttgttttttttttttttattatgttttttggagatgattagaggagagttagattatagaagtaggattttagttaggggttgggtgggaggtttggaaggtaggaggaagtatatatagtttggtattggaagtagtggttttagggtttttgttgagttttaggtgtaatattaagttgatgtaaaagttgttgtggttttttttattgtttttaatgataaaaattgtaatttgataaaaggttaatatttagaatttataatgaatttaaataaatttataagaaaaaaataaataattttattaaaaagtgggtaaaggatatgaatagatattttttaaaagaagatatttatgtagttaaaaaatatatgaaaaaatgtttattattattggttattagagaaatgtaaattaaaattataatgagatattattttataatagttagaatggtaattattaaaaagttaggaaataataggtgttggagaggatgtggagaaataggaatatttttatattgttggtgggattgtaaattagtttaattattgtggaagttagtgtggtgattttttagggatttagaattggaaatattatttgatttagttattttattattgggtatatatttaaaggattatgaattatgttgttataaagatatatgtatatgtatgtttat

SEQ ID NO: 3740 - DNA, 2351 bp, Artificial Sequence
  chemically treated genomic DNA (Homo sapiens)
ataaatatatgtgtgtatgtgtttttatagtagtatgatttatagttttttgggtatatatttagtaatgggatggttgggttaaatggtatttttagttttagatttttgaggaattgttatattgatttttataatggttgaattagtttatggttttattaatagtgtaaaagtgtttttatttttttatattttttttagtatttgttgttttttgattttttaatgattgttattttaattgttgtgagatggtattttattgtggttttgatttgtatttttttgatggttagtgatggtgagtatttttttatgtgttttttggttgtataaatgtttttttttgagaagtgtttgtttatgttttttgtttattttttgatggggttgtttgttttttttttgtaaatttgtttgagtttattgtagattttggatattagttttttgttagattgtggtttttattattgaaagtaataggaaaaattataatgatttttgtattaatttgatattatatttggggtttagtaggagttttagggttattgtttttagtgttaagttgtgtgtgtttttttttgttttttaagttttttatttagtttttggttgaagttttgtttttgtggtttggtttttttttgattatttttaggaggtatgatgggagaaggaaaggtaggttttatttttgttgtatttgttaatggggagaagaggagggagtgggtttttgatttgtttgggtattaggtatgttttgggtaagtgtttatttttgggttatttagttaggtttttggatttattttagtgttttttgttaagtttgttatttttggagtagtgttttttaaattgtgtatattagagttatttggggaatgtgataattttattgtttagttttattttagattaatgatattagtattagtttgaggaggatagagttgttagtaatttgtttgaagttgagttagttttgtgtggagatgtttaaggtggagataggtagttggtttgttagttgtttgttttttaaattttattttttgttaggtttagtattgagttatgttatgtttgttttttaaggtgttaggttttttaaataaaaataggtggttagagtttagggtttgttggtgtttttttggtaagtattttttgttttaggtttagagttgttaattaaagagttgtgattaatgaggaagtatttttggtttttatttaggatgagaggttttggggatgttgattttgttggaggaatttgtagttagattttaattggagttatttatagtttgagttttagtaggggtgggagaaaggtgtttttttttttttttgtttttttttttttttttttttttttattatattatgatggaatatagaggtgtgaatatttattgaggaagaatttttaaaggagtaaattttagtatatatgtgtttatattaatttatttgtttatttatttttttgatatgtatttattgaatgtttattaagtgttgggtgttaggttagttgttagggttgtagttttgattgagagtagtgtggtttttattttggtggagtttgttttttaggagaggagttattattaaggaagttgataagtatgtggataattgtatatagaggttggagttttgtaggtaagaattatgattgtatgggagtgttggagaaaaaatttaagaaatttttttaatattatattttttaggagattattattatttgttttttaatgaggaaattgaggtttagatatgttaaggaagttaaggttttataaatagtgtgtggtaaggtttagatttaaaattaagtgtggtagagattgatgtggttttttaaatttatttttttttttttttaggtataaaattttttattttttttgagattatatagttatgaggttgagttttagttagtgaattaagaggaataatgtgtattatttttaagggtgttttgtattagttttttatgttttgttttgttgtatttagtttatgaaatttagagggattttggaagttatatgttgaaggtatagagtttttgttagtttggatgtttgaatggttttgtggaatagaaaatttttatttatttttaattttgttattaagtagattttttgtaagtaagaaatatgttttgttgaattgagtttttgggatgttagagtttttttgttatagtagttagtgttttttaaattaatatagtagatttttttgttttaaggttatgttttatttattgttttttaggaagatttaatgattttttaaaatattttata

SEQ ID NO: 3741 - DNA, 2440 bp, Artificial Sequence
  chemically treated genomic DNA (Homo sapiens)
attgtataaatgttattgtgtttattgtatgttagatattttttgagtattggaaatatgttagtgaaggaggtggataggagtatgtgtttagttaggatgatagataatagaggaattattaattttaatggtgataaatgtattttatatattggatttttatgtaatatttaattagaagataaagtttttttattgaaaaataattagtaggtttttaggttagtatattttgtgggttatgaagttagtagttaagagtggtatttggaattttgtttttgtggtttatttagggtgggagagtgtttgtgaggtttagttattttgttagaatggaagttttattatttgttgatgagtgttagatagtgtgttagtttattttaaagttgttaaaatatgtatttatttgggtttgttttgataaatagataagaatttgtgttttttgtgagtttattagaatttagttattataattatttgttatatgttttttaattttatgggtaattttagggaggtggttgatttagatgaaagaaggttttttagtaattgtttagggtatttggaagaatatttaagttttttattatgatttatgggtttgtgttgattttggttttttttttttgtttatttttattttgttttatggttttttatgttgtagatgttaattttaggttttatttgaattatttttagttgtaaattaggaaggtattaattggtgtatgttttgtaagtgttgttagaattagagttattgggttggttgataggagtttagagggtagtttttttttttttttgagtttgtttttttagttattttttttaaaagttgttgggttgatgtttgtattttggttggttttgatgttagttttgatggggttattttggaatttgtttgtataggttgttgagggtgtgagaatttaagtagataatttttagttttattttttttgttgtgttaggttgttagtgttagttgaggaggtttttttttgtttttgtttgttttttttgattgttatgtaatgtttggtagtaggaggtaaatttttttttaatttttaggtttgttatagtgtatgaattttattgtggggagttatagtgattgagtttagtagttaggttttatgttgagtgttataaattaggtttattattagttttttttggtagatgttatagttaagaatttgtttattgtttgtgagatttagttgtttttgtatattgttaaattagggttgatagatttattggggatttaggggatttttatgatattttggttgggtgttgttaggaattttattttgagagagtaggaggtgatatagtttttggtaaggtattttagatttgagattttatagtttgatgtatggggagtagaattagggtatgattatttgtaggttatttggattttttggtatggtggttttttgtgtgtttggttgtatatgtaagaatttttaggggatttgttaaaaaatatatattttttaggtttatttttagagattttgatttggtaagtgttttttgggatatggaaattagtattttttattagattttaggtgattttgatgtaggtggtttttggattattttttgagaaatgttgttttgggattagttgtatttttgaagtgatgtttgtaaaatgaatgtttataaattgtgggttttttttttttatttttttttattatttggttgaagatgtgtttgtttggggaagaagatgtgggttttaagaattaatggtaattaaattgaagaataagataaatttttgattatgatatatttaaagggtaataataatgttaatagtaaggggaaaagttttgtagtaggatgttttgttgatatttaatgtgttatagggggagttttatttttgttttttattggttttgtttgtatgattaaggttgttatatgttttggttattttgggttagtttaagtttatgtaggttgttttagtgtaatttttaatagttttttttttgatttttgaaagttttagtttggatgatagttgttattttgttaataatttataggattgttttttttaagatttttattttttttttaaagggatttgttttatagttgtttttgaaggattttgttagattgattttagtagtggattttatattaaagtttattttgattttgggttgggatgaatggtaaaaggaattttttgattaggtaatttttttattttttttaggaaattttggtggggaaaaggaaggttttatgatttgaatagaagaaatagaatttggtggttagggaaagttttttttgggggtttattttttttgtgatttgaatagaagaaatagaatttggtggttagggaaaattttttttgggg

SEQ ID NO: 3742 - DNA, 2440 bp, Artificial Sequence
  chemically treated genomic DNA (Homo sapiens)
ttttagggaaggttttttttggttattaaattttgttttttttgtttaggttataggaagggtggatttttagggaaggttttttttggttattaaattttgttttttttgtttaggttataggattttttttttttttattgggattttttggaaagagtagggggattatttggttaaagagttttttttattatttattttagtttagagttagggtgaattttagtgtgaaatttattattgggattagtttgataaaattttttagagataattatagggtagatttttttggaagaaaagtggaggttttaagggaagtaattttatgggttattgatagagtaataattgttatttagattgggatttttgagagttgaagggggaattattagaagttgtattgggataatttgtataaatttggattgatttaggataattaggatatatgataattttggttatatagatagagttaatgagaaataaggatagagttttttttgtagtatgttaagtattagtaaaatattttattatgggatttttttttttgttattagtattattattgttttttaaatatgttatagttaaagatttgttttattttttagtttgattgttattgatttttgaagtttatatttttttttttaggtaaatatatttttagttaaatgatagaaggaaatggaaaaaaaagatttataatttataggtatttattttataggtattattttagggatatagttggttttaaagtagtattttttaaagggtggtttaggaattatttgtattagaattatttgggatttagtaaaaaatgttaatttttatgttttaaggaatatttattaaattagaatttttggggatggatttgggagatgtatattttttaataagttttttagaggtttttatgtgtatagttaggtatataagaggttattatattaggaaatttaggtagtttgtaggtgattatgttttgattttgttttttgtatattaggttgtgagattttaggtttgagatgttttgttaagggttgtgttattttttgtttttttagaataagatttttggtaatatttagttagagtgttatgaagattttttaaatttttggtggatttgttagttttggtttaatagtatgtagaggtggttgggttttgtaagtagtgggtaggtttttggttatggtatttgttaggagaagttggtaataggtttgatttatgatatttagtatgggatttggttgttgagtttaattattgtggttttttatggtggggtttatgtgttgtaatgggtttggaaattggagaggaatttattttttgttgttgaatattatataataattaagggaaataagtagaggtaggagggggtttttttagttggtattggtagtttggtatagtaaaggaggtaggattgggagttgtttgtttgggtttttatgtttttgatagtttgtgtaagtaggttttagggtggttttgttagagttggtattagagttagttaagatataagtattagtttagtaatttttagaagggatggttggggagataggtttagaggaggaaaagggttgttttttaaatttttgttagttagtttagtagttttaattttaatagtatttatagaatatgtattaattaatatttttttgatttgtaattgggaataatttaaataggatttgagattgatatttgtaatatgagaggttatggaataaaatgaagatgggtagggagaagagattgagattagtataggtttataggttatggtggggagtttggatatttttttaagtgttttggatagttgttgaaggatttttttttatttagattagttatttttttagaattgtttatagggttaaggaatatgtgatagatgattatgataattgagttttgatggatttgtaaggaatataagtttttatttatttattaaagtagatttaggtaggtgtatattttggtaattttgagatgaattgatgtattgtttaatatttattagtgggtgatgaaatttttattttgataaggtggttgggttttatagatatttttttattttaaatgaattataaagataagattttaagtattatttttagttgttgattttatgatttataaaatgtgttggtttagaaatttattaattattttttagtaaaagaattttattttttgattaaatattatatagaggtttaatgtatgaaatgtatttattattattgaaattaatgatttttttgttgtttgttattttgattagatgtatatttttgtttgttttttttattagtgtatttttagtatttaaagagtatttggtatgtagtggatatagtagtatttgtgtaat

SEQ ID NO: 3743 - DNA, 2476 bp, Artificial Sequence
  chemically treated genomic DNA (Homo sapiens)
ttaatttaaatttttattaagatggaaaatattattgttattttaatgtgtttttttatgtttttttttagtgaaattttaattttattgattttagaggtaattattgttttgatgttttttaatattgatttgtttttttttttttaaaattgtatataaatggaattatagaatatgtattttttttttgtaaaattttttttatttaatatagtatttttgagatttttttaagttttagtatatattaatagattattttttttattgttgagtagtgttttattgtatggatatattatagtttgtttatttgtttttttgttgatgtatttttaggttattttttatttttggttattatagataaagagattatgagtattttgtgatattttgttatatttatttattttgttttttggttattatgaataaagaggttatgagtattatattatatattagtatatttttttattttatgtaaatatttaggagtggaatgtgggttatagggtaggtataaatttatttttataaaaagttgttggatttttttttaatataggtgtagaaagagtttgttttttttagtaatattaattagatagtatgtgaatttggtataaagtaagtgtttaataaatatttgttaaattaatatatagagaaaataaatagaaatatagtgattgttttaatttttttttattgtttattagtgaagtgtgattgtttatgaattatttaagttttatgagtttttaatatttttttatgtgggaataataaaatgtgttttagatgtttgaaaaggttagtgttgaagggttaggggtatggggggagattttaggaggtgagggatattatttatttaatataagtgtgtttttttttttttttttgatttttttagtttgtaagattttggtttgtagttgttagggaatatgttaaagtttaggtttaggaggggttagggtaggtgaaaggggaagaggtatttggattaattattggttgtttttaaatgtttaaagttggtatttatatatttgattttttttatagttttttttttttagatttaatgtttaggtttttttgattttaaaattgggttatttgaatgttaaatttttgataattttttaatagaggtgtttattaatttgtgttaaattagagtttagtgtttttggaaatatatgtgatatttatatgaatattaaatgtttttattaggtatagtatttatatgatgaatattaaatgtagagtttaatgtagggatatagattttgttttgaggatttgttaatatatttttgtgtttttttagtggtattggttagttttgtttgttgtttatttttaggtgatgagatgtggtaattgtggtattggttgaaataaataaatggtattttaattattaagtttagagatggagtagtaaaggaggttatagttgattatttaggagttagtaaaaggatgtttatttagtatgtaagatgatttttaaatattttataaaaggtgataattttttttgattaaagaatatattatttataagtgattttaatgttttttttttttttttttttattgttatttttttgttttttatttttattgtatgttgtagtatttgtttagtgatgaagttttttgtaataaataatttataaagtaatttataagtatattatttttagtaataagataagatttggaagaaagtgttttattgatatatatatatatatatatatatgttttttggtttataagtagtaagttattagaatattaataattaaggtttatgggtttggggtgaagggtgttataagttatagtgttggagtttttatatataagttatgtaaagtgtttgaagtgtatttgtataataaataagagaaaatttattaaaaatagtttttttttttaatttttgtatatagttgttatggttttgtttatatggtgtgatattaagtgaagataatttttttttaatggttaattttttttgagtatatttattgagttaggtttagtgttaagagtttttaataaattgttttattttattttttttatttttatgagatatgttttattagtatttttgttattggataaagtaatagaggttgttttttagtttttaatatttagtttttgaatttttaatttagttaaagttatttatttaagtatttatttaatgttaatattttataggtatttgataagtatttgttattttttattttgggagttaggatgtatagatagatgatgtatttatagtagtattgtttaatagaaatataatgtaaattataaaggtaagttgtatataaaattttaattttttttttttaaaaaaaattagttttttggttaaattaaatttaattaaaaatttggttttggtttgttgtatagg

SEQ ID NO: 3744 - DNA, 2476 bp, Artificial Sequence
  chemically treated genomic DNA (Homo sapiens)
tttgtgtaatagattaaaattaaatttttggttaaatttaatttaattaaaaaattaattttttttaaaaaaggaaagttgaaattttatatgtagtttgtttttgtgatttatattgtatttttattaggtagtattgttatagatgtattatttgtttatgtattttagtttttagaataaagaatgatagatgtttattaaatgtttgtaggatattagtattgaatgaatatttgagtgagtgattttaattggattgggaatttaaagattgaatgttgaagattgggaggtagtttttgttattttgtttagtaataggaatattaataaaatatattttatagagatagggaagataaaataagataatttattgagaatttttaatattgggtttggtttaatggatgtatttaagagaagttagttattaagggaaaattgtttttatttagtattatgttatgtggataaagttatggtagttgtgtataaggattaagagaaaaggttgtttttagtgagtttttttttatttattatgtaaatatattttagatattttatatggtttatgtataagggttttagtattatggtttataatattttttattttaagtttatggattttagttattggtgttttgatagtttgttatttataagttaaggggtgtgtgtgtgtgtgtgtgtgtgtattagtaaaatatttttttttaggttttattttattgttaagaataatgtatttgtaaattgttttataaattatttattatgaggggttttattattgaataagtgttataatatatagtgaaaatggggggtaggaggatggtagtgaaggagggagagaagaaggtattggaattatttataaataatatattttttggttaaagaaagttattgttttttatgaagtgtttggaagttgttttgtatattaagtgggtatttttttgttgatttttgagtgattagttatagttttttttgttgttttatttttgaatttggtgattaggatgttatttatttattttagttaatgttataattgttatattttattatttggaaataaatagtaaatagggttgattggtattgttgaggaaatgtaaagatgtgttggtaagtttttgaagtgaaatttgtgtttttgtgttgggttttgtatttggtatttattatgtaagtgttgtgtttaatgaaggtatttggtatttatgtgggtgttatatgtatttttagggatgttgggttttaatttagtataggttaatggatatttttattaaagggttattgaaagtttgatatttaaataatttagttttaaaattagagaaatttagatgttaaatttgaaggagagaaattgtgagagaagttaagtatataaatgttaattttagatatttgagagtaattaatggttgatttaagtgttttttttttttttatttattttgattttttttgggtttaggttttggtatattttttgatagttgtaggttgaaattttgtagattggggaggttagggagagaaggaagggtatgtttgtattaaatgaatggtgttttttattttttaaaatttttttttatgtttttggttttttagtattaatttttttaggtatttaaggtatattttattatttttatataaaaggatattgaaggtttatggaatttaaatgatttgtaaatagttatattttattagtaaatagtaggaaaggattagaatagttattatatttttatttattttttttgtgtattaatttaataaatatttattaagtatttattttgtgttaaatttatatattatttggttgatgttattaaagaaaatagattttttttatatttatgttgaagaaaggtttagtagttttttataaaaataagtttatatttattttatgatttatattttatttttaggtatttatataagataaaagaatatattaatatgtaatataatgtttatggtttttttatttatggtagttaaaaaataagataaatgaatgtaatagaatgttatagaatgtttataatttttttatttataatagttaaaaatagaaaatagtttagggatgtattaatagaggaataaataaataaattgtggtatatttatataatggaatattatttagtaataaaaggaatgatttattgatatatgttgagatttggaagaattttaaaaatattatgttgagtgaaagaagttttataaaaaaggaatgtatgttttataattttatttatatataattttagaaaaggaaaaataaattgatgttgaaaaatattaaaatagtagttgtttttggggttagtggagttggagttttattaagaaagggtataagaaaatgtattggagtgataataatgttttttattttgataggggtttgggttag

SEQ ID NO: 3745 - DNA, 2497 bp, Artificial Sequence
  chemically treated genomic DNA (Homo sapiens)
tttggtagaagtgtaggtattttgtaattttagtagtttttattttatttgttgtttaggtttgttagttaattggtatgttttagtagggtgaattggttttgtatgtttgaagtttttttgtaataattggtaaataatttttgttttgagtttttgttaaattttttgttaatatttttgtttttttagtttttttttaggatttttagattttttattatttaggaatttaaaagaaaatatttggtaaagttagattttgtaagagttgattttaaatgtataaatgattttagtttttatttgttagtgtttgggttttattagttgttggaattttgtgaaatatttgtattatttattatatttaaaggaagtaatttaattttttaattgggtttttttagttttttttattagatttgaggtaaggggattatattttttatttatttttttttggaatggtagtaggaaaaatattttaatatatttttttaaagaaattttttttttaatttagtattttaatttttttatattttttatgtggtttttgaattttatatattgagggtttgtattaaatgtttatttattgaaattattgttgataattaatttttatatattatatatatatatatatattatatatatatatatatttaaatgtgtttggttataagaattttttatgtagtagattattgaattatagattttttagtattggtatttggaaaaggtttaaatttgaaggtagagaaaattaatagtttaaggtttttaatttaaagatagattttattaattttaggttggttgttttgtatagttttgtaatgttttttttatatgtgagtttggtttgtttgttttttttgtttttatatttttagttttttggttggtttttttagggataatttttagtgtttgtttgatttgtgttataaagtagatatgaatagttaggttagagagttatgtattaattttttgggtggttaattttttttttttatattttagtgttattttaagggaaaagaaatgtaggatatggaataaatagagggaaatttgtttgatttgttgttaatgtgttagtgttttgttttgtgggtttaatttgtagaaggtaggtttttgttttgttattttttggtatttaatagggtttgtttttagtgatttagttgggtttttttagatagaaaatagttatttagtgttttttatattattaagaaaatgagattattttttgaggagattagtagtttttggttgttgttgaaagggtgttttgtttgtttgtttggttgaaaggtattatgtagtttaggtttgtttaaaattagtttttttataaattatttgtataatgaagtgtttgtttttgttttttgatatatttgtgtttttgtttatttttaatgatgatatggttttttttgtttttatttggttttttattttttatatttttaagtattaatttttgtggtaaaagtataaaatttaagaaattgtagggaagaaagagttttttttttattagtatataaatgtagtggggaaattgagttagttttgggggtatttttggaggaaattgttttttttttaattttgttagattataatattttgaaattgtattttttgaaagagtaagagggtgatggtaatattttgtaatttgataggggtttgtgttatatatgtgtatgtgtttgtaaaatttaataaatgtatatgtattttatatgtaagtttttatataaagaaaaaagtaaattaataatgaattttaataatatttatatagaattatttaagaagaagtatattagtttttttaatttattttgaaatgtatttaaaattgtgataaattaattgatggatagatggatagatgtgataaaataagtagaaaaaaaatgttaaaggtaaaatatagatggtaggtataagtttgttttttgtaaaattattttaattttgttgtaagtttgaatatttttataataaattattagaataaatgtttttttggtgatttatattgaatttttggaaatattagagagttatagtttttaaaattttgtattttatttaaattttatttttaaaaatttatatttatatagagttaaattgtaataatttatgataataaggaaaatagtatttttgatttagtaaaaagtataaaatatagaatattttaagagagagggaaattttattagttagatatataagaattttttttaatttaaatggtatgtaattagaagtttttaatgtagttttttaatttaatatataaaatataaatgaagaatagtaaagggtatataatgattaaaatttatataggatgaatttaaatgggtttggggtgagaaagtttaattttagtgaatttatagttattgttgaaataaataaataaataaatgaatatttagaaaag

SEQ ID NO: 3746 - DNA, 2497 bp, Artificial Sequence
  chemically treated genomic DNA (Homo sapiens)
tttttttgggtatttgtttgtttgtttgtttgttttaatagtaattgtgggtttattaaggttggatttttttattttaggtttatttgaatttattttatgtgggttttggttattgtatgttttttattgttttttatttgtgttttatatattggattagagagttgtattaagaatttttagttatatgttatttaaattgaagaaggtttttatgtgtttaattaataaaattttttttttttttagaatattttgtattttgtattttttattgggttaaggatattgttttttttgttgttataaattattgtaatttaattttatataaatatagatttttaaaaataaaatttgggtggaatataggattttagaagttgtggttttttgatgtttttaaggatttagtgtgggttattaagagagtatttattttaataatttattgtaaaaatatttaaatttgtagtaaagttgaagtaattttgtagggaatagatttgtatttattatttatattttgtttttaatattttttttttatttgttttattatgtttgtttatttatttattaattaatttattatagttttggatgtattttaaagtaaattgagaaaattagtatatttttttttaaatagttttgtataaatattattagagtttattattagtttatttttttttttatgtaaaaatttatatgtaaggtatatatatatttattgagttttgtaaatatatatatgtgtgtaatatagatttttattaagttatagaatattgttattatttttttatttttttaaaaagtataattttaggatattataatttgataaagttagaaaggaggtaattttttttagaaatatttttaaggttaatttagtttttttattatatttatgtgttggtagaaaaggaatttttttttttttgtagttttttagattttgtatttttgttatagaagttagtgtttgggagtgtggagagtaaagagttaaatggaaatagaaaaagttatgttattattaaaaataaatagagatataaatatgttagagggtagaggtagatattttattgtgtaagtgatttatgaggaagttaattttaaataagtttgggttgtgtggtgttttttagttaaataaataggtaaagtgtttttttgatagtagttgagagttgttgatttttttaaggaataattttatttttttggtggtgtaaaaggtattaagtggttgttttttgtttaaggaaatttggttgagttattgaaggtaggttttgttaaatgttagagagtaataagataaagatttgttttttataagttaaatttataaaataaaatattgatatattaataataaattaagtaggtttttttttgtttattttatgttttatatttttttttttttaaaatggtattaggatatgagagagagggattggttatttaggaaattagtatatggttttttggtttggttatttatgtttgttttgtaatatagattaggtaggtattgagagttatttttgggggagttagttaaggaattgagaatgtagaaataggagaggtaagtgggttaggtttatatgtggaggagatattgtaaagttgtataaggtagttagtttaggattagtagaatttatttttagattggaggttttaggttattagttttttttgtttttaggtttgagttttttttaaatgttaatgttgaaaaatttgtagtttaatagtttgttgtatgggaaatttttatagttaagtatatttaggtgtgtgtgtgtgtgtggtgtgtgtgtgtgtgtgtggtgtgtagggattgattgttagtagtaattttagtgaatgaatatttaatatggatttttaatatataaggtttaaaagttatatgaaaggtataaaaagattgaggtgttagattaaagagagaatttttttgggaaaatgtgttggagtattttttttattgttattttaagaaggggtgggtaggggatgtggtttttttgttttaagtttagtgagagaggttggaaaaatttaattagggagttagattgttttttttggatgtaatgaatagtgtggatgttttatagggttttaataattagtgaggtttgagtattgataaatgagaattgaaattatttgtgtatttggagttagtttttgtagggtttggttttgttaagtatttttttttaggtttttgaatagtgggaggtttggaggttttgggaagaggttgaggaggtaagggtattggtagaggatttgatgggagtttagagtagaagttatttattaattgttataagaggattttaaatatgtaaagttagtttgttttattagggtatattagttaattagtagatttgaatagtggatggagtaggggttgttggggttatagagtatttgtatttttgttaag

SEQ ID NO: 3747 - DNA, 2396 bp, Artificial Sequence
  chemically treated genomic DNA (Homo sapiens)
tttttttttttggttttattttggttttttttttattatttaaattttttattttgaataaagtagtaaaatgtatttttttttttatgtggtttagtataaggataggtttggatttttataatgaaagtttatgtttttaataagtgtttatagttagtgttttttgtatttatttaattgttgttttttgaaagttattattttttattttttgtgattaatgtgtattgggagttaaatttatatgtgtgtgtaggattttatttttaaagatatgttttattattgtttattgatagggtttttaattttaagttaggatttatgtatgttagaggttgtggtgagttatgagtattgtgtttatttatgtatgggtataaatttttatggttttttttttttgtatagtttgagatatagggtggatatgtagtaatttaggtttttatagtgggttttagatttatttttgttaggatatagatattgtagagagatttttttattgtttattttttttattagtttgagttttttatttttagattttttttgtagttttttaatattttgaataatattatgtggtagatatggtttattttattttatagatgtggaaattgaggttaaatgtttatttaaaattatatagagattaaatgttttaattataataggatttaagtttttttggtttttaagttttatgttttttttataattttttagttaatatatttagtttaaataaagaatagattaattgattaatttaaatttttaaatttatttttgtattagtgttttggaggattaaggttatatttatagagtatagagtaaaaaaggagaattagtaaatatttagagtatttggtaagtattttagatatttaagttagaagatttaggagtgaaagagaatttttattattataattgttattataattgttaaaataaataaaattaattaaggatatgtagttgtatttgtatttaagtaagattgtagtagtttttaattaattaatatgtttattagtatgaagtaattgtgttttgtttgtgattggtattttatttttatttattaaatatttattgggtattagtgatgtgttaagttttgtgttggaatttgagatgatatagatgattgatgtggtttttgtttttgggaagtatgtagtttaggaaagttatagaatgtagtttttaagaagaagttattggagtaagtagatgaaggttgggaaattatgtaagtttagggtagattagttaaattgtaatgggaatgtagttagttatttattttgaggttttaaagtggaataaaagggattgtaatagtttagattttttttttttttttttagggataggagtagttattatttaaatttttttgtgatgattagttgttttagttagttaaggttgttataataaattattattgattggatgatttaaataaaaatatttatattttatagttttggaaattgggaagtttaagattaaggtattggtagatttggtgtttgataagggtagttttttggtttgtagatggttgttttttagttgtgtttttatatggttagagtatttttaagtttttttataggtattaattatattttttaaaggttttattttttaatagaatgatattgggggttagattttaatatatgatatttgggaggatgtaaatttttagtttatagtatgagtagtttttatgtataggaggttaattatgatattttatgtgtttgttatttgagttttatattttttttttatgttagagtgggttattttatgttattttatttatttttgatgtttttttttagttgaatagaattttttttttatttaaggaatatgtattgttttgttaaataagggaggtttttttatttagggtaaagtataatagtattttagttaggatttgggggatttaggtatggattatttggaggttagatgggttgatagttaattggtattagatattgttattttttattaatagtttaggtatttgggagtttgtttattttagggtaagtttattgatttattttttaatttatagaaatttgaatttaaaagattggtagtaatatgtgatgtttatatttaggaattttagttttggtgtattgggggtttttgtttgttttttggttttagaaggtattttaagggtttatgtaaattaagttttttatagttattttagagatgttagggtgttttagatgggtatattagtgatattatgttatttgatgtttggatttttttagataattgttttgttagtgaataatttattggatttagttattgagatattgggg

SEQ ID NO: 3748 - DNA, 2396 bp, Artificial Sequence
  chemically treated genomic DNA (Homo sapiens)
ttttagtgttttaatggttgaatttagtgaattatttgttagtaaagtagttgtttgggagggtttaagtattagatggtatggtgttattggtgtgtttatttggggtattttggtatttttggggtggttgtaaggaatttaatttgtatgagtttttgagatgttttttaggattaaaaggtaagtaggggtttttagtgtattaaaattaaaatttttgaatatgggtattatatgttattgttaattttttagatttaggtttttgtagattaaaaaataaattaatggatttgttttgaggtgggtaagtttttagatgtttgggttgttaatgggaagtgatagtgtttggtattagttggttgttagtttatttagtttttaaatgatttatgtttgagttttttaaattttagttaggatgttgttatattttgttttaagtgagaaagttttttttgtttgatagggtaatgtgtattttttgggtgggaaggggattttgtttaattaagggagagtattagggatgaataaggtagtataaagtgatttattttggtatggaggagagatgtgaggtttaaatggtaggtatatgaagtattatgattagttttttgtgtatgaagattgtttatgttatgggttgaaagtttgtgtttttttaaatattatatgttgaagtttagtttttagtgttattttattaagaggtggggtttttgggaggtgtgattagtgtttataagaagatttgagagtgttttagttatatgaagatataattagaggataattatttgtaaattaggagattgtttttattaaatattagatttattagtgttttgattttgaattttttagtttttagaattgtgagatataaatgtttttgtttaaattatttagttaatgatgatttgttatagtagttttagttgattaagatagttagttattatagaaagatttgaatggtggttatttttgtttttgaggagggaaaggggaaatttaagttgttgtagttttttttattttgttttagggttttagagtgagtagttagttgtatttttattgtagtttggttggtttgttttaggtttgtatgattttttaatttttatttgtttgttttagtggtttttttttgggagttgtattttatgatttttttggattgtatgttttttaagggtggggattatgttagttatttgtgttattttgagttttagtatagggtttggtatattattggtatttaataaatatttgatgaataaaaatgaggtgttgattataggtaagatataattgttttatgttaatagatatgttgattggttaagaattgttatagttttgtttgggtgtagatatagttatatgtttttggttaattttatttgttttggtaattatgataataattatgataataagaatttttttttatttttaaattttttggtttgaatgtttaagatatttgttaaatgttttgggtatttgttagttttttttttttgttttgtattttgtggatatggttttgattttttagagtattggtgtagaagtgagtttgggagtttaaattagttagttaatttgttttttatttggattagatatattaattgggggattgtgagaagaatatgaaatttggggattaaagagatttgagttttattatgattaaggtatttagtttttgtgtaattttgagtaaatatttaattttagtttttatatttgtaaaatggaataaattatatttgttatatagtattgtttagaatattaaggaattataggaaagatttggagatagagagtttaggttgatgagggagatagataataaaaaaatttttttataatatttgtattttggtaggggtgagtttgaggtttgttgtaggagtttgaattattgtgtatttattttgtgttttagattgtgtaggggagagaggttatggaggtttatgtttatgtatgagtaaatgtaatgtttgtggtttgttatagtttttggtatgtgtgggttttggtttggggttgagagttttgttaatggatgatgatgaaatatgtttttggaagtagggttttgtatatatgtgtgaatttagtttttagtgtatattagttataggaaatagaaaatgatagtttttaggaggtaatagttaaatggatgtagagggtattggttgtggatatttgttagaaatatgaatttttattgtagggatttaaatttgtttttatattaaattgtatgagaaggggggtatattttgttattttgtttagggtggaggatttaaatggtaagagaggggttaaggtgaggttaggaagggagg

SEQ ID NO: 3749 - DNA, 2391 bp, Artificial Sequence
  chemically treated genomic DNA (Homo sapiens)
taaaaaggtaatatataaaataattaagtatagtatgttagaggaaggtatttgttatagaaatagattatagtaagggagttagggagtattggggtggggagggtttattatttggataaggtagttaggaaaggtgtttgttaaagtgatattttaatagtgatttataggaagaaaggaagtaaattatgtagattatttgaaggaagagagttttaggaaaagggaatagtaagtttaaaggttttgaggttggagtgtgtttggtgtgtttaaagaagagtaaggagattaatatggttagagtagtatgagaaggttagaaagagttaggtaatgtagagataggtaatgtagttagagagaggatattgtgagattatgtggggttttataaagttattgaaaagattttagtttttattttgagtgagatagggaagaattatagttttgagtagaatgttgttatttgattgatatttttataaagtattttgtgatttagttgagaatagattgtagagtagatggaggataaaggagaaagttaggaggttagagaggatagtgatgtgataatataggggagagatgtgggtggtatgagttttggtgatgaaggtggtgaaaagtgattggattttggatatagtttgaaagtgaagtttataggatttataggtatggttgtaaataatgtgaagtgttatagagaaaaagtatagggatattgtgtattattggtgagtagaggttgtttttttaagaaagtgattttggggttaaaatttgagatttaagtaggagttaatttgataaagattttatagattttttgtttagttatttgtagttttttgataatgagaggaggggagggaatggaatgggagaggaagaggttgtttttttttgggaaaggggaaaattttgttataaaaagttggaaatagtttaaagagttatgttttgttagatatgtatttgtaatttaaatagttttgtttttatgggtttgtttgttatagattagttagtgggtagattgttttggttggaaatggagatttagataatgttagagtggataatggtgtttgaatgttgttaggtgttaattaggatttggtaatgattttgttgtgtagattgaagtgtgagtatttggagttattatttaaggtttgtttttgtaattagatgattgtataattttaatatgattaattttgttggatgtgaattgtgtagttgtaattataaaataaggtggtatttttgtttttttgttgaatataaatattatatatgtgtaagttataattttataatggttgtttttggtaagaaagagttttgttagttagaagatgtagttgaggggaaaaaatatatatatatgtaatataagtgtttaaagaggtggttataatgttaggttttgttttgggaaatattgttttgtgggttttgtatttttttttttttttttttgtatatattaattttgaggttaggaagttgggaaatttggagtttatattgagtttttttgggataatatagttttgtatttgtatatgtattatgttgagagttatagggaattagtttgatatttattagtaattgtatattatattttgtttattaagttttattgtttagtggggatgtgagttatgatttaggttttttagatttgagatttttgtagaaattttagtttgttttttaaggtttggtttgagggattatagggatatagtttttaaatgttttttttattttataggtttagggtgtgttggaggggatgagatggatgaggggattaatgttgagaatgttaagattttttttttgattttggtttaatttgtagggggtatagaattttgagaaaggaaaaaaaatttagaggttaagagttgttttgttatgggttgtagtttaattttgggaaaggagagagagagaaagagatggagatggggtgggaagaagggagtaaggagatatatttaagaatagtgtagtgtgatgggatgtttagagatgaaatttagtggttaaataagtgaatgtttaagattaggtgagagtgtgtgtgtgtgtgtgtgtgtgtgtgtgtgtgtgttagagaaaaagaaagagaggaagtgggagaaggagggggagagagagagagagagagtatttattaatagtatttgattaagattgtaattttatggttgtaattaatgataaagttaagtgttgaaggtttagtttttgaggagatagattttgagatatagatttgaatataagtttattggggagtgtttttgggtttatatttatagggaaaggtagtaggaatgggtagagggagagata

SEQ ID NO: 3750 - DNA, 2391 bp, Artificial Sequence
  chemically treated genomic DNA (Homo sapiens)
tgtttttttttttgtttatttttgttgtttttttttgtagatgtggatttaagagtattttttgataaatttgtatttaaatttgtattttagggtttgtttttttgagaattaagtttttgatatttgattttgttattagttgtagttatgaaattatagttttggttagatgttattggtaaatatttttttttttttttttttttttttttttttttattttttttttttttttttttttgatatatatatatatatatatatatatatatatatgtttttatttaattttaggtatttatttatttggttattaggttttatttttggatattttattatattgtgttatttttaaatgtatttttttgtttttttttttttattttatttttgtttttttttttttttttttttttttaagattaagttatgatttataataaaataatttttaatttttaggttttttttttttttttagagttttgtgttttttgtaaattgggttagagttagaagagaaattttgatatttttagtattggtttttttatttgttttattttttttgatgtattttgagtttgtgaggtggaaagggtatttgagggttgtgtttttgtagttttttaagttgggttttggggggtgggttaagatttttgtaaggattttgaatttgaagagtttaagttgtagtttatgtttttattgaataatgaggtttgatgaatggggtgtgatgtgtaattgttgatgaatattaagttgattttttatgatttttaatgtggtgtatgtgtgagtgtaaagttgtgttgttttgggagggtttaatatgagttttaagttttttaattttttggttttaaaattgatgtgtataaaggaaaaaaggagaagatgtaaaatttgtaaagtaatattttttaaggtgaagtttgatattatgattgtttttttaagtatttgtattgtatatatatatattttttttttttaattgtattttttgattgataaagtttttttttgttaaaagtgattgttataaaattatgatttgtgtatatataatgtttgtgtttaataagaaaatagaaatgttattttattttgtggttatagttgtataatttatatttggtaagattgattatattaaggttatgtaattatttaattgtagagataagttttgagtaataattttaaatgtttgtattttaatttgtatagtagagttattgttgagttttgattagtgtttgatagtgtttgggtattattatttattttggtattgtttaaatttttatttttagttgaagtaatttatttattaattgatttatgataaataggtttataagagtaaagttgtttgggttgtagatatatatttaataaaatatgattttttgggttgtttttagttttttgtagtaaagttttttttttttttaggagaaggtagttttttttttttttattttgtttttttttttttttttattgttaggaggttgtagatgattagatagggaatttgtaaaatttttattaaattaatttttatttggattttagattttggttttaaggttgtttttttagaaaagtagtttttatttattagtgatatatagtatttttgtgttttttttttgtaatattttatattgtttgtaattatgtttgtaagttttatgggttttatttttaaattatatttagaatttaattattttttattatttttattattagggtttatgttatttatgttttttttttgtattattatattattgttttttttggttttttagtttttttttttgttttttatttattttataatttatttttaattgagttataaagtattttgtaaaaatgttaattagataatagtattttatttaaaattgtaatttttttttgttttgtttagagtaaaagttaaagtttttttaatggttttataaggttttatatgattttatagtattttttttttggttgtattgtttatttttgtattgtttagttttttttaatttttttatgttattttagttatgttagtttttttgtttttttttgaatatgttagatatattttggttttagggtttttggatttgttgttttttttttttggagttttttttttttagataatttatatggtttgttttttttttttttatgggttattgttgaaatgttattttagtagatattttttttggttattttatttaaatggtaaattttttttattttagtattttttggtttttttattgtgatttgtttttatagtagatatttttttttaatatattgtatttagttattttgtgtattgtttttttg

SEQ ID NO: 3751 - DNA, 2470 bp, Artificial Sequence
  chemically treated genomic DNA (Homo sapiens)
aaatttggtgagttttttgattttattatttttatttttattatgttgttatttttatttttagaaattattataatttgtatattttatttagttagttgtgtattttataggttttgttgttgttgttttgtattgttttatattttttttttgtttttttttttttagaatgaatattttatgaggttaggaattgtttgttttttttatttttgtagttttagtattagtatagtatttgataataaaatttagtagataaaagtaaagagtttgggttaggttttttgggtttgaattttagagttggtgttatttaattgtagagagataatttggataatatagtgttttagtttttttttttgtaaatggggttaataatagtagtgattttatggttgggtgtagtggtttatatttgtaattttagtattttgggaggttgagataggtggattatttgagttttagattagttggttaatatggtgaaattttatttttattaaaaatataaaaattagttaggtgtggtggtaagtgtatgtaattttagttatttgggaggttgaggtaggagaagtagtagaatttgtaaggtggaggttgtagtgagttaaaataatgttattgtattttggtttgggtaataaaagtgaaattttgttttaaaaaaaaaaaagtagtaattttattaggaggattaaatggtattatgggtaaagtatttaagaatagtgttggaatataggaagtgttatataagggtttgttttatatgtagatataggtagatgtagttagagataaaatggtaggtgtttaagaaatatttgttaaattaatatgttaagtttaggaatgggataaagttttaattggggtagagttttagatagggataatgatatttttaagggtaagttttttgatttgaatagagaaaaatttggaaagtttggaagttagaggtagttgggaagggtagttgtaagtaaaggtttggtggggtggggtaggggttataagagattttttatggaatttttatttggaatagttagattgagtattaatatatattgaatagttaaattatatattattgatttgttaaatgtatttgtatataaataagtatgattatttatggaggtttgagtagtggtatttttttttagtgttatgattatagatggatggttttagttagatatgaattagggatgttgttatttttgttgtaaagttagtggttgatttaaaattatatttattggagtatgtaagtgtgatagtttagtggtgagtttgggataattagtttaaaagataagataaatgatttttaaaattggtattgtgatgaagattttattttatttttttgttatagttagtttagttttgatgttaaaaatatagttgaagataattaattaggaaatgttaataggtaggattatgttttaattgtattttttagaggattttagaattttatatttaagttgattgtgtttttttttttttggtgattaggtaggagaggtggatttttagttagaagtagaggttgggtggggtgggtagataggtttagataaggtttttaaggttaggtaagtaggtggttttagttagttttttttgagtttgaattgagatggatttgttgggtgaagtatgttgatttgggtaaattatatttgttatgttaatttattttatgtgggagattagttatgagtttagaggttggtattggttgtttttgatggattaagggatttagttgtttagatataatgttagagatttgttattgtgggggaaatatggtttgttaatgttttattttaattgttttaaattatatttgaagatgtatagtttaggaggttagttagtaaatattaaatgttattttgaggatttgtttggtttagagaggaatttgtagttttaggattggggttttattgttttgttgatatagaagagagagttattgttttttggttttattatttgtttttttgtttttaaggaaggggtagagaatgttttgagatttttgatgtattttatttataggtttgagggttttttttttgagagttaagtttaatggatttagatagaaagaggggggtgggtttttggagtttgtttgaggtaattaaagaagaatttaaaaggaaggtagtatagtagaggaagttatggtagaagatgtttttgttttaatttttaaaattgtatatgataaaggggattttgtagatatgattaaagatattgagatggggggagtgagtgagagtgattgtaatgttattgtaaggtttttagaagagggttagggagagagatgaaaatgttattagttagttggtattgaagatggtattgaaggtgtaggtgggttttagaagttggaaaaggtaagaaaataaagggt

SEQ ID NO: 3752 - DNA, 2470 bp, Artificial Sequence
  chemically treated genomic DNA (Homo sapiens)
attttttgtttttttgttttttttagtttttggagtttatttgtatttttagtgttatttttaatgttagttgattaatagtatttttatttttttttttggtttttttttaaggattttgtaatgatattgtaattatttttatttattttttttattttaatatttttaattatatttatagagttttttttgttatgtatggttttggggattaggatgaggatattttttgttatggttttttttgttgtgttgttttttttttagatttttttttgattgttttaaataaattttaaaggtttatttttttttttttgtttaggtttattagatttaatttttagagaaggaatttttaaatttatggataggatgtgttagaggttttagggtattttttattttttttttgggagtagggaggtaggtggtgaaattaaaaggtagtggtttttttttttgtattagtaaagtggtgaggttttagttttaggattgtagatttttttttaggttaagtagatttttaaggtaatgtttgatatttgttggttggttttttgggttgtgtatttttaagtgtaatttaggataattaaaataaagtattagtaagttgtgttttttttgtaatgataagtttttagtattgtgtttgagtagttgggttttttgatttattagaggtagttgatgttagtttttgagtttatggttgattttttatgtggaatgaattaatatggtagatataatttatttgggttaatgtgttttatttagtagatttattttggtttaggtttggggaaggttgattggagttatttgtttgtttggttttagagattttgtttgggtttgtttgtttattttatttagtttttgtttttagttaagaatttgttttttttgtttaattattagggggaggggaatataattaatttgggtgtaaaattttaaagttttttggaaaatgtaattggaatataattttgtttgttaatattttttagttaattatttttggttgtatttttggtattagggttgagttggttgtggtgggggggtagggtgggatttttgttataatattagttttaggagttgtttattttgttttttagattaattattttaaatttattattaggttgttatatttatatgttttaataaatgtagttttaaattagttgttgattttgtggtaggggtagtagtgtttttggtttgtgtttaattagggttatttatttgtaattatggtattgaggggaggtgttattgtttgggtttttatgaatgattatgtttatttatatgtaaatatgtttgataaattaataatgtatgatttagttgtttagtgtgtgttagtatttggtttggttattttaggtgggggttttatggagggttttttgtggtttttgttttattttattaggtttttgtttatagttgttttttttagttgtttttggtttttaagttttttaagtttttttttgtttagattaaggaatttatttttgggagtgttattgtttttatttgaggttttgttttagttaggattttgttttgtttttagatttagtatattaatttggtaaatattttttgaatatttattattttatttttagttatatttatttatatttatgtataaaataaatttttatatagtattttttatgttttagtattgtttttgagtgttttatttatagtattatttaatttttttaatgagattgttatttttttttttttgagatagaattttatttttgttgtttaagttggagtgtaatggtgttattttggtttattgtaatttttgttttgtaggttttattgttttttttgttttagttttttgagtaattgggattatatgtgtttgttattatatttggttaatttttgtatttttagtagagatggggttttattatgttggttagttggtttggaatttaagtgatttatttgttttggttttttaaagtgttgggattataggtgtgagttattgtgtttagttatgggattgttattattattggttttatttatagaggggaaaattgagatattgtgttgtttaaattgtttttttatagttagatagtattagttttgggatttagatttaggaagtttggtttagattttttgtttttatttgttgggttttattgttaagtgttgtgttggtgttggagttatagaagtaaagaaggtaggtagtttttgattttatagagtgtttattttgggggaaaaagagtaagaagaaaatataaagtaatataaaataataataataaaatttataaagtatataattagttaaataaaatatataagttgtaataatttttaggaatgaaaatgatagtatgatgggaatgagaatggtggagttagaaaatttattgggttt

SEQ ID NO: 3753 - DNA, 2493 bp, Artificial Sequence
  chemically treated genomic DNA (Homo sapiens)
agttttgttttgttttttaggttggagtgtggtggtgtgattttggtttaatgtaatttttgtattttgggtttaagtaatttttttgttttagttttttgagtagttgggattataggtatgtattattaggtttggtttttttttttttttttttttttttttttagtagagatggggtgttattatgttggttgggttggttttgaatttttgattttgtgatttgtttgttttggttttttaaagtgttgtgattataagtgtaagtttgatgtttttaagaaatagtaaagagatttgtttggtaaggtttgaagtgaggatggttgtttggaagagggttagtttggtaggttatagtaaggtttttagagtttattttaagataaaaagttattggagggttttaagtagaggattaatatgatttgaattttttaaaggattgtaaagagaaatataagtttttatttataaaataaagatgtattttttataatttagttataagttaaagaaaaaaagtatagaataaaagttgtgtagtatgatagtatttttgtaagaaaaaatatgtatatatgggaataaggttaaaaggtttaatattaaattgtgatttattatggtttgtgggattatggggttttttttgttttgttttgtttgtaatgtttttttttgttttttaagttttttgttttaaatatgaattattttggtaatttttaatgttatttttaaaaagaaaaaagtattttattatgagattttttttgtttgaaattttattttaatatgaaaaaaaaaaaaataaatttaaaattaaaaattaaaataatatggggaatatttttttttaaaaattattatattttttatgtaatgtttgtttgttatgaattattgtataaattaagttttgtttaatgtattaaggttataaaattaatttggttaatatgttgattattatatagtggttttgttttttatagtaattttgatattatttttttaaggtagtaatagaagggttttttttatttattttttatgtgtttttgatattattttgtgtttttggatttttttattgtatgttttttagaaataaattaagtttgaataagttgttttagttaatgaagtgtgtttttggttttttttttgtggtttagaattatttggtaaaatattaattgttttaggatgtatttttttttagttttgaaatattgtaatattaagttattataaataaagagtattgagataataatatataagaatgtgtataaatggaaattattgtaatttttttttaaattaaggatgtgtggatgttttatgaataaatatttaggatatttggataaatatatattatgtgtttatatagataaaaatagaaaggagtatttttttttattttatttttttattttaagttatataagttttttgtagggtataagtttagggtaattattgtttagaaatgtaaattatgtaatttaaaatgatttaagtttttaaatattttttatttaagttttatattttatttattttttaattatttttaataggtttttttgaatgaaaattttaaattgggaaggtttaataagttttaaattttatttatatgttatttagggaatttgaggatttggggtttatgtgtagtgtttttgtgtgggtagataagggttttaagatttagggtgttattgtattttgagtggtttgagttttggttttgttgtttttattggttgagttgatgttttttatattgggggtatgggttgttatattttagtagagtgtaagggtttttgggtgtggatgtaggtggtttttgggtgtatatgtggaatgtatatttgggtatgtatttttatatggttaggtgggtttgtgtgaatgtttttgttttttttttattatttttttttgtgttttttatgatggtggtatgtggggttattttgatttttaggatttttggatgtttgtttttggagtttggggggtgatgatagatggtggagggtggggttttggggggaaggggtggagttttttagtatgggggtgttggtggttgatagaaagattaggggtagttggtgggagggggttgattgagattgtgggttggttgtgggttaggtgtggtgggaaggagtttgtgtagatatagggtttgataggtagagagagatatagatattggggattgatagttgtgggggtatgtggggttggttggttgtggtgggtgtttatttggtagtggtggtggtggtggtgtttgtgattgggttgttttttttgtgttgtgggtttttttttttgtggttgggtgggtggttggtgtaggttttgtagaggtggtggtggtggtgatgttggagttgtggattgttgagtggtggggatgtagttgtattaattgattttgggttgtttggttgggtt

SEQ ID NO: 3754 - DNA, 2493 bp, Artificial Sequence
  chemically treated genomic DNA (Homo sapiens)
agtttagttgagtggtttggagttggttggtgtagttgtgtttttgttgtttagtagtttgtggttttggtgttgttgttgttgttgtttttgtggggtttgtgttggttgtttgtttggttgtggggagggaggtttgtagtgtgggaagagtggtttggttgtgggtgttgttattgttgttgttgttaggtgagtgtttgttatggttagttggttttgtgtgtttttgtggttgttagtttttggtgtttgtatttttttttgtttgttagattttgtgtttgtgtgagtttttttttgttatgtttggtttgtggttggtttgtagttttagttagtttttttttgttggttgtttttggtttttttgttagttgttagtatttttatgttgagaggttttgttttttttttttggagttttgttttttgttatttgttattattttttgggttttaggagtgggtgtttaggggttttaggggttagggtagttttgtgtgttattattgtagaaggtgtaaaagggggtggtagaggggaagtgggggtgtttgtgtaggtttgtttgattgtgtgagagtgtatgtttgagtgtgtgttttgtgtgtgtatttgagagttgtttgtgtttatgtttgagggtttttgtattttgttgggatgtggtagtttatgtttttggtgtaaagagtgttagtttgattagtgaaggtggtagagttaggatttgaattatttggggtatagtagtattttgaattttgggatttttgtttgtttatgtgaaaatattatatgtgggttttaggtttttggattttttgagtggtgtgtgagtggagtttggagtttgttaagtttttttagtttgggatttttatttagggaagtttgttggaagtgattgaggagtggatgggatgtaggatttaggtggggagtgtttgagggtttgagttattttgagttgtatggtttatatttttgagtagtgattgttttgggtttgtgttttgtgagaaatttatgtgatttggggtgggggagtgaggtaggaaggaatgtttttttttgtttttatttatgtgaatatatagtatatatttatttagatattttaaatgtttatttatgaggtgtttatatgtttttaatttaaaaaaggattatagtagtttttatttatatatgtttttgtgtgttgttattttaatgttttttatttgtggtaatttagtattgtaatattttaaaattaagagaaaatgtattttaaaataattggtattttgttggataattttgaattatggagaaggagttaaaagtgtattttattagttggaataatttatttgagtttaatttgtttttaagagatatatagtggaaaaatttagaagtgtaaaatagtattaaagatatatagaaaatgaatgaaaagggtttttttgttgttgttttggaaagatggtattaaagttgttgtagaggatagagttattatgtaatgattaatatattaattaagttggttttgtgattttgatatattgagtggggtttgatttgtgtagtggtttatgataggtaaatattgtatgggaagtgtggtaatttttggaaaaaaatgttttttatgttgttttggtttttggttttgagtttgttttttttttttttatattgaagtaagattttagataagggaagttttatggtggagtgtttttttttttttaaagataatattaaaaattattaaagtaatttatgtttaaggtagaaaatttgaaaaataaagaaaagtattgtaaataaaataaaataaaaaaaattttataattttataaattatagtaaattataatttggtattaagttttttagttttgtttttatgtatatgtgtttttttttataaaaatgttattatattatataatttttattttatgttttttttttttgatttataattagattatgagagatatatttttgttttatgagtaggaatttgtgtttttttttgtaattttttaaaaaatttagattatgttagttttttgtttagagttttttaatagttttttgttttaaagtaaattttgaaggttttgttgtggtttgttaggttaatttttttttgaataattatttttattttgagttttgttagatagatttttttgttgttttttaaaaatattaagtttatatttgtaattatagtattttgggaggttgaggtgggtggattatgaggttaggagtttgagattagtttggttagtatggtgatattttgtttttattaaaaaaaaaaaaaaaaaaaaaaaaaaaagttaggtttggtggtgtgtgtttgtaattttagttatttaggaggttgaggtaggagaattgtttgaatttgggatgtggaggttgtattgagttaagattatattattgtattttagtttgggagatagagtgagatt

SEQ ID NO: 3755 - DNA, 2385 bp, Artificial Sequence
  chemically treated genomic DNA (Homo sapiens)
ataggtttttattattatgtttggttaatttttgaatttttttagtagagatggggttttgttatgttggttaggttggttttaaatttttggttttaagtgatttatttgttttggttttttaaagtgttgggattataggtttgagttattgtgtttagtttttttttttttttttttttttttttttttttttttttttttttttttttttaagatagggttttgttgtgttgtttagattggggggtagtgttgtgattttagtttattgtaatttttattttttgggtttaagtgatttttttattttagttttaagaataattgggattataggtgtgtgttattatatttagtttatttttgtattgttttataagagttgggttttattatgttgtagaggttggttttgaatttttggatttaagtgattggtttgttttagttttttaaagtgttgggattataggtatgagttattgtgtttggttttattgtataatttttttaatttttttgtatgtttgaaattttttattataaagtgttggggggggggataaaatttttatttgaaaatattagttagatattttttataaaatttttttttattgttagattaaggttgttatgagattatgttaagttaattgtttttgtgttttttattaatatgtttaggaagaaagagtagggagataattttgaaagaggttttgagggtgttagggagttttagggattagttaaggtgtttgggttttgtgtttgaggaaattgaggtttaggttgttttgtgttgttgtttagaatttagggaagtttaggatgtttttttttaagttatgttggggtgtttaggtttagtggagaagtggggtatggttatatgaatgatatgtagttggtagtatatagtaggtatataagtgtttgttgaatgaatatttatatgaaattggaaaggagttttttaaagatggagttagtaggagatagtgaagttgtttgtgtgggttgggggagtttgtttttgtttttgttttagtttatttttggtttggtttgagtattttgagaagtgggtttaggagaggtttttggatttttgggtttttggatagttagggtgagggtgttttgttatatttttaggagagagtatatttaaaataatttttttttttaaaaatttagtgttaatggattttagatgtttgtttgttatataatggggtttgttttaatagtgttaatttttagatgtgtagtttggaattaagaagtttattggttttttgaggatattgtgagttaagttgagagttgtttgggggagagatatggatgtgtagaattagggatgggagaggagttagggtgtttttttgttgtttattgggttgtttatttgttttgtagttgtttttagattgaaagataggaagggtgtttttgttttttttttttttagttttgattttgagtaggggtttttaggggataattatagataggtagtttggggagggtttgttttggaatttggtttaagtaggtttagttggatgagtttggagaagtttttggtttttttgtttttgaatggaaaatagaataatgttattttatttagagaggttattgtgtaaaatgaaatgaagtaagtagtatagtatggggtttagaaagttttgattttttttgagtggagagaataggggtttaagttattgagtatttttttttattttttttagtaatatggatgtttttgggtagtatgggttgtattttttttggaatattggaaaagagttaaggtggggagtttattattttttttagtggtttgttttatggttttgtagttttaatggatagaatatttttttgtttattgagttaaaggtggtttttgtgtgatttttaattggtttgagttttgttttttggagttttgttgagtaggttatatttttttttatttgatatttttgagtatgggaagatagagattgagttttttaattttttttttagtaggtagttgtagttatgatattagatggatgaagattaagatgttttaaggagagatgtttaaaattttaaataagaaaagttttaatgtttgggggaatgattttgtggttttttttgtgtagatgttaataaaatttgtatgtttttattttaatttaaagagaaaagggttaggtttatgtttgtaatttttataatgggaggttgaggaggattatttgagtttaggagtttgagattagtttgagtaatatagagagatttgtttttattaaaaataaaaaaattaattaggggtggtggtatgtgtttgtggttttagttaattgg

SEQ ID NO: 3756 - DNA, 2385 bp, Artificial Sequence
  chemically treated genomic DNA (Homo sapiens)
ttaattagttgggattatagatatatgttattatttttggttaatttttttatttttagtagagataggtttttttatgttgtttaggttgattttaaatttttgggtttaagtgattttttttggttttttattgtggggattataggtgtgagtttggtttttttttttttgaattggagtgaaggtatatagattttattaatatttatatagggagaattatagaattatttttttagatgttgagattttttttgtttgggattttgaatatttttttttagagtattttaatttttgtttatttgatgttataattgtagttgtttattaggaaaagggttgggagatttggtttttgtttttttatatttgagggtattaggtgaaagagggtgtggtttgtttagtagagttttagagagtagaatttagattagttgggggttatatagaggttgtttttggtttagtgaatggaagaatgttttatttgttggagttgtagggttatggaataagttattgggggaggtggtgagttttttattttggtttttttttagtgttttagggaaaatgtagtttgtgttgtttaggggtatttgtgttgttgagaggagtaggggaggatgtttggtgatttgggtttttgttttttttatttagggaaagttaaggttttttgagttttgtgttgtgttgtttattttattttattttgtataatgatttttttgggtagaatggtgttattttattttttatttaaagatagggaggttaaggatttttttaggtttatttagttaggtttgtttgaattagattttaaagtagattttttttaagttgtttgtttatgattgttttttgggagtttttgtttagagttaggattgaaaaaaaaggaagtgggaatattttttttgttttttagtttggggatagttgtagggtaggtgagtagtttagtgggtagtaagaaggtattttggttttttttttatttttggttttgtatgtttatgttttttttttgggtagtttttagtttggtttatagtgtttttagggggttaatgggttttttgattttaggttgtatatttggaagttgatgttattaaaataaattttattatataataaatggatatttggaatttgttagtattgagtttttagaaaaagaaattgttttggatgtgtttttttttaagaatgtggtaaagtgtttttattttggttgtttaggaatttagggatttaggggttttttttgggtttattttttaaggtatttaggttaggttagaggtgggttggggtagagatagagatagatttttttggtttgtataggtaattttattgttttttgttggttttatttttggaaggtttttttttaattttatgtaaatatttatttagtaaatatttgtgtgtttattatgtgttgttaattgtatattatttatatggttatgttttgtttttttattgagtttaagtattttaatatggtttaagaaaaaatattttggatttttttggattttaaatagtaatgtaaaatagtttgagttttagtttttttaaatatagagtttaaatgttttagttagtttttagaattttttagtatttttaaggttttttttggaattgtttttttattttttttttttgggtatattggtgggggatataaggataattgatttggtatagttttgtggtaattttgatttagtaatgaagaaagattttatgagaaatgtttagttaatatttttaaatggaaattttatttttttttttaatattttatgatgaaaaattttaaatatatagaaaagttgaaagaattatataatgaggttaggtatagtggtttatgtttgtaattttagtattttgggaggttgaggtaggttgattgtttgagtttaggagtttaagattagtttttgtaatatggtgagatttaatttttataaaataatataaaaatgagttgggtgtggtggtatatgtttatagttttagttatttttgaggttgaggtgggaggattgtttgagtttaggagatggaggttgtagtgagttgagattataatattattttttagtttgggtaatatagtaagattttgttttaaaaaaaaaaaaagagaaaagaaaaagaaaaagaaagaaaagaaaagaaagggttgggtgtagtggtttaagtttgtaattttaatattttgggaggttgaggtaggtggattatttgaggttaggagtttgagattagtttggttagtatggtaaaattttgtttttattaaaaaaatttaaaaattagttgggtatggtggtgggaatttgt

SEQ ID NO: 3757 - DNA, 2440 bp, Artificial Sequence
  chemically treated genomic DNA (Homo sapiens)
tttgtggttggggtttgtttggatttttgtttttgtgtgtggtttgtagtggtgtatttttaaggatggttgtttggtttgagtgaaagtgggagtgggagtagtagtttggtgtggtagaggttgtttttttttttaggttgtaggttgttgtttgttttttgttaggttgtttgtttgttggttttgtttggattttagtttggttgggtttggatgttgttgtagttttttattttggttttatttataggggtattttaatttggttggtggggtggggttggggatttgtggataaggttggtttgttgaggttagggaggaaaataaaaagttaagagaagaatttatttaaaatggtttttgtagtagttaaaatataaatagttattatttggtgaagtttagtttagatattttgtaaggatattttaatttattttgggtttgttttttttgttgtgttattgggttttgttggtttaaaatatagatttattggttattttggttgttgtttagatagaagtttattttaagtttgtttgtaggggtgagtgatgggtttgttttattgtgtttgtatttgtatggatgtgattgtggttttgattggttggtgttgagattgttttgttttttgttttgtgttttttgttttggagatgttgttgtgtttggttttgtttttttgggattagtggtagggttatgggggtggggtggggttggggttttgtgggttgagggggtggggtggggttttgtatgttgtagattgtaggtagggggtggggatttggtgtgtttgggtgttggtgggggtttagtgtttaggtggaggttttttaggtagttggttagtgatttggaagatttggggttggtgtttttgggggtgggggaggatgtggttggggttttgtgatataggggttttgtaggggttgaggttatgtgggtagatgtaaggagaagtgagggatttgtaggttaggaaaagaagattttgagtggttaagtgaatggagtagtttttatttgtgttttttgttgtttagtttggttttttggtatttttggtttttaatgggtttttttttaaggtttagtgtatttgggagttttttagttttggggattttgtagtgttttggatagatttttgtgaaattaggtgttgagttatggtgtatttatttttgggtttgttgtttttattatttttgtagtatttttaaggatagggtttagtgtttggtagagatttaattaattgttatatttttgaatttatttgttagtaggtaatttttgagtgtttattaaattttagatattgatataaaatgggatattgtggttaataagataaagtttttgtttttatggaataggtgaaagattaaatataaggggtaggtagtgataaatgttgtaaagaaaatagatggaagaagaagggaaattagattagggtttaggaattaggaaatttttaaattatgaaaggaggtatggagagtttgttttgtttggttgaatattttgtatggtgttttattattgtttttttttattttaattttggtagttattagttttttttgtgttttgtttgtttattgtgttttttaagtatttattaaaaaattgattggattttgattgtagaggtttattttattttaaagtagaaatgatttgagtttgatgattttaagagtagtttgtgggatatatttaggataagtatattttgattgtgttaggggttatgataatgatttagtagaggtttattaattttagagagagaatatttttagtttttttgaaattttagttttttgatggtttttagtttgtggttttaatttttttttgagtaatattttttattttttggtagatataagagatttttttagtttgaaaatagaggtagtagttttttgttgtttattttttttatttgtgtgtatttttgttatttgatttaaggttggttaagatgttttatggttttttttttttgttttttttttttttttaaatagatatttattaggtattaattatgttttaggtattgttttagatataaggaatgtagtattaaataagataaataatatttttgtttttaaggagtttataatttagttgagggtgagatagagagttatgtatagattttgaggatttttaattttgttaagttgttggtgagtgagtatattgagggttatttgtttgttgttgttttttggggatagtatgtttgattttttgaattagttgttttaggagttgaagttgaagttgaggtaggattaggtagttggtagttataatttttttagtttaaatattagaattataggttttaaagtttttaatagtgtttatgggagttttggtttttatgttttga

SEQ ID NO: 3758 - DNA, 2440 bp, Artificial Sequence
  chemically treated genomic DNA (Homo sapiens)
ttaagatatgagagttaagatttttatgggtattgttgagagttttggaatttgtgattttggtgtttgagttggagaggttgtggttattagttgtttggttttattttagttttagttttagtttttgaagtagttggtttagaaggttaagtatgttgtttttaagaggtagtagtaggtgagtagtttttagtatatttatttattagtagtttggtaaaattggagatttttaggatttatgtgtaattttttattttatttttaattggattgtaagttttttgagggtaaagatattatttgttttgtttaatgttgtattttttgtgtttagaataatatttggaatatagttggtgtttaataaatatttgtttaagggaggaagaaagataagaaagaaagattataagatattttggttagttttgagttaaatgatagaaatgtatatagatgagagagataggtagtagggggttgttgtttttgtttttaagttggagaaattttttgtgtttgttaagaagtgaagagtgttatttagaagagagttagggttataggttgaaagttattagaaaattgggattttaaagaagttaaaaatattttttttttggagttagtaagtttttgttaaattattattatggtttttgatatagttaaaatgtgtttattttaaatgtattttataaattgtttttagaattattagatttagattatttttgttttgaggtagaatgagtttttatagttagaatttaattagttttttagtgggtgtttagaaaatatgatgggtaagtagggtgtgaggagggttggtgattgttaaggttagggtgggagggggtagtaatgagatgttatatagagtatttagttaggtagggtaaattttttatatttttttttataatttaggaattttttaatttttaaattttggtttaattttttttttttttttatttattttttttatagtatttattattatttattttttgtatttagttttttgtttattttatgaaagtaagggttttgttttgttgattgtaatattttgttttatattaatgtttggaatttagtgggtatttaaagattatttgttaatgaatgaatttgagagtgtaataattagttgaatttttgttaaatattgggttttgtttttgaggatgttataaggatggtaggggtgataggtttgaaaataaatgtattatagtttgatatttgattttatggagatttatttaaggtgttgtagggtttttggggttggaaaatttttgggtgtgttgggttttgggaagaagtttgttgggagttaggagtattagggagttgggttgagtggtagaagatgtgggtggaggttgttttgtttgtttggttatttaggattttttttttttgatttgtgggttttttgtttttttttgtatttgtttgtgtggttttggtttttgtggaatttttgtgttgtgggattttagttatatttttttttatttttggagatgttagttttgggttttttagattattagttagttatttgagagatttttatttgggtgttgaatttttgttggtgtttgagtgtgttaggtttttgttttttgtttgtgatttgtagtgtgtaggattttgttttgtttttttggtttgtgggattttggttttgttttgtttttgtggttttgttgttagttttgggggggtggggttgagtgtagtggtgtttttaaggtggggggtatgaggtagggggtggggtggttttagtgttggttaattaaggttgtgattatatttatgtaaatatgagtataatggagtgagtttattatttgtttttgtaagtaagtttgaaatgggtttttgtttgagtggtagttgggatgattaatgggtttgtgttttggattggtgaagtttaatggtgtgatagggaaggtgggtttgagatgggttagggtgtttttgtagggtgtttgagttaaattttattaaataatagttgtttgtattttggttgttgtaggagttattttaggtaagttttttttttaattttttatttttttttttggttttggtggattggttttgtttgtgggtttttggttttgttttgttggttgggttagggtgtttttatgaatggagttgggatgaggggttgtggtggtgtttaggtttggttgggttggggtttgagtggggttggtgggtgggtggtttggtggagggtaggtggtggtttgtggtttggggagaggggtggtttttgttatgttaggttattgtttttgtttttgtttttgtttgggttgggtggttgtttttgggagtgtgttgttgtgggttgtgtgtaggggtgggggtttgggtagattttggttgtggg

SEQ ID NO: 3759 - DNA, 2422 bp, Artificial Sequence
  chemically treated genomic DNA (Homo sapiens)
agatggaagttggttggtatgttttgaaatggtgaggttttaggagatatgggtgggatttttttaagaattgttataaatttttgttttgaaattagattatttggatttaaatttttgatgtttttttttatttgttatgtgattttgggtaagttatttaagttttttagttttagttgttgaatagaaaatatgatagtttagattttattaggtggttgtgaagattaaaagagataaggtatgtaagatatttatagggtatttggtataaggtaaatatttaatagattttagttgttatttgtaattagtttatttattgtattgaaattgattgggggaatatttagatttagatgatgttatggggaaaaatagataagaaataataatttaaggttttatttaagagttatgtgatgtagagtgtgattagtggatagtattgtatatttggataaatatgaatatataaatttttgagttgttttttggatattagtttgtttataggaggattttttgtgtagttgatgaagtttatgtagttggaattaaaagtttttgtatttatgggttgaattggtagtagtaaattgattagggaattagagtatgatatttaagatagtgggaattagttgagatgtaggttataattatgataatagtaggtaatatttattgagaattttttgtgttaagttatgtgtaaaatatattattagattatgatatttttttattataatagtttaaggtggtgtttttgttatgatagtttgtttattttttttttagagtgtatgttaaaataattttttattgtaattagtggattttttagtagttttttttttttttttatttttttttggagtttggttttttataataagtttttaggtgtatttggagttgttatttgtaaatgtggtaggatttttttttattagatttttgtttttgtttttttttttgaagagtaaatatgttgtattagaaggaattagtggtttattgttattggtaaagttgaggtagtgggaggattattttttttttgggtttagtaatttttttagtggttagtagatagtagtataatggttagttagtgtgaaattgtgtaaattgttttataaataatttgtaatgtataggtaatagggagaggttatagtttatggataaatgattttttgttattttggggtattaaattagggataatttggattttattatggggatttattaattattatgggttttttgtatgtaagtttgttgggatttaggtttgtttggtgttttttgtggtattatgatgggggtaaaatatttttaagtagggttatgagaaagagaatgtaagtatttttaataaattagttaggggtgaattttgtaggagttaagtattttttttgtggaatttgttttttgaagaaatttttttgaagtgtagagaaaaatataataattttaataattaatatgtattgggtatttattttgtgttaggtattgtgttaagtttttttttttttttttttttttttgagatggagttttgttttgttgtttaggttggagtgtagtggtatgattttggtttattgtaagttttattagttgggtagttgggattataggtgtttgttattatatttggttaattattgtatttttagtagagatggggttttgttatgttggttaggttggatttgaatttttaattttaggtgatttgtttattttggttttttaaagtgttgggattataggtgtgagttattgtatttttgtgttaaattttgtgtaatttttataaatattttattgagtggatattattattattagttttatttttatagaggatgaagtgatagtttatagaggtttagttatttattttaggtaatatagttaatatgtggtgaatgtattagttagtttttgttaggttgtggtaataaatagtttattagttttagtggtttaaaattataagagtgttttgtttttattttatgttatttatggattagttgtttttttttatttgattttattataggatttaggttgaaatagtagtttttatttgggatatattatttttatggtagaagaagataagagtaagaaaattggtggaattggttatggttgtgaaagtttttgtttagaatgggtatatattatttttgtttatattttattgattaaaggtggttatatggttaagtttttttttaatggggtgaggaagtttattttttatattgggaggtattgtaatgaatgataattggggagagatatttaagttttttagaggaaaggtagagattagagaatagtaatataatttatgtagttgagtgagattagatttttgtgg

SEQ ID NO: 3760 - DNA, 2422 bp, Artificial Sequence
  chemically treated genomic DNA (Homo sapiens)
ttataaagatttgattttatttagttgtatagattatattattattttttgatttttgttttttttttaagagatttagatatttttttttaattgttatttattgtagtattttttagtgtgaggagtaaatttttttattttattgaaagaaggtttggttatatgattatttttgattaatgaaatgtgagtagaggtgatatatgtttattttgagtagaagtttttatagttatggttagttttattagtttttttgtttttgtttttttttgttatgagaatagtatgttttagatagaggttattattttagtttggattttgtaataaagttaggtaaaggagagtagttgatttatgagtggtataaaataggagtaaaatatttttgtgattttaaattattgagattggtggattatttgttattataatttaataaaagttgattaatgtatttattatatattggttatattgtttaaaataaataattaaatttttgtgagttattattttattttttatgaaaataggattaataataatagtatttatttaatggaatgtttgtgggagttatataagatttagtataggggtgtggtggtttatgtttgtaattttagtattttgggaggttaaggtgggtagattatttgaggttaggagtttaagtttagtttggttaatatggtaaaattttatttttattaaaaatataataattagttgggtgtggtggtaggtgtttgtagttttagttatttggttggtggagtttatagtaagttaagattgtattattgtattttagtttgggtgatagagtgagattttattttaaaaaaaaaaaaaaaaaaaaaaagatttagtatagtgtttggtatagagtaaatgtttaatatatgttaattgttaaggttattatgtttttttttgtgttttaaagagatttttttagaaagtaagttttatagagaaaatatttggtttttatagggtttatttttggttggtttgttaaaggtatttatatttttttttttatggttttgtttggaagtgttttgtttttattatgatgttataagaagtattaagtaggtttgagttttagtaggtttgtgtgtgggaaatttatagtagttaatgaatttttatggtgaggtttggattatttttggtttaatattttgaaatggtagggagttatttatttatgagttatggtttttttttgttgtttgtgtattatgagttatttatgaggtaatttgtatagttttatattggttggttattatgttgttgtttgttaattattaggagggttgttgaatttagagaaaaaatggtttttttattgttttggttttgttagtgataatgagttattgattttttttagtgtagtatgtttgttttttagggaagagaatagggataaaagtttgatgaagagaaattttgttatatttataggtagtaattttaaatgtatttgggggtttgttatgaaaggttggattttagaaaaaaataaaaaaaaaagagagattattgggaaatttattggttgtagtgagaggttattttaatatgtattttgaaaggagagtaggtaggttgttatgatagggatattattttggattattgtgatgagaaaatgttataatttggtgatgtgttttgtatatggtttgatatagaaaatttttagtaaatgttatttgttgttattatgattatgatttgtattttagttggtttttattattttgggtgttatgttttaattttttggttagtttgttattattagtttagtttatgggtatagaagtttttgattttagttatatgggttttattaattgtgtagaggatttttttataaataagttaatatttgaaagataatttaaaagtttatatatttatatttgtttaaatatataatgttgtttattggttatattttatattatatagtttttggataaaattttgggttgttgttttttgtttatttttttttataatattgtttaggtttgaatgtttttttagttagttttagtataataaatagattagttataaataatagttaaagtttgttgagtgtttgttttgtgttaggtattttgtaagtgttttgtatgttttattttttttaatttttatagttatttggtaaagtttggattattatattttttatttaatagttaagattaaagggtttaagtgatttgtttaaggttatataataaataggaaggaatattggaggtttgaatttaggtagtttgattttagagtaggagtttgtagtagtttttgaaggggttttatttatgttttttggagttttattattttagggtatgttaattaatttttattt

SEQ ID NO: 3761 - DNA, 2186 bp, Artificial Sequence
  chemically treated genomic DNA (Homo sapiens)
gtgtgaaaatgtttttttaattatattgaatgggaggatttttgattatttgtattttatttgaaaatttagtatttggttgggatgtttgggtgggtggaggattttgttgtgttgggatgaaatagtagggatatgtttaaaatataagaattatgtgtggtggtttatgtttgtaattttagtattttgggaggttgaggtaggtggattataaggttaggagtttgagattagttttgttaaaatggtgaaattttgtttttataaaaaaaattaaaataaaataaaaaataaataaaaaaaattattaaaaaaataattagttgggtgtggtggtgggtgtttgtagttttagttatttgggaggttgaggtaggagaattgtttgaatttgggaggtgaaggttgtagtgagttgaaattgagttattgtattttagtttgggtgatggagtgagattttgttttaaaataaaataaaataattttatgttaagattgttttgaaatataggtagaaaaattaggtaaaaaatgttaaatggttaattattttggtttagttatatatttatttgaaagtttgttttttttatttttagttttagtgttaagaatgtaaaatagggtgtttagaagtttaagtgataaagatttttttattgagagttaagggataaaatttattatagataagtttagtttttttattttttttggatgtttttttttgattgttaaagaagtagttgttttttgggtagttgttaggaaattagtttggttttgtggtgttgtttttattttgtagggtgtaagaggtgtattttttgtgttttttttgtggttaaattggggtgtgggaattttttttagagaagttgtgagttggggaaattttgttattgatttattgtggtgttgggaaaggggatgtggggtttggaagggttagattttgtaattttgggattgatatttttttttttttttattttttttagttttggattgggttaatgaaagtttgaaaaagaaaaaaaaaaaaaattaaattttaatgtagttggagtgtaaaggttgtttggttttgttttttggtgggggaatgtgttgtgttggaggtgtgaataggagttgtagatggtgagttttattgttgtaaatgttagggtagtgaagttgaatagaaaattttattgttttaaaaaggtagttgtttgttttttttttttttttttgttagggtgaggggttttttaagtttgggatttgtgagttgtgtggaggattttgttaaatttgagtattgtgtggtgttttttaagagtttgaataatgggaatttagtaaaaaataagttggttttagaaggtagttttttttttttttttgtgtatgggttataattgtttttagtttttaaattgttttagtagaggttgtgtggagagagtagagttgagggatttagtgtaaggtgggagttaagtgtggttgttttaagaatgtggagagtgtgtgtttgttgttagttggtttgggttgtgtgtttttgttgttattgtgtgttttttgtttgtttgtttttttgtttgttggttttaaagtttttgttaggatttatgtttatatgttattttttgtatggaggtatggttagtttttagttttgtgttttttgtttttttttagtttgtgttggagttataatttttaggagtatggattgaaggtgtttttgttttagtgtttttttgagattttttgtgtttttttttgttttttttggttgtttttattttggggggttttttgttttttttgttttttttttttttttttttttttgtaaatatgttttttttttttttggggttttggaaggagttgtttgtttgaagtttggagatgttgtgttgtgtttagttttgttgttgtttgttggtttttgggttgtgttgtgttgttgatttaagttggggatttttggttgtttgttgttgttgtttgtggtttttgtttgttttaggtttggggtattgttgttggttgttgattttgtgttttgtttgattggtttttttttttttaaatggaaagtagtttttttttgttgagaggattgtttttagtgtggttttgtgtttttggttattttttgagattttttggggggtgtt

SEQ ID NO: 3762 - DNA, 2186 bp, Artificial Sequence
  chemically treated genomic DNA (Homo sapiens)
agtgttttttggaaaattttaaaaagtgattgggaatgtagagttatgttggggatgatttttttggtggagaaaggttgttttttgtttaaaaaggagagagttgattgggtagggtgtggagttggtggttggtggtgatgttttgggtttggggtaggtagggattgtgggtggtggtggtgagtagttgaggatttttaatttgagttggtagtgtagtatagtttgagagttggtgggtggtggtggggttgagtgtggtgtggtgtttttgggttttaggtaggtagttttttttagggttttgggaaggaaggaggtatgtttgtgagaggggaaggggaggggagaggtagggggagtggagagttttttaaaatagaaatggttggaggaaatggaggaaaatataaaggattttagaggggtgttggggtgagggtgtttttagtttatgtttttgaaagttgtggttttggtgtaggttgggaaggaatgaagagtgtggggttggaaattggttatgtttttatataggaagtaatatgtgagtatggattttggtagagattttaaagttggtgagtgaaggagtgagtgaatagggggtgtgtggtggtggtgggggtgtgtagtttgggttagttggtggtgggtgtgtgttttttgtgtttttaaagtagttgtgtttggtttttgttttgtgttgggttttttggttttgttttttttgtgtggtttttattgggatagtttggggattgggggtgattgtagtttgtgtgtggagagaggagggaggttgttttttggggttggtttgttttttgttggatttttgttgtttgagtttttaaaagatgttgtatggtgtttgggtttggtgagattttttgtgtagtttgtggattttggatttgaggggttttttgttttggtgaggggaaagggggagggtggatagttgtttttttaaagtgatggggttttttgtttggttttattgttttggtatttgtagtggtgaggtttattgtttgtggtttttgtttgtgtttttaatatagtgtatttttttgttgggaaataaagttgagtggtttttgtattttggttatattgagatttaatttttttttttttttttttttgggtttttattggtttagtttaaggttggggaaagtgggggaggggaggaatgttgattttaggattgtgaaatttagtttttttgagttttgtatttttttttttggtgttatgatggattggtggtggagtttttttaatttgtagtttttttggagaaggtttttgtattttggtttggttgtggggagggtgtaggaagtgtgttttttatattttgtagggtgaaagtagtgttgtggggttggattgattttttggtagttatttggggagtggttgtttttttagtaattggggagaggtgtttgggggaaatgggaggattaggtttatttgtaatgagttttgttttttggtttttggtaagaagatttttattgtttagatttttaagtgttttattttatatttttaatgttggggttaaaagtgggggaggtgggtttttgagtaaatgtgtaattgagttaaggtaattagttgtttgatattttttgtttaatttttttgtttgtgttttaaagtgattttgatgtgggattgttttgttttgttttgagatggagttttgttttgttgtttaggttggagtatagtggtttgattttggtttattataatttttgttttttgggtttgggtgatttttttgttttagttttttgagtagttgggattataggtgtttgttattatgtttggttgattatttttttggtggttttttttgtttgttttttgttttattttggttttttttgtagaggtggggttttattgttttggtaaggttggttttgaatttttgattttgtgatttgtttgttttagttttttaaagtgttgagattataggtgtgagttattgtgtatggtttttgtgttttaaatgtgtttttgttgttttattttaatatggtagggttttttatttatttaaatattttaattggatgttaggtttttaaataaagtatagatggttggagatttttttgtttgatgtgattaaggaagtatttttatat

SEQ ID NO: 3763 - DNA, 2420 bp, Artificial Sequence
  chemically treated genomic DNA (Homo sapiens)
agggaggtttaggaatgggatttgttttttttttattttttatgttgggttttggagaatattttaggggtggggaaatttttatggtaaaaaaagtttaaaaaaaattttattgtattattatattgtgtttttaggtttttgagtttttgaatatggtttttttatatttataaggattttgtttataatgttttattttatttttttttgtttgttaggtaattttagttagagaggggatgtttataatttttttttttggggttgtgggtttggtggatatgtggtatttgtttatttttttggatatgttgtttttattgttgttggatattattaaatatggtaatgtttatgttggttttttatttttttttaagtagatggggatagattttgtgtgtgtatgtatgtgtatttgtgtgtttgagtatgtatgtgtgtgtttattgtaggtaggtgttatgggttatgtgttttagtttggatttattggtttagatatttatgaggttagagggtttgtaaagtttttttggttgtgttttttttttataatttttagtaaattttttggttttttgggtttaaggttttagtttgttttttaggtttttttaggttggtggggattgtaggttttgttatggagtttggagtttagtgtttgtttgggatatatgaggggttttgagggtttatatgttttttagtttgggaagttatttagttgggttttggtggggtttagtagaattttgggtatttttatggttttttgatattttagtttttgttgtttttatttatatggagatagtttttttttttttatattttttattttttatgatattttttggtatgattttgattattttagttggataattaagttttttaagttttttatgttgttttattttttttagtattgttgatttaattttagggggattttttttttgatgtttttatgttttgttttttttttttgtagattttttggtagtttttttgtgtagaatagttatttggttttattttttttgtaaggttggagttgttgttttatttttttgatttatatataataataaaaaaaattatttttgttatgtgtttttttatttttattaagtggttgaaatttaatttgattgtttgagtatttttggttggatttgggttggagttgatgggattttatgagggttgtaaaagttaagtttttaatatgttttaaataaattggtgtgtaaaggagaaatgttagaagaaggaatatggttgtagatgggaggtttgggaatgttagttgtagtattggggtataggtggttttaataatgtatataagtttggttgtaagttgtttttataagagtagaagaggttgtagaattatttttaggaggttgagattaaattttttggtttttgagtgtatatagttttgtatggtttttaaaatatagattttaggattatttataataatataaatttgtggttaattttgttgaatttttatttagatttaagttgtgttgttagtagaaatgtaattgtgttagagaaaaattgtttatattttttgagatattgtgataatgaaaaatagtattataaatttttattaagtaagaagaatattaattgtattttatgttgtttttttgggttagtatgttgatatagatatgttttattttagtaaaatatggttaatttttgtagtatggtatttatttttttttttaattatatataattgtatagtttaatttattttaatgtttgatgttgaaaagtgtatatttatgaattaagggttagtttgggagggaggagaattataaatgggtataattgtagttttttgggggttgtttatgagtgattttaaagaatgatgatgtttattttgaatttttattagtgaaagatagtagggttgtttttagttaagatattgttttaagaatgtagataataggataatttgtttagttgtttattatattagtggtttttttttggataagtaggtaagaaagattaaagatgtgggttttatatattttgtgatgtgatgaaatttaggtatatagatagtattagtaaatgtgtaattgaatattaaaatgagtaatgtggttttaggtagtatagttgtagatttttgtggataagggagagtgtttggaattttgttggatgatagtttttttagggggaaaagtaggatttatttgattattagtgtaatttattttagggttttttttggaatagtgtatttagttttgtaattgtattttagaaaaattatttttaagttttgattataattaattaattaattatgatgaatgttgatggtgatttagtaaaagtggaatgatgatttaggg

SEQ ID NO: 3764 - DNA, 2420 bp, Artificial Sequence
  chemically treated genomic DNA (Homo sapiens)
ttttaagttattattttatttttattaaattattattaatatttattataattgattaattaattatgattaaagtttaaaggtgatttttttgaaatatgattgtaaaattagatgtattgttttagagagagttttaaagtgaattgtattaatggttaaatggattttgtttttttttttgagaaaattattatttaatagagttttaagtatttttttttgtttatagagatttgtagttgtgttgtttggggttatattatttattttaatatttaattgtatatttgttgatgttgtttgtgtgtttggattttattatattataaaatatgtggaatttatatttttaattttttttgtttgtttatttaaaggaaaattattagtgtggtaagtaattagataaattgttttgttatttgtgtttttagaatagtattttaattggaggtagttttattgttttttattggtaagaatttagaataaatattattattttttgaaattatttataagtagtttttaggagattgtaattatatttgtttataattttttttttttttaaattaatttttgatttataaatgtgtattttttggtgttaggtgttagaataaattagattatataattatgtataattaaaggggaaaatgggtattgtgttgtaaagattagttgtgttttgttgaagtaaagtatgtttgtgttagtgtgttggtttagggaggtagtatgaaatataattaatgttttttttatttaatgggggtttatggtattgttttttattattatagtattttaagaaatataaatagtttttttttaatgtaattgtatttttattgataatatagtttgggtttaaatgaaaatttagtagaattaattataggtttatattgttatggatgattttggaatttgtattttaaaagttatgtaaaattgtgtgtatttaggagttgagaagtttgattttaattttttgagagtggttttgtagttttttttgtttttgtagaagtaatttatagttaaatttgtgtgtattattaaagttatttgtgttttagtattatggttagtatttttaagttttttgtttgtagttatgtttttttttttaatgttttttttttatatgttaatttgtttgagatatgttaaaagtttgatttttataatttttataaaattttattgattttaatttaaatttagttagaagtgtttggataattagattgagttttaattatttgatggagataaagaaatatatagtaagaatgattttttttattgttatatatgagttaagggaataaaatagtaattttggttttgtaagggagatagaattggatggttgttttgtataaaagggttgttaaagaatttgtagagggaagaaatgaggtatggaggtgttaagagaaaggtttttttgaggttaaattaataatgttggggagaatggggtggtatgaggagtttgaaaagtttgattgtttagttaggatggttaggattatattaagagatgttatgggggatgagggatgtgggaggagaaaagttgtttttgtgtgggtggaggtggtaggggttggagtattaggaggttgtgggggtgtttaggattttgttgagttttattgaggtttggttgagtgattttttaggttgggggatatgtgagtttttggggttttttatgtattttaggtagatattgagttttaagttttgtaatggggtttgtggtttttattggtttggaaggatttggaaaataggttgaggttttgaatttagaggattagggagtttgttgggaattatggggaagaaatatggttagaggagttttgtagattttttgattttatgggtgtttgagttagtaagtttagattaaaatgtatgatttatagtatttgtttataatgaatatatatatatatgtttggatatataggtatatatgtatgtatatataagatttgtttttgtttatttaaggaaggataaggggttaatatagatgttattatgtttggtaatgtttagtaataatggaaataatatatttaaaaagataagtaaatgttatgtgtttgttaggtttatagttttagaagaagggattgtaagtattttttttttgattggggttatttgatgagtagagaaggatggagtgaaatattgtgggtaggatttttatgggtatgggagagttatgtttaggaatttgaggatttaagggtatagtgtggtaatgtagtggggttttttttagattttttttgttgtggaaatttttttatttttgaaatattttttagaatttaatataaaaagtaggagggaggtagattttatttttgggttttttt

SEQ ID NO: 3765 - DNA, 2437 bp, Artificial Sequence
  chemically treated genomic DNA (Homo sapiens)
tttgagaatttaatgatgtgggtgatttgataggaggtggagtttaggtggtaatgtttgtttgtttgttgtttattttttgttgtgtagtttggtttttaataggttatgaatgggtatttgtttttagtttaggagttggggattttgatataaagttttagattgtgtttgatatagattaagttttagagaaattttgttgttgttatgattattattgatattattgatattattgatattattattaggttgggtatggtggtttatatttgtaattttagtattttgggaggttgaggtaggaggattttttgagtttaggagttagaggttggtttgggtaatatagtgagattttgtttttagaaaaataaaaaaataaaaaattagttgggtgtggtggtatgtatttgtagttttagttatataggaggttgaggtaggaggattatttgaatttaagaggttgaggttgtagtgagttatgattgtgttattgtattttattttgggtgatatagtgagattttgttttttaaataaataataattaatttaaaaataaaagtattagtagtagtagtagtagtagtagtagtagtagtagtagtagaagtatggattaatttaagggggaaaaaaggagggagtgggattgaggtaaagtaagttgttatttggagaaaaaggtaaagaagatgattagatagatgtgtgtgtagatgtttatattatttttagagatttaagagattggtggtagtggtggagggagtggggatttgagggaggggaaaggatattgattttttattttttgtttttttttatgttgtttgggttgtttttttttttttgtgtatttgtgtggatatttaaaattaaatattatagaaagaaattttgtaagaggtttttttttttagtgaaagttttaaattgttttttttagttttgtttttttttatttttatattttggtttgtgggtggtttagtttggttttttatttttgttggtgttttgtgtttttggttttggagtaggtttgagttggaatgttttgtaagaaagggggttttttagagttttttagagtggttttggttttgggtagttaggggtgtggggttttggggaggggggttttggttgattgatgagaattttaaatgttttttagttttggttgttaattatttttagattggttgggttagggttagggttgttgttgtttggttttataaatagtttgttgttttagatggtggttggttttagtttggtgagtaggtttatgggggattggggggtggtagtaggtggaggatttttattttattagttgttttagttgttatatttttatattgttttgagttggggattttgggttagaaggggtggtagaaattgaatttattgtttagaggagggaaattgaggtttggaaggggtaatgtgggtggtggttaaggtggggggaagatagagatgtaaggggggtgttttttgagggttgatgttgggtttattttatttttgtgaatttagtatattatgaggatgttgtaaagatttgaggagggagggaaggggggtattattgttagttgggtttaaattttggttttagtttttattttttgagtgaataaattatttttatttttagttttagtttttttatttgtaaaatggggatggttggagtataggattgttggaagatttaatgatttggtttttgtagatagtttgtattttatatatggtgtaggtgttgaatatagttttttttttttttttttttggaaattttttttatttttgttttttttgttgttggagagtatagtggttttttttaggaagttattttgatttttatttagatttttttttttgtgttaggtattgtgttttttttatagttttttttatagggtttttttttgatataattggtatttgatgtttttgtttttttgaaaataaggaaatagagggttagggaagtaattggtatttagtgttgttagggttttgttttttgtagatgaggagataaagggttagggaggtagtgggatggatatgttgaggttgttaggaaaagatagtttgatgtgtatttggagttgtttttgaaggttttatagaatttggtatagtgttaggtaatttggttgttttttttgttatatttattaattttagagtttatattttggtatagaaggaagagatttaggttggtgttgggttgtaatattttagggaaaggggtaaggagttttgatttgtttttatatttgtttgtttttaaattgggttggattttggttgggtggttgttgggtggtagttttgttttaggatatttggtagtaggataaggtgggggagttagttgttttgtgagttt

SEQ ID NO: 3766 - DNA, 2437 bp, Artificial Sequence
  chemically treated genomic DNA (Homo sapiens)
gaatttatagagtaattggtttttttattttgttttgttgttgggtgttttgggataaggttattatttagtggttatttagttaggatttagtttagtttggagataggtaggtatgggagtaggttaaggttttttatttttttttttgggatattatgatttagtattagtttggattttttttttttgtgttaaggtgtgggttttggggttggtgggtgtggtaggagaggtagttgggttatttgatgttgtgttaggttttgtgagatttttagagatagttttaggtgtatattaggttgtttttttttggtgattttaatatatttattttattgtttttttggttttttgtttttttatttgtaaggggtggggttttaatagtattaggtattagttatttttttgattttttgtttttttgtttttaaaaggataagagtgttaggtgttagttgtgttgaggagagattttgtgagagaggttgtgggaaaagtatagtgtttggtataaagggagaggtttgagtaaaagttaaggtggttttttggaggaggttattgtgttttttggtggtaggagaagtaggaatagaaggagtttttggaaaaggaagagggagaagttgtgtttagtgtttgtgttgtgtgtggagtgtaaattgtttgtaggagttgaattattgaattttttagtaattttgtattttagttatttttattttatagatgagaaaattgaggttgggggtggaaataatttatttatttagggagtaaaagttggagttagaatttaaatttagttggtaatgatgttttttttttttttttttttgggtttttatggtatttttatggtgtgttggatttatagaggtaaagtgaatttagtattaatttttaaggagtattttttttatatttttgttttttttttattttgattattatttatgttgttttttttgggttttagttttttttttttgagtaatgggtttagtttttgttattttttttggtttagggtttttaatttagggtggtgtggaggtgtggtagttgaggtggttagtgaggtgggggttttttatttgttgttattttttagttttttatgaatttgtttgttaggttggagttagttgttatttggagtgatgggttgtttatggagttaggtggtggtggttttggttttgatttggttaatttggaagtgattagtagttggggttggggagtatttggagtttttattagttagttgggatttttttttttaaagttttatatttttggttgtttagagttagggttattttgagggattttgaggagtttttttttttgtagggtattttagtttggatttgttttaaggttaggagtgtagaatattagtagaggtgggagattagattgggttatttataggttgggatgtgggggtgggagggggtggggttgagagggatgatttggggtttttgttaaggaaggaaattttttgtagaatttttttttgtagtgtttggttttgaatatttatataagtgtatagaaaaaaaggaataatttaaatagtgtggaaggggataaagggtggaaagttggtgttttttttttttttttaggtttttattttttttattattgttgttagttttttgggtttttggagatggtgtgaatatttatatatgtatttatttggttattttttttatttttttttttaagtagtagtttgttttattttagttttatttttttttttttttttttttggattaatttatatttttattattattattattattattattattattattattgttaatgtttttatttttaaattaattattatttatttaagaggtagagttttattgtgttatttagggtggaatgtagtggtataattatagtttattgtagttttgattttttagatttaagtgatttttttgttttagttttttgtgtagttgggattataggtgtatgttattatatttagttaattttttgtttttttatttttttagagatgaggttttgttgtgttgtttaggttggtttttaatttttgggtttaaaggatttttttgttttagttttttaaagtgttgggattataggtgtgagttattgtgtttgatttaatgataatgttaataatattaataatgttaataataattatagtaatagtaaagtttttttagggtttagtttgtattagatatagtttgaggttttatattggggtttttaatttttggattggagataggtatttatttgtggtttgttaggaattgggttgtatagtaggaggtgagtagtagataagtgagtattattgtttgaattttgttttttgttagattatttatattattagatttttaga

SEQ ID NO: 3767 - DNA, 2383 bp, Artificial Sequence
  chemically treated genomic DNA (Homo sapiens)
ttgtttatttgtttttgggtggtagttttatttttgttttttttggttattattgtgtttttagattttaataaagtattttgtataagaaagtgtttagtttatagttgtagaataaatgaatgaatgaatgaatgaatgaatgaatggaaagtgtttagttttatgtttgatttttagtaagtatttgaaatttaatgttgtgtggtggtgttagttttggtttttgatttttagttttatttaattttatttttattagtttggtgtttgtgttttttttgtttggttagttttttgttgtttgtatagttttttttttgggttaggatgatttttgagggaattgtgggtttgtatggttggttttttttggttttgtttttagttttttttatattttttgggggtagaggtttttgggaaataggttttgaagtttttttgggttagatttgttggggttttttttaggtattgtttgatgtgattttattagtgaataaatggggatagtgagatttagagaggggtagttatgtttgatgttaggttttggggtttttaaaatatttagggaagtttttaggattttggtttttttgttgtttttggaatagagttgagtttaggtgtttgttttttagatgataaaattgaattttgttataggttttggagttaggtttgaattttagtttttttattttttggttgtgtgattgaggtttgttatttggtttttttgaggtttagtttttttgtttgtaaaatggtattttaatggtatttaatttatggaggtgtttggggggataaggttagttattttgtaggtaggtggggtttttggttttttttatggggttttgggatttttggttttggaatttttaaggtttagtttttttagggtttgtatggttttttttttgttgggataatttatagttttagggttatagttgttgttgttttattttttttttttttttgattttttttttttttattttggttttatttttttagaattagtttgtttttgttttttgtttttatggttttataaatgagttatgggtttgatttgatttaattttgttgtaattgttatttttttaagtttgtttttttttatttggttatttatgagattataaaaatttaaataggatggggttttttttagtttggttttttggttttttgggattttgggttagggttagtagtttttggagattgaggtggggtttgtggagtttttgtggggagggatttggtgtttttagtaggattgggtattttgagttttgggttgtagttttgttgttggatagttttgagagaattgtttgagttttttgatttttttagtattttttttagtaggttttagaatagggaattaaaatttaggtatttttgggttagaaggtgaaaggatgagtaaggtggtttggtgttggttttggtgaattggagagaataggttttttttaggggatggtggtttttgagttagtaggtggtttggatttttttatttagtaagagaagttagaagtttgagattgtatgtgaaaagttttgatttttaaatgttggttaatgagttaaattaaaaataaataaataaaatttgattttgtggatatttgtggttttgtgggttatttttggtttagaaggttttaattttagttgtggtagttgtgtttttagtttttttatttttttgtttgagtagttttttttgtttgaaattttttttttttttttttttattttagttatttttattttttgaattttggtgtgttttttgtttgtagtttagaagagatgatatttgttttatttatgtttgtttttttaaggtgtttagttgtttttaatttatttttgtttttatgtttttttttttatggagggtttgttttgtttgagattgtttttgtagtgggggaaattagttttttagttgttaaaagttataatatatattttgtttgttttattatttatttttaaaatggggtatgatatttttttggttatttaaaaattgaagatgtgaggttgatgtttttagggatgtgtgttgggtggtaggagttaggtgtggggttaaggagtgggggtggaggaggaagttaggtttttagttagggggttgagggttgtttttttaaagtttgggtatggatatgtgattagggtttattaattatatgtagttatgttagatttatgaattagaagttggaaatgttgggggttgattgtttaggattttgttttggggtgggtggggttgtagtttggttatttttttagaagttgtagtgggttagttttgggggtagtgattagggtt

SEQ ID NO: 3768 - DNA, 2383 bp, Artificial Sequence
  chemically treated genomic DNA (Homo sapiens)
agttttggttattgtttttagaattggtttattgtagtttttggaaaaatagttgggttgtagttttatttattttagaatggagttttaagtaattagtttttaatatttttaatttttgatttataaatttggtatggttgtatgtgattggtgggttttggttatatgtttatatttaagttttggaggagtagtttttagttttttggttggggatttggtttttttttttgtttttattttttggttttatatttggtttttattgtttagtgtatatttttggaggtgttggttttgtgtttttggtttttaaatgattaaagaagtattgtgttttattttagaaatgaatgataagataggtaggatatgtgttatgatttttaataattaaggggttaattttttttattatgaaggtggttttaaataagatagattttttatggaagagaaagtatagaaataaaagtgaattgggaataattaggtgttttgggaaggtgaatatggatgaagtagatgttattttttttgagttgtgaataggagatatattgaggtttagagaatgagagtgattgagatgaggaggaagaaggagagagttttaggtagaggggattgtttaggtagaagggtggaaggattgagaatatggttgttgtagttagaattggaattttttagattagaggtggtttatggggttatagatatttatagagttaggttttgtttatttgtttttaatttgatttgttggttaatatttaaaaattaggattttttatatataattttagatttttggttttttttattaaatgggaagatttgggttgtttgttggtttagaggttattgttttttgaggagagtttgttttttttagtttattggagttagtattaggttattttatttatttttttattttttggtttagaggtgtttgggttttggttttttgttttaaagtttgttaaggaggatgttggggaaattagaaagtttgaataatttttttaaggttgtttagtaatagagttgtagtttgggatttgggatatttagttttgttggggatattaagtttttttttatagaagttttatagattttattttagtttttaggagttgttgattttggtttggagttttgggggattaggaggttgggttggggaaggttttgttttgtttaggtttttgtggttttgtgagtaattgagtggaaaaaaataagtttgaaaagataataattataatgaaattaaattaaattagatttgtgatttatttatggagttgtaaaaatagaaaataaaaataagttggttttggagaagtgaggttagggtgaggaagggagaagttggggaagggaaaaaaataaagtaatagtagttatggttttgggattgtaaattattttagtaaggagggaattatgtgggttttggaggggttgggttttgggggttttggagttaggagttttaggattttgtgggagaggttagagattttatttgtttgtaggatggttgattttgtttttttaaatatttttgtgagttgggtattattagggtgttattttgtagataaggaagttgagttttagagggattaagtgataaattttgattatatagttaggaagtaagaggattgagatttaaatttggttttaaagtttgtaatggggtttagttttgttatttagaaaataggtatttgagtttagttttgttttaaaaataataaagaagttagagttttggaagtttttttggatgttttgggagttttgaagtttgatattggatatggttgtttttttttaggttttattgtttttatttgtttattaatggggttatattaggtaatgtttaaggaaggttttagtgggtttgatttaggggagttttaaagtttgttttttagaagtttttgtttttgggagatgtaagaggagttggaggtagagttagagggagttagttgtgtaggtttatgatttttttagaggttgttttgatttagggaggagattgtgtaggtagtaggaagttggttaggtagagaaagtatgggtgttgggttgatgagggtgggattggatggggttagaaattgggagttaaagttaatattattatatggtattgggttttaggtgtttattaagggttgggtgtggagttaagtattttttatttatttatttatttatttatttatttatttattttgtaattatggattgagtatttttttgtatgaggtgttttgttgggatttggggatatagtgatgattaagagagataaagatggagttgttatttaggagtgggtagataa

SEQ ID NO: 3769 - DNA, 2495 bp, Artificial Sequence
  chemically treated genomic DNA (Homo sapiens)
atatagagggtatagatttttttttattttttttttttttataaaagaaatgtaaatagaaaatataaataagagtaaaattttatgtaaatttattatttaattatggttaatttttaatattattgtttttttttaaaattgggagtttgggattatattggatttattatttggtaatagattttgattttgtaatatatttttattgtaattttatattattatttttatggttatagatttggtttatagttgtgaaagtagatttattataatgggattagttaattttttttttttggatattaggatatttttaattttttatttttatatagatatttaagtgaatgaagtaaaatgtttgtatatatttttagttatttaaaggtatgatgttagattgtttttttttatttatatttttattatattagaatgttgattatagttatttttgatggtatgatgtgagattattattttgtttttatatttattttttttaaatgttttgtaatgaataggttttatttgtataaatataatattatttaaaatgatgttatgaaaatttttatatgattattgtttttatggtaatggtttgttatggttgtttgtaattttatataggggataggttgtaatttatttaattattttttattattgattggttgggttttttttaatgtttttaagattgttatataggaaatttattttatatttggggttatgtttttagggagtagtttagtaaaggttggtgaatagattttatatttttggtttattttgttaagttgtttttttgaaaagatgttttaatttttttttttattggtagtgtgtgggaatgtttgtttagttgtttttttttttttgagatggtttaggtttttggatagttgtattttttgttaggagggtaagagaaagtaggaaataatttggttagtaagtgattttagatttagagttaggagtgatttttaataagtttgatttttagaatagaatttgtagagaaaaagaaagtaagtaaggaaaaaaaaaaaaaaatttttttttattggaaaaaatatatatatatatagattaaaataatatttggtatttatgttgtatttttaaaattttttaaatgttttataaatattagttaattaattaagttgtttaaatttggttgtagttggtggagagagtttgagaggagttaaaaaaaaaatgggggagttagtgttatataattttagattttattgttgtttgtttggggtgtgattataggtttttggttgtattataagaatagttttgttttaatatgttgtatgtttgattttgtagttttttttgtgttttttgtttttttattaattgttgatttatagttttttgtggtgttattgataaggataataataattgtaagttaggttgagttttgggttttgggtttgtatttttttttggatatgttagtattaattttatttaatatatgaagagagaggagatttgtttagggttatggagttaatgatattttttttttttttatttattattgtatttattttgtatatttttattgatgatattgtgttttaggtaggaggttggaaatagttttttgtggattttatattttattattgggaatgtgataatttagagaaaattaaatatgtgaataatatagttatgtgataataatgggaataagaattaaaatttatttagtatttatgtagtaggtatattattgtgttagggtttttatgattgtgttggggtggatgttggaattttattttatggatgatggaatgggggtttagggaaggtgggtatagaggtggttaagaggggagttatgttgttatttaggtttgttggttttagtaattgtgtttttttgaggtagtttttttagttggtttagttttgaggttgaaatatagatttatttggaaagtttttagtttagtgttgttggtgttgtttttgatgtttttgtttggatgggttttttgggttttttatatatttggttattagttttattttttttaggttgtttgatgttggttgggtttttgtttattgtgggttttgtttgtttattgtgggttttgttttttttttttgtgttatgaagattttgttatgtttaattttaaatggaaatgaaatgagaagttggattttttgataataaaagtagttgaggttttaagtggttgattaggaaaaggaagttgaaatggtaatatttatatttaaagtaggtggagtggttttaggtattttgagattttatttatttgttatgagaattgggttttaagggtgattttttgttagagttaagattgggtgaggttgggaatgggagaaagaggtaggataatgggtagatagttttgggttttttgtagtgagggtagataggggtttgtgagtttttttttttggtt

SEQ ID NO: 3770 - DNA, 2495 bp, Artificial Sequence
  chemically treated genomic DNA (Homo sapiens)
agttagggaaagaggtttatagatttttatttgtttttattgtaggaagtttagggttatttgtttattgttttgttttttttttttatttttagttttatttagttttgattttggtaagggattatttttggggtttggtttttatggtaggtgagtggagttttagagtgtttaagattattttatttgttttgggtgtaaatattattattttgattttttttttttgattaattatttaagattttaattgtttttattattaggaagtttagttttttattttatttttatttgaagttgaatatggtaagatttttatggtataggagaaaaaaatagaatttatagtggatagatagaatttatagtggatagaggtttagttagtattagatggtttgagaggggtgaggttggtggttaaatgtgtgggaggtttgggaggtttatttaggtggggatattagaggtagtattagtagtattgagttaggaattttttggataggtttgtattttagttttgagattggattaattggaaaggttgttttggggaagtatagttgttagggttagtaggtttgggtgatagtatggttttttttttagttatttttgtatttattttttttggatttttattttattatttatgaagtggggttttggtatttattttagtatagttatgaggattttgatatggtggtatgtttgttgtataggtgttgggtaagttttaatttttatttttattattattatatagttgtattatttatatatttgattttttttggattgttatatttttaatagtaggatgtaggatttataagggattgtttttaattttttgtttaaaatatagtgttattgataaaaatatgtagaatgaatgtggtaatgaatgaaggaaggaaggatgttgttggttttatgattttgggtaaattttttttttttttatgtgttaggtggagttgatattggtatatttaggggagggtgtaggtttggagtttgggatttagtttggtttgtagttattattatttttattaataatattataaggggttgtgagttagtagttggtgagggagtaggaggtgtaggagaggttgtggagttaggtgtgtagtatgttggagtagggttatttttgtggtgtagttggaggtttgtaattatattttaggtaggtgataataaaatttggagttgtgtagtgttggtttttttattttttttttagttttttttgagttttttttattgattgtagttagatttaggtggtttaattaattagttagtgtttataaagtgtttgaagaattttaaaagtgtgatgtaagtgttaaatattattttaatttgtgtatgtgtatgttttttttagtagagaggggtttttttttttttttttttgtttgttttttttttttttgtaggttttgttttgagaattaggtttgttaaaaattatttttggttttgggtttggggttatttgttggttaaattattttttgtttttttttgtttttttagtagaggatgtgattgtttaggggtttgaattgttttagggagaggagggtggttgggtaggtatttttatgtattgttggtgggaggggaaattggaatatttttttgggaaagtagtttggtaggatgaattaaaggtgtgaaatttgtttattagtttttgttgggttgttttttgaggatgtaattttagatatggagtaggttttttgtataatgattttaaagatattagaaaaagtttagttggttaatgataggggatggttaagtgaattatggtttattttttatgtggaattataggtagttgtaataagttattattatgaaaatggtggttatatagaaatttttatggtattattttaaataatattgtgtttatgtaaataaaatttgtttattgtaaggtatttagagaaaataagtatggaaataaagtaataattttatattatattattaaagataattgtaattaatattttgatgtagtaaaaatatgagtgaagaaaaataatttaatattatatttttaggtaattaagaatatgtgtagatattttgttttatttatttaagtgtttgtatgaaaataaaaaattgaaaatattttaatatttaaggaaaggagattggttgattttattatggtgaatttatttttatagttataggttaagtttatagttatgaaaatgatggtatagaattataatggaaatgtgttataagattagagtttgttattaagtagtagatttagtgtgattttaaatttttaattttagaaaaaaataatgatattaaagattagttatgattgagtggtagatttatatgggattttgtttttgtttatgttttttgtttgtattttttttgtaagaaaaaaaaagatggagaaaaatttatattttttgtat

SEQ ID NO: 3771 - DNA, 2491 bp, Artificial Sequence
  chemically treated genomic DNA (Homo sapiens)
aaaaaagaagatatttatggtgtttttgtattatatgtttgatagatatattatgtgtatatggtgggtatgtgttttgtatgattaagttttttttatgtgtataatggatataaaatgtgtgggaggaggatatgttatgtgggaggtgaatttgttgggggtatttgttatatgggatggttttatagtatttgtaataattatattttgggtaattatttataatataaaatgtgtattaatgtatttgttttgtgtattttttatttttttgtgtatatattgtgtagggtgggtatatattgtgtatgatgggtataggttttgtgtttgtttagtatgttatatgtgtgggatgagtgtaggttatatgtggagtatatgttgtttatgtttgtgtgaaggttatattttgagtgtgtgtgatggttgtattttgtgagtaatagtatttaaggtataaatagtgtttataaagaatgtgttgtgtttgaggagtgtatatggtgtgggtgatgggtatattttggggagggatgtgttgtataatagatgtgttatatgggtgatgagtatatattgtgatgtatatatagtgtgtgataatattatatggggtatgtgtgtgtatatgttatatatggagtatatattgtatgtgtgatgggtatatagtgtgttgggtataatgagtaataagtataggtagtgtatataatggatttattttttatggtgaatatatattgtgtgggagtgttaagtatatattttgtggtataaataagttttgtgtgattagtatatggtgtgtatggttgtatagtgaagttgttattgtgatgggtttgtttggtgtgtattaggtattttggtatatggaggttatgatgggaatatgggatgtgtgtttgagtgggagtaggtagaggggatttattttgtggggagggggtatggtagggagtagttggatttttatttgtttttagaatttttagatttttgagtttattgattatattgttttaggtttttttttaagtttttttttaaatgtaattagaattgtttgaagaatgtggggaattttagagatatgtgttgtttttaggtgggtttggagagagggtttttttttgtaattttatttttttttgatggaggggaggggagggggaagggaaggttgtgattttgttattttgggaaaggtttttaaggtagatttttgtttagttttgtgtttttttagtttggttggtgtttgttgggggtggggtagtttttttttaatttgtgttggttgttaagggaggttttattagagttttatttaagaagatgttaattgtgatatttttatatgattaatgatttaggtaatttgtatagtgtgaagtggagagtagttgtttttagtatatttttaagttgtatattttttttagtgtagggtgggggaagaaggtagttttagttttttttttagaatagggtaggggtttttgttgttgagttttttggttgatgttgtttatttttatttgtttaagattttatttttggtttggaggtttgtggatataatttagtattttgtgtatgtaaaaatagtagttattttttgtttaaggagttagtttttttaggggtttttatttttgtagtgtttggggagttagtttatttgggggtattatttgatttagttggtttttttttattagtttagatattgtaggattgaagtttttttttttttattagtgattttaaattttagtatttaattattagttttaaggtgttggttttttattatattttttttttgggagtttttgagggttttagttaggttggttttggttttttttgtaggtggtggtgtttatgatggtgagtgtggatggatatgtgttggttgtgtttgataatatgtttgtgtataataattttaagtatggttgtagggtgtgttgtttggatttttttgaaggttaggatttttggtttagttttggttgttgtgggtttagttagttttttaggttttattttagtgtggttttttgatttgggtttttttttgttttttagttgttattttttgtattaaggttattagttttggggagggttggattatgggtggtgttattgttattgttattggtgataatttttttgatgggttgtaggttgtgtttggaaatgtgtttgtgtggagtgaggtgggttaattttgttagtttttttttgggtttaggggttgggttttttttttgttggtgtgggatttgtaggttttttttttttttttgtagtttattatgttttatgttatttgggtgtagatgtttttgtggtatatttttggggtggtggaggtgatttttttttataagtttaagtagttttgtaagggatgttttggttgttttgtttatataggtaaggagttgggtgggggagtggaggttta

SEQ ID NO: 3772 - DNA, 2491 bp, Artificial Sequence
  chemically treated genomic DNA (Homo sapiens)
tagatttttatttttttgtttgattttttatttgtgtagataaagtggttggggtattttttgtaaaattgtttggatttgtaggagagggttatttttattattttggggatgtgttgtgggggtgtttgtatttggatggtgtggggtgtgatgagttgtgaggggagaggggaggtttgtaggttttgtattggtgaggggagggtttagtttttaggtttagagggagattggtggggttggtttattttgttttatatgagtatgtttttgaatatgatttgtaatttgttgaagaagttgttgttgatgataatgatggtggtgttgtttgtggtttagttttttttggggttgatggttttgatgtagggggtggtagttgggaggtaggagaggatttaggttaggggattgtgttgaggtggggtttggggggttggttgggtttgtggtggttggggttgggttgggggttttgatttttggaggggtttaggtggtgtgttttgtggttatgtttggagttgttgtgtataaatatgttgttggatatggttagtatgtgtttgtttatgtttattgttgtggatattattatttgtggggagagttgaggttagtttggttggggtttttgggggtttttgggaggggaatgtggtggggaattagtattttgaggttggtggttggatgttggaatttagggttattggtgggaggaggagggttttaattttgtagtgtttgagttggtggaagggggttagttggattaggtgatatttttagatgaattgattttttaggtgttataaaaataaagatttttgaaaaaattggttttttaggtaaagaatggttattgtttttgtatatatagaatgttgggttgtatttatggatttttaagttaggaatggggttttaggtaagtggaggtgggtagtattagttggagaatttagtagtaggagtttttgttttattttggggagaaaattggggttgttttttttttttgttttgtattgagaggggtgtgtagtttggggatgtgttaagggtagttgttttttgttttatgttatgtaaattgtttgggttgttaattatgtaaaaatgttataattagtatttttttaagtgggattttaatgaagttttttttggtagttagtataagttgagaaggagttgttttatttttagtaggtattaattaggttggggaggtatagggttgggtagagatttgttttggaggttttttttagggtggtagggttatagtttttttttttttttttttttttttttattaggaaagggtggggttgtaaggggaaattttttttttagatttatttggaagtggtgtatgtttttgggattttttgtattttttaggtagttttggttgtatttgaggaagaatttgaggaagaatttgaaatagtgtggttggtgggtttaagggtttgggggttttggaaatagatgaagatttaattgttttttgttatgttttttttttataggatgagttttttttgtttgtttttatttaggtatatattttatatttttattatggtttttatatattagggtgtttgatatatattagatagatttattataatgataattttgttatataattatatatattgtgtgttgattatatagggtttatttatgttataaagtgtatatttagtatttttatatagtatatatttattatgaagagtaagtttattatatatattatttatatttattatttattatatttaatgtattgtatatttattatatatataatatatgttttgtatgtggtgtgtatgtatatatattttatgtaatgttattatatattgtgtatatgttatagtatatgtttattatttatatagtatatttgttatataatatatttttttttagagtatatttattatttatattatgtatattttttagatatagtatattttttgtagatattgtttatgttttggatattattatttataaaatatagttattatatatatttggggtataatttttatataagtataaataatatgtattttatatatagtttgtatttattttatatatatggtatattaagtagatatagagtttgtatttattatgtatggtgtatgtttattttatatagtatatgtatagagaaataggaaatatatagaataaatatattaatatgtattttatgttgtaaatgattatttaaaatatagttattgtaaatattgtaaagttattttatatagtagatgtttttagtaaatttattttttatatggtatattttttttttatatattttatatttattatatatataggaaaagtttaattatatagagtatatatttattatatatatatggtgtatttgttagatatgtggtatagagatattgtgaatgttttttttttt

SEQ ID NO: 3773 - DNA, 2395 bp, Artificial Sequence
  chemically treated genomic DNA (Homo sapiens)
aagtttatttttatttttgggattttgtatttgttggttttttagtttggaatgtttttttattatagtaagatttgtttttttattttttttagatttttgtttagatgtgatttttaagaagtttttttgttttttttatttaatttgggtttttatttattttgttttttattttttttttttattttattttttattatggtatttattattgtttgtggttaaattttttatttatttgtttattttttgttttattattggaatataagttttatagagtaagtagtttgttttttttgtttatttttgtatttttagtatttagaataagtttggtatatagtagttgtttaggaaatttgtgtaaaatgatgaataattaattattattttttttttatgattattgaagagttatgtttttgttgttgtttgttttttttttttttttgggataaatttggtttttaattttaattttaggagatgaaggttgtatttttaagggaaaaaaatgtatttaaggaataatttgatgataaaatttttaattttttgtaatatggattgaagtttgtgtttttttagttttatttgaagattttaaaatttatattgttttttttaaattttaatatttagattgttttttaaatttaaagttgtggatgaatttttgtgatttttgtatgtattttgattgttatggttatttgaagttttttttttaaaattataggatggtttagttaaattatgttttttttaaattattttattgagttttttttgttatattttaaagagaagatgtatttttttattagtagttggaatttgaaagaataaataatttaaaatagatttagtttttgttggtttttatgattatgaaggtatggaatattatttattaataagtgttgttggttgattgtttttttttgtatataaaaaatgagtatgtatataattgtagtaatttgtttttgttgtagagtgaatagttttagaaatggattattttgttttattttgtttttatatatgtgggatttagtatgaggttatttagaaataatagaattaggttgaggttagttaatatagttggtagttgttattgaatgtttattgggtggttgtaggtttttggttgattatgtttttaagagttggttaatggagtttttgttatagttttggttaagttagtatatttaatagtttgtagtgtaaatgaaaaatatataggtttgattagggagtattttttttttttgtttttttttgtaaagagaggaaagtgattgttttggaagtttttgatattaatagttatgttggtatgtggttgtaagataatttgagttaagatggtgatatgttatttaaaataataaggttggtatagtggtttatgtttgtaattttagtgttttgggaggttaaggtgggaggttgggtttaagtttaggagattaaggttgtagtgagttatgattgtgttattgtgtttttgtttgggtgatagagtagaattttgtttttaaaagaaaaaagtaatagggtgtgttgtgttattgttatatttataaattattttttattttttagagtatggttgtttttatgattttatttgttgtaagagattttaaatgatattgattaatatttttttgatagtgtaagtttttatttttagaattgagtattatgtaattgatgatatggggagtggggtttgaattttttggattatttagggttgggatgtgagtgttattggagagttttttggtttataggaaggaagggttgtatatgggtatagggttatatggaggtattgtatgagtggtgggaggttagttggtattaagtattgttttttattattagtgggtgtgaatatgattgtaggttatttttttgtgttgtttaggttttgtttttattttttttttgttggtttgattaagttgtttattgtttgtagatggtaataaaatataattaagttgtttgttgttgaagtttttgtaggaaaaaattatttagttttattaattttgtaattatagtttttttttttttatattgaaatagttatttatatgatttttttataatgtgaagtttttaggaatatagttattatagtagagttaattgtaatatgtttgaatgtaaggatttaaattattgaggattattgttattttgatatttgtataaaattatgtattgttaaaaaaaaaaaaaagaaaaagattatgtattgttattgaggtagtttgtataggatagtaagattttttttaagtggtttttttttgatagtttttatagatggtttttttgtgagttgttattatagtttttt

SEQ ID NO: 3774 - DNA, 2395 bp, Artificial Sequence
  chemically treated genomic DNA (Homo sapiens)
aagggattgtgatggtaatttataggaaagttatttgtgaggattgttaaaggaaagttatttggagaagattttgttattttatataaattgttttaatgataatgtataattttttttttttttttttttttgatagtgtataattttgtataggtattagaatggtagtaatttttaatgatttggatttttgtatttaaatatattataattagttttgttataataattatgtttttaagaattttatattataaaaaaattatataaatagttattttaatatgggaaaaggagggttgtggttatagagttgataaaattagataatttttttttataggagttttaataataaataatttaattatattttgttattatttgtaaataataaatagtttgattagattaataaaagagaaataaaagtaaaatttgaatagtatagaaaaataatttgtagttgtatttatatttattgatggtagagaatagtgtttgatgttagttggttttttattatttatatagtatttttgtgtggttttatatttatgtgtagttttttttttttgtgggttaaggggttttttagtggtatttatattttaattttgagtggtttagaaaatttaagttttattttttatgttgttagttgtataatatttagttttgagaatgaaaatttatattgttaggaaaatattgattaatattatttaaggttttttgtagtagataagattataaaaataattatgttttggaaaataaggagtggtttataaatgtaataatagtatagtatattttattattttttttttttagagatagggttttgttttgttatttaggtaggagtgtaatggtataattatagtttattatagttttgattttttgggtttaagtttagttttttattttggttttttaaagtattgggattataggtatgagttattgtgttggttttgttattttaagtggtatattattattttaatttaggttgttttatagttatatgttaatatggttattaatgttagaaatttttagagtaattatttttttttttttatggaaaaagatagaaagggaaaatgttttttagttagatttatgtattttttatttgtattgtgggttgttaaatgtgttagtttaattaagattgtaatgaggattttattaattagtttttagaaatgtggttagttaggagtttgtagttatttagtgggtatttaataatagttattgattgtattgattggttttgatttgattttgttgtttttgaatagttttatgttgggttttatatatgtaaagataggatgagatagaatggtttatttttgaagttgtttattttgtagtaaaggtaggttgttgtgattatatgtatgtttattttttatgtgtaagagaaggtagttagttgatgatatttgttaatgaatgatgttttatatttttatagttatagaaattaataaaggttgaatttattttgaattatttatttttttaggttttaattgttaataaaggagtatattttttttttggggtataataggagggatttagtaaagtagtttggaaaggatatggtttagttaagttattttgtggttttgaaaaggaagttttgagtgattgtagtagttaaagtatgtatagaagttataagaatttatttataattttagatttgaaaaataatttaaatgttaggatttggaaaaagtagtatgaattttaggatttttgaataaaattgggaagatataaattttaatttatgttatagaaaattggagattttgttattaaattgttttttgggtatattttttttttttaaaaatgtaatttttattttttgaagttgaggttgggagttaggtttgttttaaaaaaaaaaaaaaaataaataataataaaaatatagttttttaatgattatagaagagaaataataattaattatttattattttgtataaattttttgagtagttattgtatgttaggtttattttaggtgttggagatataggagtgaataagagagataagttatttgttttgtggagtttatattttagtggtgaaatagaaaataaataaataaataaggaatttaattataggtagtgataaatgttataatgaaagataaaatagaggaaggggatagagagtgaggtgaatggaggtttaggttggatggggaaggtaagaaggttttttggaagttatatttgagtagagatttgaagaaagtgagggaataggttttgttgtagtggaagaatattttagattaagggattagtaagtgtaaaattttggaggtgggagtgagttt

SEQ ID NO: 3775 - DNA, 2469 bp, Artificial Sequence
  chemically treated genomic DNA (Homo sapiens)
gttttttttttgagggttttaggggagatttttttttgttttttttagttttggtgtttgttggtaattttaggtttttttgggtttgtaaatgtattgtaatttttgtttttgttattatatagtttttttttttgtgtttttgttttttttttttagaagaataatagttatattggattaaagatttattttaatgagtttattttaatttgattataattgtaaagattatttttaaataaagttatatttataggtattgggagttaggatttattttaatattttttggattttatgatatttagtttagtttataattaaatttataatgttttttgtgagaaagaagtagtagttatgaagaaagtttagatatttttaagggtggagagtgtttttgattttttttttgatagttttgagtttttttaaatattgttgtttttattgattggtttgttttaggagtagggtttttgatttttaaattttggagtgtagtttagtaaagtgagataagtatattttttgtttttgaggtttaggagtattggaagagtggatagattaattgtgaatagagaatgttttgaaaatataggaagaattatttttttgtagatgtagttttggttttttgtgggagtttttggatttttggtgaggtagatttggaaggttatagtaggggatgtaaagagtttttttttagatttgttttttggtttattattttgtttttttaaatgtattttaagggttttttattttgattattgtttagtggtattgttgtagaggaagtaggagggtgtttggtggagtttgggaggtttatgaatttttgtatttggagaaatgttaatgttgagtttatatttttttttttgtagtatagaagattattattaggtttgtgtgtagaagtttaagtagttagagggggtttttgtgaggtttgtgggatttttttggttagaagatgggttatggtggaggaaggttatgttaaatggttgtgatttattgtttatagggaagagtatgtaatatatatttaggagggtttaggtagttggaattgtggtggttttatatttttaaagtgaattttaaatttgatttatttatgttgtttttatagtaataggaaaattgttttgatttatagttatggaagattttgtaaaagaaattgtaggaggaaaaaaagataatgttaggaaaaaaaaaaatttaatgaagtattatttttttatttatttagttaattgagaataatagtttgtgtatttggtaattaaatgggaagtggtattttgtgttgtaatatgaatttgtttatattaagtgatttatttttttgtttagatatattgtattgagaattttttttaagtagaaagttattaaaaatgtgagaataagtagtttttattaatttgaagtatttggggatttagaggaatgataaatgtaaatagtttagaatttagaaattgttttgaatatttaaattttagattttgggaatgtgtgtatgtttttagttagttagatgtagataatttttttttttgtgaggtttttttttatttatattttgtttggatagggtggagtttttgtttaaattttatttttagtttgaagaaagattaaattattgtagattaaagttagtgttatttggaaaatggaaaagatataggagatagggtatgttttttttagtttgattgtgaatttagggttttttttttggtgagtgtttttgggaggttgtataaggtttatgtttagttattgggttaagttgaaggaatgttttttattttttttatgtttgtattgaagatttgtgtttggtaattattttatagattttttttattatttgattttgggtttgtagttaatgttgtgtttagtatatttttgtgtgattttgataagaaatttattggttaaagattttgtgagttatttttgttttttgttttttttattttttatttaatatgtttgtttgtattatatatgtataaatataattgagttgtattatattaattttttttttttttaaaaatatattaaaattattttttttttttaatttgtttatttatgagtttttgtatggtaatattttgatttttattttggttgagaaattatataaattagtttattgtatgttgttttattttgtatttatggttatgatattgaaattttaggattatatatagatagtatagtttttggttatttaagtatgtaaatagtttggttttttataaagtggaaaaatattttttgtgtattattttaatatgattagtatgttgaaatttggtgtgtaattgtgttaatatttttttggttttgaggagtaaatttggagaattttatggtaatatataaaatgtaaagttggtttgtttattattgggattt

SEQ ID NO: 3776 - DNA, 2469 bp, Artificial Sequence
  chemically treated genomic DNA (Homo sapiens)
aaattttagtagtaaataaattagttttgtattttatatgttattatgaggttttttgggtttgttttttagagttaaagaaatgttgatatagttgtatattaagttttaatatgttgattatgttaaaatagtgtataagaaatatttttttattttataaaaagttagattgtttatatgtttaagtggttagagattatgttatttgtgtgtggttttgaagttttaatattataattatgaatataaaatggagtagtatgtaataaattagtttatgtagttttttagttaaaatgggaattaagatgttattgtgtaagagtttataaatgggtaggttagaaaaggggaataattttaatatatttttgaaaaaaaaaagaattaatgtaatataatttggttatatttatatgtatataatatagataaatatattaaatagaagatgagagagatagaggatagaaatagtttataaggtttttggttaatagattttttattaagattatatagaaatatgttgagtatagtattaattataagtttaggattaagtggtagaaaagatttatgaaatggttattaaatatggatttttagtataaatatgagagagatgagaggtgtttttttagtttggtttagtagttgaatataagttttgtgtaattttttaggagtatttattagaggaggggttttaagtttatagttgggttaaagaagatatgttttgttttttatgttttttttattttttgagtagtattggttttggtttataataatttagtttttttttaagttagaaatagaatttaagtaggggttttattttgtttagataagatataagtgaaaagagattttatagaaagaaaaattatttatatttgattaattgaagatatgtatatatttttagagtttagagtttaaatgtttaagatagtttttggattttgggttgtttgtatttattatttttttaagtttttaaatgttttaggttagtgaggattgtttgtttttatatttttaatagttttttatttgaagaaagtttttagtatagtgtgtttaaataaaaaaataaattatttaatgtgagtaggtttatgttgtaatatgaaatgttattttttatttgattgttaaatgtataaattgttatttttagttgattgaataagtgaaagaatggtattttattaaattttttttttttttggtattatttttttttttttttatagttttttttatagagttttttgtggttataggttggaatagtttttttgttgttatgagaatggtataaataagttaagtttaaaatttattttgggggtatggagttgttatagttttggttatttaagtttttttgggtgtgtgttgtgtatttttttttataggtagtggattatagttatttaatatggtttttttttattatggtttattttttggttagaaaaattttataagttttgtagaggttttttttaattgtttgggtttttatatatagatttagtaatggttttttgtgttgtaaggagagaaatataagtttaatattaatatttttttaagtgtagaaatttatgggttttttaaattttattaagtatttttttattttttttataataatgttattgagtaatgattaaaatgaggagtttttggaatatatttggaagggtagaataatgggttaggaagtgggtttaggaaggggttttttatattttttgttgtagttttttagatttgttttattgaaggtttaggggtttttataagggattagagttatatttgtaggagggtggttttttttgtatttttagggtattttttatttataattaatttgtttatttttttagtgtttttggattttagagatagaaggtatgtttgttttattttattgaattgtattttaaggtttgaagattaaaaattttatttttaagataagttagttagtgaggataatagtatttagggaagtttaaggttgttaaaggaaaggttaagagtgttttttatttttaaaaatatttaggttttttttatggttgttgttttttttttatgaagagtattgtgggtttaattgtgggttgaattggatattataagatttaaaagatattaggataagttttaatttttaatatttgtgaatgtgattttatttggaaatagtttttgtagttgtaattaggttaagatgagtttattagggtagatttttaatttaatatgattgttgtttttttaagagaagaagatagagatatagagagaagagttgtgtaatgatagaggtaaagattgtaatgtatttataaatttaagaaggtttagggttgttaataaatattaaaattagaagaggtaaggaaggattttttttagagtttttagagagaaagt

SEQ ID NO: 3777 - DNA, 2485 bp, Artificial Sequence
  chemically treated genomic DNA (Homo sapiens)
ttattaagtttttttaattggatgtttatgaaattttaggtttaagattagatttttttttttgatattagtatgaggtttttattttgttaattgtagggaagggtgtggtggattttaagatttgttgttttgtgttttgtttttgttttagtttagttgaggtagtggttagtaattaaggggaaaaataaatttttaagtgttgagatttagttattgatatagtttttggagtaaatttgtattttgttatttattgtttggttaggtaataagtttattttgtttggatttgagtagtagtttggagaaaaaaaaaattatattgatggtaatagtttgaaatatgaaattgtttttatttttagtttggagaaattgtagggtatgttttgtttaagtaatttttttgattttagtttgaatataaatggaatattaaaagtgttgggtatatttttttttattttttatttagagattgattttattattataattgtgggtttgtttggtttttggtagttttttttttttaagatttttaatagttttgtagatgattgttgtagtttagtttttttagatggggttgtagagaagaaaggttatgtttttaaaggtttagtattgttttgttattgtttagtttggtttggttttatttagttgtgtgttttttttttatttgtttttttgagtttttgtgtgggtttttgttattattatttttttatgattatttattttagtaaatagtaatgatataagatgtatgatgtatttttttttttttttttttttttatttttttttttttttttatttttgggattattgaaaagttttataattatttataaatatgtaaagggtgtttataagattggagtaagggtggtggtatggggtaaagttagtagtgtttttttaggtgttttgtgatagaggagaagggtgtatttggtttgttgtagtttgagtagattttggggttgaaagttatttttttgattatgtgtttagattttataaaattatagtttgggtttattggttgggtaatattatttgaagtgagtagaataatttaaatttttttatttgtaatataaaaggaaggggttatttgttttagggatgggtatgttttggtgtaatttggtagagtattttagtaattttattagatgttaggttagggtaaaagtggaaatgtgtttgtttagtatattttgggttgattatttggagtgtatgtttttgatttatttgtatataatttatttagggggtgttgtaagagttatgtgatggttaaaggaatttaatgtgttttttattatgttttttaaataagtttttttatgttgattgttttttggaattaagaagttttatttttttagttttgtgatagattttaaaatgagatttttataaatttgagaataagttttagttttggttttaggattatttgttttgattttaagggttagttgaggagtgtgaaggttaggatgagttatggggtgagtgaaaattgtagttgggaaagttttgttttgaggagtttgtatttatgtttttatatattttgaagtaattagtttttatttgtatttgtggtttttttgtttttttggttttatgaggagatagtagttttgttatttattttttgagagatagtgtggtaaagttagggatagtatgggttttagaattagattttttatgtttgttatttattagttttgtgattttaggtaagttgttgatgtttttgtgtattagttttttttggtggtaaaagttatttggtaattattttaaaatttaatagtttgagataatgattatgggattgttgtgggttaggaatttgattgggatttagttgggagagtttgtttttgttttatgtgatgttggttagagtgatttaattgaggttggaagatttatgatggttttatttatatgattgaggttttagagttagatgtgggttgagggattttggtttttttttatgtagtttttttttttatatggtttttatatatgtagtggtttaggttaagtttttttatatagtggttagaatattttaagagaatgaaaatgaaagttgtaaggtttttgttaatatttgttattattttatttttatttattttgttggatagagtgaattatatggttaatgtagatttttagggaggagaaatgggttttattttttttaatgggagatgtggtatataaaaatatagatgggaggtttttataagagttaaataatataggtggagtatttaggatagtgtttggtatagagtttgtgtttataaatgttatgttttattataatatgattattttggtattattttaggaataaatatagtatatgtttattttttgagtgaaaggttttttaatattatatggaggagagataaattttttaggt

SEQ ID NO: 3778 - DNA, 2485 bp, Artificial Sequence
  chemically treated genomic DNA (Homo sapiens)
gtttggagagtttgttttttttttatgtggtattgagaagttttttatttaggaagtaaatatgtattatatttgtttttgaagtgatattagaataattatattataataaaatataatatttatgaatataaattttgtattaggtattattttaaatgttttatttgtattatttaatttttgtaaagattttttatttgtgtttttgtgtgttatattttttattgagagaggtggagtttattttttttttttggagatttgtattagttatgtgatttattttgtttagtagaatgggtaggagtggaatggtgataggtattaatagaggttttatagtttttatttttatttttttggaatgttttaattgttatgtaaggaagtttagtttagattattatatgtgtagagattatgtaaagagagaggttgtatggaggagaattaaggttttttagtttatgtttagttttgaggttttagttatgtgagtagggttattgtggattttttagttttaattgggttattttagttaatattatatggagtagagataagtttttttagttgagttttagttaaatttttgatttatagtaattttgtggttattgttttaaattattaagttttgagatgattgttagataatttttattattaaggaaaattggtgtatagagatattaataatttgtttaaagttatagggttagtaagtggtagatatggggagtttggttttagagtttatgttgtttttaattttgttatattgttttttaaaaagtaagtgatagagttattgtttttttatgagattaaagaaataaaaagattataggtgtaggtgggggttggttgttttagggtgtatagagatataagtataagttttttaagatgaggtttttttagttataatttttatttattttatggtttattttagtttttatattttttaattaatttttagggttagagtagatagttttggagttaaagttagaatttgtttttagatttatgaaagttttattttgaagtttgttatggggttggaagaatgaagttttttggttttaagagataattaatgtagagagatttgtttaaaaaatataataaaagatgtattgggtttttttggttattgtatagtttttgtaatattttttggatgagttatgtgtaaatgaattagaaatatgtattttaagtaattaatttaagatgtattgggtagatgtatttttatttttgttttaatttgatatttgatagagttgttgagatgttttgttaaattgtattagggtgtgtttatttttgagataaataattttttttttttgtgttatgaatggggaggtttgaattattttgtttattttaaatgatgttgtttagttaatgggtttgggttgtggttttgtggagtttggatatatggttaagagggtgatttttaattttagagtttatttaggttgtagtaggttaagtgtattttttttttttgttatgggatatttagaagggtattattagttttattttatgttattatttttattttagttttgtaggtattttttgtatatttgtaaataattgtggagttttttagtaattttaaaagtaaaaaaaaaaaaaagggtaggggggaagaaaagaaaaggaatatattatatattttgtattattgttatttgttggaatgaatggttgtgggagagtaatggtaatagggatttatatagaagtttagaaagataagtggagaaggagtatatagttgggtagagttgagttaagttgggtagtgatagggtgatgttgagtttttggagatataattttttttttttgtagttttatttgagggaattgagttgtaataattgtttgtaaggttattaagggttttggaggggagaggttgttaagagttaggtaagtttataattatggtaatgaaattagtttttgggtaggagataagagggaatgtgtttaatatttttggtattttatttgtatttagattggagttaaagggattgtttaaataaaatgtgttttgtaatttttttaagttgggaataaaaataattttatgttttaagttattattgttaatatgattttttttttttttaaattgttgtttagatttaaataaaatagatttgttgtttggttaggtaatgagtagtaaaatataaatttattttaaaagttatattgatgattaaattttaatatttagaggtttatttttttttttaattgttagttattgttttaattgaattaaaataaaaataaaatataaaataataaattttaggatttattgtatttttttttatagttaataaagtgaaaattttatgttgatattaaaagaagaaatttaattttgagtttgaggttttataggtatttaattaaaaagatttaatga

SEQ ID NO: 3779 - DNA, 2500 bp, Artificial Sequence
  chemically treated genomic DNA (Homo sapiens)
atatattatgatgttgttaattttttggtgttattagtagtaatttgattgttttattttgaatatgaaagttaagttttgaatttttagaaatggattatagggttatgagggtaagtatttatgggatttatatgaggttgtgtttagtttaatttagttttttttgggtttattgattagtaagtatttttagagtattaatttgtggaatatatagtatttttaaaagataagatataagtaaaaaaaaaaaaatgatgttagaggtttggtggtggttaaataattggggagtaatattaatagggtattattaatggttaaaaaaaaaaaaaaatgagttggatgtaggtaggtaattagtaatgtttatagttaagaaaatttttgttggggttgttaagaattgttttttagtatagggttaatggttagtggaaaagattttatagagtaaagaagggtttgagaggtattttgaagtttgagtgagatttatatggatggtaagggataagttggtttttttgtgtggtagatatatggttagaagattagagggttaagtggattagagatgggtgatgagattgagatttgatttgtaattttgttattttttaattgtgtgatatttatttttagtggttatataattattgtaggttttagtttttttatgtgtaaattgtagatgatggtattttttattggaagagtaaatgataatgtatatatagtatttaaagtaggatttgaggtatatagagttattttttatggtttttattatgattattattattgttattgttaaaggattttgataagaaaataggattaagtgtgagtattaataatttgtttttgttatttttgttatggtgatgggaggtatttttagttgggttatttgatttatgttaatggggtagttggaatgagtaggtggtaggaaaaaaggtaggaaaatggattaaatttggtttataaagtattgagaaggtaatgggagagttaagtttaggatattgttgtttagtttggttttatatgaatttaatattttatatttgtggaattttatgaggggttaagttaggttgtatggtgaattttggtttagttgtgagaattttgggagaaaatgaagtataatagaaatttttatagaaagttgtgggggtattgtagttagagtagagagtttggaatttgttggtttgaattaggatttagttaagtttattttattaaaatttatgaagttaatagttttttttatttggtttttgaaggaatatttttattgtgtaattatttttgtggaaattgtaatattgtgtttgttattatatagtattaatattaaatggttaggtgataaaagttaaggatattaagttaaaagtttatgttgtatttttattgtatattataggttataaattgagagtgtgttttttattattttaaagtttttggggttggatttttgtttagtaattttatttatataatatatttgtaattatttttttaaatttttaatttatttttttgaaataatagtattagggtttttgattgttattttgttgttgttttgtttgagggaattattagatagtgatggtaaatgtaatttatagtataagttaattatttgaatggaggttgttttgaattttttaggtaatgtgatgggtgaagttatagtaatatttttgagtaggttttttttgttattagtaattagttttatgtattagttaaatgttaaggtggggttttttggttagtatattggatttttgttgaagtttttttaggaggtgttgtgggtggggggagtattgtggagagggtaaggttttatttttttaatttgagttttagttaagattttaattgagtagggagtggtggtttatgattataattttggtattttaggaggtttaggtgggagaattgtttgaatttaggagtttgagattagattgggtaatatagggaaattttatttttaaaaaaataaaatatataaaataaataaataaataaataaatagttaggtatggtagtatgtatttggggttttagttatttgggtggttggggtaggaggattgtttgagtttaggagtttgaggttgtagtgagttatgattatattattgtattttagtttggatttagagtaagattttgtgattttatttattttttttttgtataagtggtgatattgaggtttagtgatgaaagattttgtttaaggtaggaatatgttattattttgataggaaggggttgaattaggttataaattttttttgtaagtttttaaattgggtgatgtttgtattatttaggtggttgttggtttttttgtgagttttgttattaagtttttaaggttttagaaaaggtgtttttaaatttatataatatgtattttgagaatttatggtttggtaagtatggtgatag

SEQ ID NO: 3780 - DNA, 2500 bp, Artificial Sequence
  chemically treated genomic DNA (Homo sapiens)
ttgttattatatttattagattataagtttttaaaatgtatattatgtgaatttgaggatattttttttggagttttgaagatttgatggtaagatttatagaaaggttaatagttatttgggtgatgtaaatattatttaatttggagatttgtaagaggaatttatggtttggtttagtttttttttattaagatggtagtatgtttttattttgggtaggattttttattattgggttttagtgttattatttgtataagaagaggatggatgagattatagggttttgttttgggtttaggttggagtgtagtagtgtgattatagtttattgtagttttaaatttttgggtttaagtaatttttttgttttagttatttaagtggttgggattttaggtgtatattattatgtttggttatttatttatttatttatttattttatgtattttatttttttagagatggggtttttttgtgttgtttagtttggttttaaatttttaggtttaagtagtttttttatttgagttttttaaagtgttgggattatagttatgagttattattttttgtttagttgagattttaattgaagtttagattggagagatgaaattttgttttttttgtagtattttttttatttatagtattttttaagggggttttaatagaagtttagtgtattggttaggagattttattttggtatttagttgatgtatggggttggttgttgataataaggaagatttatttagaagtgttattgtagttttatttattatattgtttgaaaagtttaggataatttttatttaaatgattggtttatgttatggattatatttattattgttgtttggtagtttttttaggtaaaatagtaataaaataataattaaaaattttaatgttgttattttagagaaataggttggaggtttaaaaaaatgattgtaggtatgttatgtaaatgaaattgttagataaagatttagttttaggaattttaaagtagtggagggtatatttttaatttgtagtttgtagtgtgtaataagaatgtagtatgagtttttagtttgatgtttttggtttttgttatttggttatttagtattaatattgtataatagtagatatagtattgtagtttttatggaagtgattatataatgggagtgtttttttagaagttaagtaaagggggttgttagttttatgagttttgatgaaatagatttagttaagttttaatttaggttgatggattttgggttttttgttttgattgtgatatttttgtagttttttatgggaatttttgttgtgttttatttttttttagggtttttatggttaagttaggatttattgtgtagtttgatttggttttttgtaaaattttataagtgtgaaatattaaatttatgtgggattagattggataatagtgttttgaatttggtttttttattgtttttttagtgttttatgaattaggtttaatttatttttttgtttttttttttattatttgtttattttagttgttttattgatatggattaggtaatttaattagaaatattttttattattatagtagggataatagaggtaagttgttaatatttatatttaattttgtttttttgttagagttttttaataatgatgatgataatagttatgatgaaaattatgaagaataattttgtgtattttagattttgttttaaatgttgtgtgtgtattgttatttatttttttaataaagggtgttattgtttatagtttatatatgaggaagttgaagtttgtagtggttgtataattattggggatgagtgttatatagttagaaagtggtagagttgtaagttagattttaattttattatttatttttgatttatttagttttttagttttttgattatgtatttgttatatgggaaggttagtttgttttttgttatttatataaattttatttagattttaggatattttttaaatttttttttgttttgtggagttttttttattggttattggttttgtgttgaaggataatttttaataattttagtaggagtttttttaattgtaaatattgttaattgtttgtttatatttagtttatttttttttttttttggttattgatgatattttattaatattgttttttaattatttggttattattaggtttttgatattatttttttttttttgtttatgttttgttttttgaaaatattgtgtgttttataaattgatgttttagaagtatttgttaattaataaatttagaaagggttgagttaaattgggtatagttttgtgtgggttttatgagtgtttatttttatgattttgtgatttatttttgaaaatttagaatttggtttttatgtttaagatagagtagttaaattgttgttggtgatattagagggttgatagtattatggtgtgt

SEQ ID NO: 3781 - DNA, 2419 bp, Artificial Sequence
  chemically treated genomic DNA (Homo sapiens)
aggttaaataattagtaagtggtagatttagtatgtgggtttagatagtttttttttagagattgatttttattatttttttatttagtattttttgtattgtatgagaaaaaatatatgttgtatttgtagttgaattttatataatgtatattaattatatttgggagatagatttatttatttataaatttttagtggttattaaaatatttgatagttaaaaagtttattttaaatgtttgtggaaatgaatggaattggatggttttagtagttttaatttgatttatttaagaaaatagtataatttatatgtagttgtttttttgagggtggtttttgtttttattatttgttagttatgaaatagggttgttttatttttgtatagatatttttagtagaatttgttagtaattaattttatttttttagtatgaatattagttttttttttgtatgtgggaggtagaataatgatttttttaaagatgtttatattttaagttttagaatttgtgaatatgttatgttatatggtaaggtggggttaaggttttagatgaaatgaaagttgttaataagttggttttgagatagggagattattttgaattatttgaatggttttaatgtaattatgagtatttttataagaggaaggtagaagagaaagttaaggtgatattatataagaaatattttatttattgttgtgttgttaatgatggagaaatgggattataagttaaggaatgaggaagtttttagaagttggaaaaggtaaaaaaagaatttttgttttttataagagtttttagaaggagtatagttttgttgatattttgtttttagatttttgatttttagaattgtaagagaatgaatttgtgttgttttaagttattaagttggtggttatttgttatagtagttatagaaaattgtttattgtaggatgaaaagttatttttttttggtattttttaaaggttaatttaagagtatggattgttttgtattttttaggagtattattgtaaagttgatttattattttttttatttgttttgtattattgtgttggggtttattaatgttttgttattgggtgttttgtgtgtaagtagaagtgtgttaagaattaattgttttgatttttattttttgttggtgttttgttatttgtgggttgtttggtttgatatatgaattattttttagttgtttggtgttggggaggtatagttattagtttttaaatattttagatatatgttaattgtaattttaatatatattttttttttattgttattttggaattgttttattggtaatgtatgaaatatgaataagaggaaataattgataaggtattattgttgattaaggggttaatttttgaggaagattaaaaatagatgtttttgaagaagaaagaattgaggaagtgaattttttttttttttaattttttagtttattgtttttatttaaaaattaaattaatatattttgaagaaggtttaaggagattaggaatttttaagaatttatttgtattttgtagtagatagtttgtttgttttttattgaaaatttataagaaataatattgtaatttttgttatagtaaataattggtgggtgtatttttttatgttaaatatatgttaagtataaaaaatgtgtttagaaaaataaataattttggaaggttttttttttagtgtttttttattttttttgttttagtttttttttttgtgatggtgtttaatttaagttttggattttttgttgttgattttagtagtatttttttttgatttgtaggaaattgtttaaggtttttaaaattattttttttataaatttttgttttttttttgaataattttaattagtatttttgtaaaaagttgtttaattaatgattttatgtataagtgtgggtaagtgataatatttggatgtgttgttttttttagaggatttgttttttaaatttttttaaatagagatataattagtttggataatgagtgtttaaaattaaagtttaattttttatggtaggagtgtggttagtgtgtgtgtgtttaggggaggtgatatgggttattggaggttttttttgtgttttttaaattatatgatttgtattatttaaatgttgtttttgtttttattttgatgatgaaatgattttatgaatatattgattattataattatagttagtgatatttatagtatgttttattatttttaataagaaaagtttattttatgttatttttattaataagtttgtgaggttaagaattttattatgtttgtgttatatattagaaattaataaattttttgtaaagggttagagagtaaatattttaggttttgaggtta

SEQ ID NO: 3782 - DNA, 2419 bp, Artificial Sequence
  chemically treated genomic DNA (Homo sapiens)
tggttttaaagtttgaaatatttgttttttggttttttatagaaagtttgttgatttttggtgtatagtatggatatgatggaatttttgattttataggtttattggtgaggatgatatgaaataaattttttttgttgagaataatgaagtatattataaatgttattggttataattataatggttaatatatttatgaaattattttattgttagagtggaagtaggggtagtatttgggtagtataaattatgtgatttgaggggtataaagaaagtttttaatgatttatattattttttttgagtatatgtatattgattatatttttgttatgaagggttaagttttagttttgagtatttattatttaggttgattatgtttttatttgaaaagatttggaaaataagttttttgggaagggtaatatatttaggtgttattatttatttatatttgtgtatgaagttattaattaggtagttttttgtaaagatgttggttgagattgtttgaggaaggaataggagtttatggaaaaggtaattttgaaagttttgggtagttttttgtaagttagggagaaatgttattgaaattaatagtaaaggatttagggtttaggttgggtattattatagaaaggaggattaagataaaggaagtaagaaggtattgggaaaagagttttttaaagttatttgtttttttaggtatattttttatgtttggtatgtgtttggtatggagggatatatttattagttatttgttataataaaggttgtagtattgttttttgtaggtttttaatggggaataaataagttgtttgttatagaatataaatgaatttttgaaaatttttgatttttttaaattttttttagagtgtgttagtttaatttttggatgaggataatgaattaaagagttaagaggagagaagatttatttttttagtttttttttttttaaggatatttgtttttaattttttttaaaggttagttttttagttaatagtggtgttttgttaattatttttttttgtttatattttatgtattgttaatggaatagttttagggtgatggtagaaaaaaaatgtgtgttgaaattgtaattggtatatgtttgaaatatttgggggttggtgattgtgtttttttagtattaggtagttggagagtaatttatatgttaagttaagtagtttatgaatgataaaatattaatagggaataaaggttagagtgattgatttttaatatatttttatttatgtatagagtatttgatgatagggtgttaatgagttttagtatggtgatgtggaataaatgaaaaaagtaatgaattgattttgtaatagtgtttttggaagatatagaataatttatgtttttagattagtttttgagaaatattaggagaaagtggttttttattttgtagtgggtagttttttgtggttgttgtaatagatggttattgatttagtggtttaaaataatataaatttatttttttatagttttaggaattagaggtttaaaagtagggtgttagtagggttgtgttttttttagaggtttttgtagggggtagggattttttttttgttttttttagtttttggaggtttttttattttttggtttatgattttatttttttattattaatggtgtaatagtggatgaaatattttttgtatgatattattttgatttttttttttgttttttttttgtaaggatatttgtgattatattggggttatttagataatttaggataatttttttgttttaaagttagtttattaataatttttattttgtttaaaattttaattttattttgttatgtggtataatatatttataagttttagggtttagaatgtgggtatttttgagaaggttattattttgttttttgtatgtagagagagagttaatatttatgttggagaagtgaggttggttgttgataagttttattgaagatatttgtgtagggatgaagtagttttgttttatggttggtagatagtgaaaatagaggttatttttaggaggatagttatatgtgggttatattgtttttttagatgagttaaattgaagttattaaaattatttaattttatttatttttataaatatttaagatgggttttttaattattagatgttttggtggttattgggaatttgtaaataaatgaatttgttttttaaatgtagttggtgtgtgttgtatgaagtttagttatagatgtaatatgtatttttttttatgtaatatagagagtgttgaataaagggatagtgagagttagtttttggagaaggattgtttaggtttatatattgaatttattatttgttagttgtttggttt

SEQ ID NO: 3783 - DNA, 2353 bp, Artificial Sequence
  chemically treated genomic DNA (Homo sapiens)
tttggaaaatattaattaaataatatattttaaataattttgaaaaagataaaggtatttttttaatttggggtattttattagttattaagaattaatgttattatttttttatttgtttagtgtttagaattttttttaagtttgttgataatggtggtaatgagggttaaaggatggagttgtttagttttggtaaatattggttaggtatagaggtttatgtttgtaattttagtattttgggaggttgaggtaggtagattatttgatgtttggagtttgagattagtttggtttggttaatatggtaaaattttgtttttattaaaaattagttaggtatggtggtatatttgtaattttagttatttaggaggttgaggtaggagaattatttgaattttagggatagaggttgtagtgagttgagattatgtttttgtatttaagtttgggtaatagagtaagattttgttttaaaaaaaaaaaaaaaaaggtatggtggtttatgtttgtaattttagtattttgggaggttaaggtgggtggattatgaggttaggagattaagattattttggttaatatagtgaattttgtttttattaaaagtataaaaataaaattagttaggtgtggtggtgggtttttgtagttttagttatttgggaggttgaggtgggagaatggtatgaatttgggaggtggagtttgtagtgagttaagattatgttattgtattttagtttgggtgatagagtgagattttgttttaaaaaaaaaaagaaaagaaaagaagaaaagaaaatataaaatgtttagttatttaggatataattgtgtggtttgattgtttagttgtattattttttttatttggaaagtgttttagtgattatagaagttgttagaatttttaaaagtaagaagaaagtgatgggaaaatgtgttaaatttataatgggagaatattgtgttattagaaaattatatgattttggtaattttaggagtatggaagaaagattttaaataagtttttgattatgtatttttttttaaatttttttgaatgttgaagaaatgttaaattttattaagttttatagttagatttaatatagatataaatttttttaatgtttgttttagttaaaagtgagtggaatattattgttaaattagtgtatgtgggagaattatttgaggaaaattaaaataggtatagttgggaatattaagttgtggttatattagatgtaagtaggtgtaatagtaaaattttttaggttttaatggattgggttattttgttttttagtttttatatagatgagttttgttttggggtaatatggttgtagtttgagagtttatttgaaggagtttattttttttttattagtttatgagtatagtgtaattttagttaatattgttatatagtttttagttgggttatttggttaaatgtttttagggaaagtagtaagatagaataaaaggataaatgtaatgtggttttttgttttgagtttttgtagttgtggaattatattggtagttaattattattatgttgtatttgtgattataaatttttgttatttaagatgttatttaagttttataagaaatattttgttttttgtggtataatttttttgaggttgggtttgtgtataattataattatagagatttgttttttgtgttttgtggatatgttagtaggtatatagtgttatttgtgtgaaattgaaaatgatattttttattggtgggtgaattgggaaatagtattttgtttatgggtaaattagaaaagatgtttttttttgggtggataaatgagtaaaaggtagtttttttgggttgattaatttttttttaaagttttttttattttggggtgtgggggtggtgtatatggtttggtaagtttaatgtagattttagttgttttttgtgggtaggaatttttggtgtaatgtataatttgtataattgtatataatagttttgattatagaatttatttttataattttgtagttggattatagagtttgttttttagtattttaaaaatatttgtttaattatattagtggatgtttatattaaatatattggtttttttttttatggtaagtaattgttattttttgttaagggtagtgttttaattttggaaataaataggatatttgtaggttgagaaatagaagaattagaggatggtgatttttaggggtttgattagtggtgggtagtggagtggtggaaattatggtggtatttttttattattgtaatgtaatgttttttttagtttttattattattt

SEQ ID NO: 3784 - DNA, 2353 bp, Artificial Sequence
  chemically treated genomic DNA (Homo sapiens)
aggtaatgatggaggttgaggagagtattatattgtgatggtgaagaggtgttattgtggtttttattattttattgtttattattggttaagtttttaggagttattgttttttagtttttttgttttttaatttatgagtgttttgtttgtttttaaggttagaatattgtttttggtagagagtggtagttatttgttataagaaagaagattaatgtatttaatatggatatttattgatgtgattgaatagatatttttagagtattgaggggtaaattttgtggtttaattataaaattgtgaaaatggattttgtaattagggttgttgtgtatagttgtgtaggttgtgtattgtgttaggggtttttgtttatagggagtaattagggtttgtattggatttattaagttatgtgtattatttttatattttaaggtggaggaggttttaaaaaagaattggttagtttagaggggttgttttttgtttatttgtttatttagaaggggatattttttttaatttgtttatagatagggtgttgttttttagtttatttattagtagggaatgttatttttaattttatataaatggtattatatatttattagtatgtttatgaagtataagaaataggtttttatggttatagttgtgtataaatttgattttaaggaaattgtgttatagaagataagatgttttttgtgagatttgaataatattttaaataataggagtttatgattatgagtataatgtggtaatgattaattgttaatgtaattttatagttataggaatttagaataagaaattgtattgtatttgtttttttattttgttttgttattttttttgaaggtatttaattaaataatttagttaggagttgtgtaatagtattagttgaaattgtattgtgtttatggattaatgaaagagaaatgagtttttttagatagatttttaaattgtaattatattgttttagaataaagtttatttgtatggaaattgagaagtaaaatagtttagtttattagagtttaaagaattttgttattgtgtttatttgtgtttaatatggttatggtttaatgtttttaattgtgtttattttgattttttttaagtaatttttttatatgtattggtttaatgataatgttttgtttatttttgattgaaatgaatattaaagggatttatgtttatattaaatttggttgtaaaatttaatgaaatttaatatttttttagtatttaaaaaaatttagaaaaagatatatagttagaaatttgtttgaaattttttttttatatttttaaggttgttagggttatataattttttagtgatatagtgtttttttattgtggatttgatatatttttttattattttttttttgtttttggaaattttagtaatttttgtagttattggagtattttttagataagaggagtgatataattgaatggttaggttatatagttgtgttttgggtggttggatattttatgttttttttttttttttttttttttttttttttttgagatggagttttgttttgttgtttaggttggagtgtagtggtgtgattttggtttattgtaagttttgttttttaggtttatgttatttttttgttttagttttttgagtagttgggattataggagtttattattatgtttggttaattttgtttttgtatttttagtagagatggggtttattatattagttaggatggttttgattttttaattttgtgatttatttgttttggttttttaaagtgttgggattataggtatgagttattatgtttttttttttttttttttgagatagagttttgttttgttgtttaggtttgagtgtgggggtataattttagtttattgtaatttttgtttttagggtttaagtgatttttttgttttagttttttgagtagttgggattataggtgtgttattatgtttggttaatttttagtagagatggggttttgttatgttggttaggttaggttggttttgaattttagatgttaagtgatttgtttgttttagttttttaaagtgttgggattataggtatgagtttttgtgtttggttagtatttattagagttaagtagttttattttttggtttttattgttattattattagtagatttgggagaggttttaaatattaaatagatgaggagataataatattaatttttaatggttaatagggtgttttaaattaaaaagatgtttttattttttttaaagttgtttaaaatatattatttaattgatattttttaaa

SEQ ID NO: 3785 - DNA, 2486 bp, Artificial Sequence
  chemically treated genomic DNA (Homo sapiens)
tgtatattgtttagtaaaagaagttaatttgaaagggttatatattgtatgattttaattatgtgatattttggaaaagataaaattgtatagatagtagaaagataagtagttgtttggggttttaggggtagggaggaaggagggataattaggtggagtgtagagggtttttaaggtggtaaaattatttttttatgatattgtaatgatggatatatgatattatatatttttaaaatttataaaatgtagaatattaaaggttgattttaatgttagttatgtattttagttaataataatgtattaatattggttaattagttgttataaatgtattttattaatgtaagatgttagtaataggggaaattggttattgggggagtatttgggaattttgtatattttgtttagttttttttaaaattattttaaatttgttaagattttattttaaggtttattgataaatgataagaaaaaaattatgtaaattggagttttaaaaattagtatttgtgattattaatttataaaataaattggaatagaatttatggtttgtttgttaaaaaatgagttttgtttgaaagataaaagggtgatattatagaaatggaaaatattgtgtttgaggttgtgtatggtgtagtggaaggttatagtttaggggttggttattttgtgtttgagttttttttagtttgtttttgagaagtattgggattttaaattagttataattaagttttggattttatatttgtaaagtgaggatagggagatttatttgatggggttgttgtgaaggtgaagagagaggaagtttgttaaagtaattaaataatatttggtatgtggagttttgtgttttgttttgttttgaaattttttttggtgttgatttgaatgtttttttttgatttggttaatagttgtgttatttttggttagtgatttgtggttgggttgttagttgatgataggtagttttttaagtaggttataataaggtggtaattgattttgttttttgaggatgtttgtttgggttttgttagaagttaagggttttttgatgtggggttttggttttatattgtggtattttgaataattttttatgggttggtaaaaggtgttttatattttagataggttttaggaggatgatttgttttttttaaggagaattgagaatttttagatgattggaaggttttgtatttttattttagtatttttgatagatttttttatatgtggtaaatatagttatagttggaggtttattgttggttgttaataggtagtgaattgttgttgaattagatagtttatgtatagggtatttttattattatagaaagttttgttggttagagtatttaaagtatatttggtttttttttttagttattttgtttattttttgtttgtatttttttttggtatttgtgttgttgttattttagttttagtttttaatgtttaataatattttgatagattaatagagttgtgttttagtaggtttaatattatgttgtatttttggttttttaaatggtagagttatttttttgtttggtgtttaaggttttattagggttttgattgtttgtgttattttatagtttttattttttaggatatgttgaggagtgtatggagtgtatatatagattgtttgttgtttattgagtaagttttgttagtttgtgttaggtttgttttataatttattttttatttgttttggttaaatttttttttattgtgtatttgttttttatatattattagagataattttttttttaggtaaatatttgaatattttaggttttttttttatgtgatatttagtatattttgttttatatgtaatttgtttgtttgtattttttagttttgtttttttttggagtgtttgtttttttaggaataggtgttttaggtttttttttgtgtaggttagtttagtaatatataattattaagtaatatatatttggtaaattgtaagatgttttttttaagatataatttttaaattttttttttaagaagtttttttttaaatttttataggaataagttagtatatttgtattgattttatattgggagattatagaattgtttttttaagtaattttttttttttgtattagttttttgtttttgtgtttttagattaatatttagttatattagttgagtgtttttttttgtagattaggaggattgggttgtgtattagatattgtttatgtttagtttgtattttttaggtgttattatttagtatgtattattagagttttttattgtttgaatttgaatttttttgtttgagggttttgggagatttttttaatttttaagaggattatattatttgttttttaaagtagattagaagttttaggagaatgaagatttttgagaaaagtttttgattaagaattgatgag

SEQ ID NO: 3786 - DNA, 2486 bp, Artificial Sequence
  chemically treated genomic DNA (Homo sapiens)
tttattagtttttggttaaggattttttttaggggtttttatttttttggaatttttggtttgttttgaggggtaggtggtgtggtttttttagggattggagaagttttttagaatttttaggtaaagagatttaggtttaggtaatgggaggttttgataatatatattaagtagtaatgtttaagagatatgaattaggtatggatagtgtttaatatataatttaatttttttagtttgtagaaggggatatttagttagtgtggttgaatgttagtttagaggtatagagataggagattgatgtaaggagagaggattgtttgagggagtgattttgtagttttttaatgtggagttaatgtaagtatgttggtttgtttttatggaagtttaggaaagaattttttagagaagaaatttagaaattgtattttggaaaaagtattttataatttattaagtatgtattgtttggtaattatgtattgttgggttagtttatatagaagaaggtttagagtatttgtttttaaaggaataagtattttaggaagaagtaaggttgggggatgtagatagataaattgtatatgaagtaggatatgttgggtgttatgtggaagggaaatttgaagtatttaggtgtttatttgagggagaaattgtttttggtgatatataagaagtagatatataatggagaagagtttgattagggtagatggagagtggattgtgaaatagatttagtatagattgataaagtttatttaataaatagtaagtagtttgtgtgtgtattttatgtattttttggtatattttggaggatggagattgtaaggtgatataggtggttagggttttgatgaggttttaagtattaagtagaggagtagttttgttatttgagaggttagagatataatatgatgttagatttgttaaaatataattttattgatttattaggatgttattaggtattgggggttggaattggggtggtagtagtataaatattaaggaggaatgtaagtaagagataaatagggtggttagggggagaggttgaatatgttttagatgttttgattaatagaattttttgtgatgatggaaatgttttatatgtggattgtttgatttagtaatagtttattgtttgttaataattgataatggatttttagttatgattgtgtttgttatatgtgggagaatttattggaggtgttaaaatgagagtatagaattttttaattatttgagaatttttagttttttttgaagaaagtaaattatttttttggggtttatttgaagtgtgaaatgttttttgttagtttataaagaattgtttagagtgttatagtgtgaaattgaaattttatattagggagtttttggtttttagtagaatttgaatagatatttttggggagtaaggttaattgttattttgttgtgatttgtttggggaattgtttgttattggttggtagtttagttatagattattagttaaaaatggtataattgttgattgaattagagagaaatatttaggttagtattaggaaaggttttgaagtagggtgaggtatagagttttatatgttgggtgttgtttaattgttttgatagattttttttttttttatttttataataattttattaagtaggtttttttatttttattttgtagatgtgaagtttgaagtttagttgtaattaatttgaagttttagtattttttagaaatgggttggaggggatttaaatatagagtgattagtttttgaattgtggttttttattatattatgtataattttaaatatagtattttttatttttataatgttgtttttttgttttttaaatagaatttattttttaataagtaaattatgaattttgttttaatttattttgtaagttaataattataaatattaatttttaaaattttaatttatataattttttttttgttatttgttaatagattttaaaataaggttttaataaatttagagtggttttgggaaaagttgaatagaatgtatagagtttttaaatgtttttttgataattagttttttttattattaatattttgtattggtgaggtatatttgtaataattgattaattaatattgatatattattattaattgaggtgtatggttaatattagggttagtttttgatgttttatattttatgagttttgaaaatatgtaatgttatgtatttattattatagtattataagagaatagttttgttattttaaaaattttttatattttatttagttattttttttttttttttatttttggagttttaagtaattatttatttttttattgtttgtatagttttattttttttaaaatgttatatagttggaattatataatatataatttttttaaattggttttttttgttgagtaatatgta

SEQ ID NO: 3787 - DNA, 2457 bp, Artificial Sequence
  chemically treated genomic DNA (Homo sapiens)
aatttttttttttttttttttattaaaatataaaaatttaagagattttttattaatgtttttttatgtggtttgttagaatgtatatttgtttgttataatttagttaatgaataatgaaatttatttaagatgttttttgtaaaaattagagttgatgatgtgttattatattagtgattttatagaataggatttatgtgattaatttatgtatgagtttgggggtttttgggaaaataagttatgttatttttgtagattaattgtggtttttttttagtagataaaattgatgtggtttagtaggtttttttttgttatagatgttagaaaatgtataggtaaagtagttgtttaattgtatttagtagtttttttttgtgatgtaatagaattttatgttattttttttgggtttgtgtttttattattggaagtatattagaattattggagagttttttaaataatatagtgaaatttaggttttattttaggataattaaattagaatttttgtatgtagtttgagaaatgatattttttaaagttttttaggagttttttttgtgtatttagggtgagttagttttttttaggtagttattttttttgtttttttagttgttttattttgtatttgatttttttgtgaattgtttaaggtttatttagaagtatattgggataaattttaaataaaattttatagtgtgtttgttagataaagtataaatgtatttttattatgtagagaagtttggttttttttgaatgtaggagtttaaataataaatttgaatagaatttttgtgaagtgttaaataatgttattattttaggttgattttttttatatttattttttgtaatagtttttttagttatattgtttgattgttataggaaaggatgttgtagattttttttgagtggtgattaagtgaaatgtattaaagaaatgaggatagtgagtaattaagatgtttgaagtaatattggaaagggagttaggtttgagttatttttttttgtagttagtgtgtagtggaagtggtttgtgggtgttttatatttggattggagagtaaagtataattttagtgttaagggaagttttttatgtttttggaatagtgttttatatttttttgaaaaggtaataaaatatgtgtatttgttgattaggaataaatgttaaagtgtttattatgatggaagtgtttgatttttatggttttgataagttgttataggattttatgaatttttaatggttggtttatatttaggggtttttagtttttgagggtggtaaaaggtttatagagatgttatttttttagtatattggtttttgttaagattggtgtttatttaaagtattttttgttttttgaatgtatagagattttgttgataataagaaatttttttgggtttgaaattagatgaaaagattttttatttagaaagtgtttattaatttatttaaaaatatgatttggattatttattatatgttagggtttattttgggtatattgaggaataagatagggtttttgatttttgagtttgtattttagttaggggatataggtattaggtaagaaaataaataattgaggtaatgatagtatagggtaattgttatgaaaagaataagttgggtaattggatattatttaagtatagtagtgatatgagtttatttgtattttgaaagattattttagttgttggatgggaaaaatggattgtagggggataaaagtaaaagttgggaaattaattaagaggttattgagtggtttagggaagagatggtagtggtgatagagatagaagagagtagatgtgtaatatatatttgagaatgaaagagaatgtgttggtgattgggatagaattgtagaaagaaaagaagtaagaaaaattttaaatgggtggtttaattatttggtggattgtgatagtattttttgagatagagaagattgggttgtatatataaagaatagatttgggggaaattttaagtgtatagttatttaaattatttaagtatggttattatttaagggtagatatgtttagagtttggttagaggttaagtttggagatatttattttggagatataagtttgtaagtggtattgaaagttagagttgatttggaaagataatttagttagaaaatgagttttttgaggttaggtatggtggtttatgtttgtaattttagtattttgagagtttgaggagtgtggattatttgaggttaggaagttgagattagtttggttaatatggtgaaattttatttttattaaaaatataaaaattagttgggtgtagtggtgtatgtttgtaattttagttatttgtgaagttgaggaatgagaatagtttgaatttgggaggtggaggttgtagtgagttgagatta

SEQ ID NO: 3788 - DNA, 2457 bp, Artificial Sequence
  chemically treated genomic DNA (Homo sapiens)
tgattttagtttattgtaatttttattttttaggtttaagttatttttgttttttagttttataagtagttgggattataggtgtgtattattatgtttagttaatttttgtatttttagtggagatggggttttattatgttggttaggttggttttgattttttgattttaggtgatttatattttttgggtttttaaagtgttaggattataggtatgagttattatgtttagttttaaagggtttattttttaattgagttgtttttttaggttagttttagtttttagtattatttataagtttatgtttttaaagtgagtatttttaggtttgatttttagttagattttaggtatatttatttttagataatagttatatttggataatttagatgattgtatatttgaaattttttttaaatttattttttatatgtataatttagttttttttgttttaggaaatgttgttataatttattaagtggttaagttatttgtttggagttttttttgttttttttttttttgtgattttgttttaattattagtatatttttttttatttttaaatatatgttgtatatttgtttttttttatttttattattattattattttttttttggattatttaatggttttttaattgattttttggtttttgtttttatttttttataatttattttttttatttaatagttagagtgattttttaaaatgtaaataagtttatgttattgttgtgtttaaatgatatttgattgtttggtttattttttttatagtaattattttgtattgttattattttgattatttgtttttttatttagtgtttgtattttttaattagaatgtaagtttagaggttagggattttgttttattttttagtgtgtttagaataagttttgatatgtagtggatgatttagattatatttttaaataaattaataaatattttttgagtgggaggtttttttatttaattttaggtttaagaaagttttttgttgttagtagaatttttgtatatttgaaagatgagaggtgttttaaatagatattggttttggtagaagttagtgtgttaggagaatagtatttttgtggattttttattatttttagaaattgaaagtttttaaatataggttagttattaaagatttatgagattttgtggtgatttattagagttatggaaattggatatttttattatggtggatgttttgatatttgtttttaattagtgaatgtatatattttattatttttttagggaagtatggggtattattttagaagtataagaggttttttttagtgttgggattatgttttgttttttaatttaaatatggaatatttatgagttatttttattgtatattggttgtaaaaagaggtggtttagatttgattttttttttagtgttgttttaggtattttagttgtttattgtttttatttttttggtgtattttatttaattattatttaggagaggtttgtagtatttttttttgtggtaattagatggtgtggttaaaagaattattgtagggaataggtatgggaggaattaatttgaaataatgatattatttgatattttatagaaattttatttagatttattatttagatttttatatttaagaaaagttaaatttttttatatagtgaaaatatatttgtattttgtttaataaatatattatagaattttatttaaggtttattttagtgtatttttaaatggattttgggtagtttataaggaaattaaatataaaataagatagttggggagataaggagaatgattatttaaagaggattggtttattttggatatatagaagaagtttttagagggttttaaaagatgttattttttaggttgtatgtagagattttggtttaattattttgggatgaggtttgggttttattgtgttatttggaaagttttttagtgattttaatgtgtttttagtggtagaagtataagtttagagaaagtagtgtgagattttattatattatagagaggaattgttgagtgtaattgggtagttattttgtttgtatattttttgatatttatgataaaggggaatttgttgagttatattaattttgtttgttaagaggaggttatagttggtttgtagagataatataatttgtttttttggaagtttttagatttatgtatgagttgattatatggattttgttttatagaattattaatataatggtatattattaattttggtttttgtaggaagtattttaaataaattttattgtttattggttggattgtagtaaataaatgtgtattttagtaaattatgtgaaagaatattagtaaaaagttttttgagtttttgtgttttgataaaaaaaaaaaaaaaaaaatt

SEQ ID NO: 3789 - DNA, 2431 bp, Artificial Sequence
  chemically treated genomic DNA (Homo sapiens)
ggttaaatattaatttaaatattaaatattaatttatttgtttatttttatttttttttaatgtgtttattagaaaatttgaaatgatatttgtggtttgtattatttttttgttggatgtaattagtatagagtttttaaggtttaatgtagtatttattttagggatatttgtagttgaagtaatgatttttattttaaagttaaagaataaattttgtattgtaatatttatgatggaagagagaatttgggagataaattaagtaagtaataagttatatgtttttgaggttagttttatttaggatgtaaggtaaatgttgagtgagattattgtgggattaaatgagtgaatatatagtaagtatttgaaattatgttgttgttattgttatttggatttttgggatttgtgttgtttgttttttgggagtttttaagtttatgaattaaaatatggttttttttttgtgtttttagttattgtataattttttttgagtgtttttgagttatatattatttgatagaagtggggataaggtatatagaagtgttattggttttataaagttgtttagaaaattatttaaaaaataagaaatttaggtagtatttgtgttgttttgatataggtattagtattatttttattagttagttagtttatatttgtattgtttttagaatttgaagatttgtttataagtataggggtattgagttgagtggattaatgtgtggatgtttgaattatttatttattatttaggttattttaaaagttttagaaggaggagataaagtttttttaaaatttggaagatttaattggaaagttttgttagaattttgttattgtgagtttttagtttttaggttttttggattttaagagtaatatttgattttgattttgggaatgttgaataaaataagttaatggattttgaatgtggtatttgttttttattttttaaatttataagagtattttttttttttgttatatgaatagagtagtagttgttgatttaagagtgttgggaaaagggtgattgttttttatttggtatagatatttttgaggataagattattgagttaataattgattttatttttttgtaggtttttttgtagtttatttgtgagggtaggaggaagggtgggtgttttggatttatttatagtttttgtttttttaaataattgtgagtaaggaggatagaaggtggtaaatggagttagtgagatagtttaaatgttgtttgggtgttgtattatttagatataaaatattaattttaaatgttaggttgttttgtgtttgtggatgttttgaaattttttttttattttgtgttgatttagtttgaatattgatttagtttttaatttgtgttttttttttttttgtagtttttgaatatgttgtttatgtatttttttgtggttgtggatgagtattttgttggttgttgtaaagagattttttggtgagtggatatggttgtgtagtggtgaatatgaaagagattgtgtggatagttttgaaatattttttaaaagatatgaaattttttggggtgtttaatttgtttgtaatttgtggttatattaaaatatttattttgaatagtaatgatatttttgaaaggagatagttttttgaatttattgtttattttgtatgttgttattatttgaggtaaatagatagtgtagtaatttaaagaaatggatttaggttgaggggagtaggagaagaattaagtgttgtaagtttggatatttttaaaaattgtttttttttattttatttttagaaatgtttattaatatgatagattttaaagtattttgaataataggatgtatggaaaatgattagtagggttattgagttatggtgatgtgtttttgatagtttttgatagtttgtatagatatttgggggtggtggttatagtttttaagttattttgtaatgttatattagattgtttagatgttaggttaaaggttaatattagtagaaatttggtgtgttatatgaatatggtattttttattttttttgtttttatgggatagattgaaaaggggttttttagaatttaaggaaaagtagagaagaaaaagaaattgttttgaggttgtttttgttattgtaggtggggagtaaaggagtttatgtggatttaggaatattttatttttttagtgatagtatttgtttttattaagtgttagttgatgggattgttttgttagtaatattgttttattttttttttttttattagaattgtgtataaggtagtgttagagttgtattttatattttttattgtgttattttatatgagtttaggtaaggtttgtttaattatttttggtttttggtagtaaatattgaaaattt

SEQ ID NO: 3790 - DNA, 2431 bp, Artificial Sequence
  chemically treated genomic DNA (Homo sapiens)
gaatttttaatgtttgttattggggattagaggtggttgggtgggttttatttaggtttatgtaggatggtatgatgagaaatatgaagtgtagttttggtattgttttatatatggttttggtgaggaaagagagggtggggtagtgttattaataaagtaattttattagttggtatttgatgaagataaatgttgttattaaaaaggtgaggtgtttttaaatttatatgggtttttttgttttttatttgtaatggtaagaatagttttaaggtaattttttttttttttttatttttttttgggttttaaagggtttttttttgatttgttttatggaggtagagagaataaagggtgttatgtttatatggtatattagatttttgttaatattaatttttgatttggtatttggatggtttggtgtgatattataaagtgatttgaaagttgtgattattatttttaaatgtttgtgtaggttgttagaggttgttagagatatattgttatgatttggtagttttgttggttattttttatgtattttattatttaggatgttttgaagtttgttatgttaataaatatttttaaagataagataaagaaaagtagtttttagaaatgtttaagtttgtgatatttaattttttttttattttttttaatttaaatttatttttttaaattattgtattatttgtttgttttaaatgataatagtgtgtagaatggataatagatttaaagaattatttttttttagaaatattattgttatttaaagtaaatattttaatatagttataaattataagtaaattaaatattttaaagaattttatgttttttaaaaaatattttaaaattatttatatagttttttttatgtttattattgtatggttatatttatttattgaagaatttttttgtaatagttaatagaatatttatttatggttataaagaggtgtatgaataatgtatttaggggttgtagaagaagagagaatatggattaaaggttgagttagtatttgggttaggttagtatagggtggaaagagggttttggggtatttatagatatagaatagtttggtatttagggttgatattttatgtttaagtgatgtaatatttaggtggtatttgagttgttttattgattttgtttgttgttttttgttttttttatttataattatttaaggaaatagggattgtaaatgagtttagagtatttgtttttttttttgtttttatgaatgagttgtgggagagtttgtaggggagtgaaattgattattaatttagtagttttgtttttaggggtgtttatgttaagtgaaagataattattttttttttggtgtttttgagttagtagttgttgttttatttatgtgataggagggagagatgtttttatgaatttgaaaaatggaaggtagatgttatgtttagaatttattggtttgttttgtttaatatttttagagttagaattaaatattatttttgggatttaaaaaatttgggagttgaaaatttatagtagtaagattttagtaagattttttagttaaattttttaagttttaaaagagttttgttttttttttttgagatttttaaagtggtttaaataatgagtaaatggtttaaatatttatatattggtttatttaatttggtatttttgtgtttatgaataaatttttaaattttggaaatagtgtagatgtagattggttgattggtgagggtggtgttggtatttatattaggatagtataggtgttgtttaggttttttgttttttgaataattttttggatagttttgtgggattagtggtatttttgtgtgttttgtttttatttttgttggatggtgtgtgatttagaagtatttggaaagaattgtatggtgattaaaagtgtaagaggaaaattatgttttgatttatgagtttgaaaatttttaaaaggtaaataatataaattttaaaagtttagataatgatgatgatgatatgattttaagtatttgttgtgtatttatttatttaattttataataattttatttagtatttgttttatattttgaataggattagttttaggagtatatggtttattatttgtttgatttgttttttaaatttttttttttattataaatattataatgtaagatttattttttagttttaagataaaaattattattttagttgtaaatatttttgggatagatattgtattaagttttaaaggttttatattggttatatttagtagaaaagtaatgtaagttataaatgttattttaaattttttagtagatatattaaaaaagaataaagataaataggtgaattaatgtttaatatttaagttaatatttaatt

SEQ ID NO: 3791 - DNA, 2402 bp, Artificial Sequence
  chemically treated genomic DNA (Homo sapiens)
ggtaattattgttaattagaggaaatagaaagaagtttattaagtttgtttttttgaatagttatggtagttttaggttaggtatgtagtatgtttgagggtaaggttgtgttttgtgggaaatttttattattgaaagggtttttagttataaggattttttttggtttgatagttagtttggaggagtttggggttattattttatataagttttttgttataattgtattttggtttattttgatatttggtgtttattttaagttgaggttttagggaagggtagttggaggttagtggtggtttttagtgatagatgggtagagtgtttgttttggtattatttagggtgtgggtagtagtggtttgagtaggtattattgatttgtaggtagggaaagtttgttaggttagttatgtgtttggtattaggaggagaggattagagttagtagtggttataatgagggtaaaatttttatagtggaatattgttatttaaaagggatgggtggttgtagggttttttggatggaagtataaatgagaaaatatatatgtttttgtaaatggatttgtttgggaagataaggttatagtatatatagttttttagtaatttaaattttatgtgttatgatgtagatatttataggataagtaagaataataaaatttttagttttgttttttagtataagataattgaagatatttgtggtgaaaagtatttttgttattaggaagatagataatagttagtaattaatgtttttttgttgtataagttaaaaagtttattaaatttattttttttttagtgtatatataagaatatatttggatatttttgtaaatttatatttaagaatagtgttttttaaattggttatttgaaagaaatttaaaggaaaaagtagatatttttataatatgtttttgttttgttgtagtttgtaattgtgaatttttgtaaattgttataattttggatgaatgatgggaatataataggttgtagaattggagaatgttaaatttttgtttttaatggtaaaatatgttttttttatttttattagaatgtgtgatttatgttatttgaaattaaattttaaatataatgagttattagtgtaatagtttattattaatagtggttttataaataatatatttttattatatatatgtagtttgttgtgaagttagtaaaaggtattttaggttattgaagttttgttgtgttagtgtggttgtagattagaaggatatttttatgtgaattaagatggatgttaattttttttgttgagagttaggttggttgtttttttttgtatatatggtagatggattggttaattagtgtttgttgagttttgggtttgaaattatagagaagttagataattgtggttatgtagtttttgtttatgagtgtaaataagataaataattatttgttatttgggaaaaaaattaaaatgtttattttggatttttattaaagtgttaatggttttataaaatagttgtgtaaatttaggtttttttagtaagtattattttagggggtttgtaaagaaaggaatatatatgaaaaaattaatttttaaaaattttttttatattttagtattgagaagaaaatagaggaggttttatttttattttgtaaatatgtttgagaataaatgatttttaattgggagatatatttgagaataaatagtagtttaatatttatttttttttttttttttggtgttatttaaaaaattgagtattattgtagtttgattttttgttttaggagattaaagtattttttttgattgggtatttatggaaagatgttgtgtttttgggaatagagaatgtttgtgattattgagttttgttattttttgaatgtaatggttatttaaaagtttgaatatttgagagataggatttagtaaatgtaggtttttaataagagttattagagtttaattagttaattagaatttgtttaaaatttattaataattattttatgtgaaatttaaaggattatgtattttttttttttttttaaattttaaatattttttttgtagaaaataatgaaatatagaattatttaagggatatattaaggagttttagttatagttgtttttttatgtggaatatgatagaattaaagtttgttgttaatttttaatgttttggtattaattaggtatttggtatttaattaaggtttagattagttagttatttatttttttgtttatgtattatttattaaagattgaaaattatggggatgattgtaagagttttagaattaggtattttagggtgatgggaagtttaatatttgtagattagatttatttggtgaatta

SEQ ID NO: 3792 - DNA, 2402 bp, Artificial Sequence
  chemically treated genomic DNA (Homo sapiens)
tggtttattaggtgggtttgatttgtaaatgttgaattttttattattttgaaatgtttggttttgaagtttttgtagttgtttttatgatttttagtttttgatgagtaatatataggtgagaagatgagtaattagttgatttgaattttggttgggtattaggtatttgattggtattaaaatattagaaattaataatagattttaattttattatattttatatggagagatggttgtgattgaaattttttaatatattttttaagtaattttgtattttattgttttttgtaaggaaagtatttaaaatttaaaaagagagagaaaatatatagttttttaaattttatataaaataattattagtagattttaagtaaattttggttgattgattagattttgatagtttttattagaaatttgtatttattgggttttattttttaagtgtttagatttttagataattattgtatttagaaagtagtagaatttaataattataggtattttttatttttaagaatgtagtatttttttataaatgtttagttagagaaaatgttttaattttttaaaatagagaattgggttataataatatttagttttttaaatgatattaaaaaaaaaaaaaaaaataggtattaaattattatttgtttttgaatatgttttttagttaaaaattatttgtttttaaatgtgtttgtaaaataaaagtgagattttttttattttttttttaatattgaaatatgaggggaatttttaaaaattaatttttttatgtatatttttttttttataggttttttaaaatgatatttgttgaaaaagtttggatttatatagttgttttataaagttattgatattttaataaaagtttaaaataaatattttaattttttttttaaataataagtgattgtttgttttgtttgtatttgtgaataaaggttgtatagttgtagttgtttagtttttttgtaattttaggtttaagatttagtagatgttgattaattaatttatttattatatgtgtagaaagagatggttagtttgatttttggtagggaaaattggtatttattttggtttatatggagatgtttttttaatttatagttgtgttggtgtaataaaattttgatggtttgaaatattttttgttggttttatagtgagttgtatgtgtatgataagaatgtattatttataagattgttgttagtaatgagttattatattaatggtttattgtgtttggaatttgattttaaatggtatggattatatattttgatgaaaatgagaaaaatatgttttgttattaggaataaagatttaatgttttttaattttataatttgttatatttttattatttatttagggttgtaataatttataaaagtttataattatagattataatagagtaaggatatattgtggaagtgtttgtttttttttttgagttttttttaaataattgatttgagaaatattatttttaaatatgaatttgtaggagtatttaaatgtatttttgtgtatgtattgaaaaaaaaatggatttaatggattttttaatttgtataatagaaaggtattgattgttggttgttatttatttttttggtgatagaagtattttttattataagtgtttttaattattttatattggagaataaaattgaaggttttgttgtttttgtttgttttgtaaatatttatattatgatatataaggtttagattgttagaaaattatgtgtattgtggttttgtttttttaaataggtttatttatagaaatgtgtgtatttttttatttatgtttttatttaaaaagttttatagttatttattttttttgggtgataatattttattgtgagggttttgtttttattgtgattattgttggttttgattttttttttttgatgttaagtgtatggttgatttggtaggttttttttgtttgtaggttagtggtgtttatttggattattgttgtttatattttggatgatgttaaagtagatgttttgtttatttgttattaggagttgttgttggtttttaattatttttttttaaaattttagtttggagtaaatattagatgttaaggtaagttagggtatagttatgataaggaatttgtatgaagtgatggttttaaatttttttaaattagttattaagttaaagaaagtttttgtaattaaaaatttttttagtagtaagggttttttatagggtatagttttgtttttaggtatgttgtatgtttggtttggaattgttatggttgtttagaaagataaatttgatggatttttttttgttttttttggttgatagtggttgtt

SEQ ID NO: 3793 - DNA, 2471 bp, Artificial Sequence
  chemically treated genomic DNA (Homo sapiens)
tggattaattttattatattgtaatggtttgtattttaaatgtaaggataatattaaatttttagttggttattattttttttttttttttaggttttttgaattaaaatattaagaaagtgatttgtttaatttattttgttagaatttatagttaaatttattaaatgtgtaaatattttataagaaagtttataaggtatgttaataattatatttatgtattataagtgtattatttttttaaaaaattaaaaaaattatttttgattttataaagtgaattaaaatggtttgtatgttttttatttaaaaataaaggtgatatttttaggatattaaatgatattttagaagtttatgttgaaaatgagttaataaagttaattaatttatattaaatattaaagaaatatattttttttttttgaaagttataagatattaaatttattggtttttttatattaaaatttttagtttaattttttaaagtagtgttttttatggataaatataaatgttagtattaagagttatttttatatataaaattgaaaattttatgtatatggagattagaataaaaaatgatgtaaatatttaatatgaagtgatttttggtatttgtgtttttttaatagaaaagagggttttttttatgttaggttttgtaatagttagaatgggatttttatgaatttaggagttgatttataatgtatttattttgagaataataagtatgttaaatttggaatttattaagtattttttttttatagtagtaataataaaaaataatagtaataataataataataatagttaatatttaagtagtttttattttggattaggtattgtttgaagtattttttatttattagtttatttaatttttataattttaattttttagattaggttataaattttaatatgaataataaatttgttgtttattattttaaagttttaaaagagagtttttagaagggtaatttttagtttttttaggagaataatttgaaatgaaaatgaagattatatatattattaagttgaaaaatataatgttattttttttgagggatggtttaatatgttaatgtttaatttaagaattttaaaaatgtttttttattagtaattttaaaataaaaataagttgttatataaagtatggttaaaatattattaaaggtatgataaggattgaaattgtagttaatttagtatatagtatatagattattggattgttttagttttttttatgattaatattaattgatatggttgaattgattttgtagtaaggtgttttaattgttgaaatttattatgtgggttgtgttttagagttttggtttttttgtggatatgtttgtaattttgtaggattgattttattagtatagttagaggtttggtaagtgtttgatattaggtaaggttggattttatatttatggttttttataaaatgttagatgtgatatggggtttttttaatttttattattaattaatataattaaaattttaagatataattttttaaaagtataaaatttagaaaatttaaaatatttataaaataataaatttgatattataatttttaaagaggtttagtaatataataatataattttgtgtttatgatgaaaaattttttgaaaattttaatttatatttaatttttataaagtatgtataatttagatatatgtaagatatttaataattggatgagagttttttttaatatatttgtattattgatttttaatgataatgaattatatggtaaatgttttatgagttagtataataatgtaatgaaaatgtattttaggtttttttgttattgtgatgaagaatatgtgattttttattgggtaaataatgattgaaatatttttaaaggtagttgggataatatttttgtggtagtttttggagtgtttagattagatgatatggattttgttattttttaagtgatgaagttgtaatagtaaattgattgtttattaattagggtgataatagtagtttatgaggggttatggtttataaattgaattataaaatttaaaggttaaaaaaattttattattaaaaaaggttataatattgatgtttttttgtgaggattttaaaaagtataagtgtataaaaatatagtttgtttttttaatgtgttggtattaagataaggtatgttagttttgtaggtatattatagttggatggggttgaggtttttgtaagaatttattttttaatggaattttatttttgtgttagagttttgtgttttatattgttgaatatgtttttaaataattaataatatgtgttttttattttatattgtagttgtgttttataagatttttaatttaatggttattatgaaaataagaatatgaatataagagaatataagttattataat

SEQ ID NO: 3794 - DNA, 2471 bp, Artificial Sequence
  chemically treated genomic DNA (Homo sapiens)
gttgtagtggtttatgtttttttatgtttatatttttatttttataataattattgaattgagaattttataaagtataattgtaatgtggaataaaagatatgtgttgttaattgtttagaaatatatttagtaatataaagtataggattttgatgtaggagtaaaattttattagaaaataaatttttataaaggttttagttttatttagttgtaatgtgtttgtgaagttagtatgttttattttggtattaatatattaagaagataggttgtgtttttatgtatttgtgttttttaaaatttttatagaagaatattaatgttgtagttttttttggtagtgaaatttttttggtttttgagttttataatttaatttgtaagttatgattttttataaattgttgttattattttgattaataaatagttaatttgttgttgtagttttgttatttggggaatgatgaggtttatattgtttggtttgaatattttagagattattgtaggggtattattttaattgtttttggagatgttttaattattatttatttaatgaagaattatatgttttttattgtgataatgaagaaatttgaggtatgtttttattgtattgttgtattgatttataaagtatttgttatgtgatttattgttattgaaaattagtgatataaatatgttaaaggggatttttatttagttgttgaatgttttatatatatttgaattatgtatgttttataggaattaaatatgaattgggatttttaaagaattttttattatgagtataaaattgtattattgtattattaggtttttttggaaattataatgttaaatttattattttgtaaatgttttaagttttttaaattttgtatttttgaaaaattgtattttgaaattttggttatgttgattaataataagagttgaaggaattttatattatatttagtattttgtggagaattgtgggtatggaatttagttttgtttggtgttgggtatttgttaagtttttgattgtgttaatggggttaattttgtagaattgtaggtatgtttatgaagaggttgggattttggagtatggtttatgtgatgagttttaataattggagtattttgttgtagaattaatttagttatgttaattggtattgattatgggaagagttggaataatttaatgatttgtgtgttgtgtattaaattggttgtagttttgatttttgttatatttttagtggtattttagttatgttttatgtagtgatttgtttttgttttagaattattaatagaagggtgtttttaaagtttttaaattaaatattagtatattaagttattttttaagaggaatgatattgtgttttttagtttgatagtatgtataatttttatttttattttaagttgtttttttgaaggagttgaaagttatttttttgaaaatttttttttaaagttttgaaataataggtaatagatttattgtttatattgggatttatgatttaatttaaagggttaaagttgtgaggattaaatgagttaataaatagaaagtgttttaaatagtgtttggtttagagtaaaagttatttaagtgttagttattattattattattgttgttgttgttttttgttattattattatggagagagaatatttaatgaattttaagtttaatatgtttattatttttagaatagatgtattgtgggttaatttttgaatttataaaagttttattttggttgttgtaaagtttgatataaagggaatttttttttttattgagggaatgtagatgttaaaagttattttatattaaatatttgtattattttttattttgatttttatgtgtgtgaagtttttagttttgtgtatgaaaatggtttttagtgttaatatttgtatttgtttatgaagagtattattttaaagaattaaattgaaaattttaatataagagaattagtgaatttagtgttttatagtttttaaaaagaggaaatgtgtttttttaatatttagtatggattaattggttttattagtttatttttaatatgggtttttaaaatgttatttaatgttttaaaaatgttatttttatttttaagtaaaaaatatgtaagttattttaatttattttatagaattaaaagtgatttttttgattttttaaaaagatagtatatttataatgtatgaatataattattaatatattttgtaaatttttttataaaatgtttgtatatttaatgaatttggttataaattttgataagatgaattgagtaaattgtttttttaatattttaatttaaaaagtttaaagggaagaagagaataatggttaattggaaatttagtattatttttatatttaaagtataaattattataatgtaataaaattaattta

SEQ ID NO: 3795 - DNA, 2499 bp, Artificial Sequence
  chemically treated genomic DNA (Homo sapiens)
tatttaatttttgtttgtggtagattaggggtttattattggatagtatttatgttatttatggttaggttatatttttgaagttatttgtgtaagtgtgtttgtgtgtgtgtgtgtgtaataggaattagtaagaaaattataaattataaatttatgtagttgttggttatgtatattaattaaaatatatattgaagtatagttgtgttgttttatgatgaggatatattttaagaaatgtgttgttaggtaatttatgattattttgtgaatattatagagtgatttatataaatttagatggtagatgtttattatatatttaggatataaatgtgtataatatgttattatattgaatagtgtaggtaattgtaatataatggaaattgtttgtatattaaattatatttagtatagaaaaggtttagtaaaaatatagtattataattttataggattattattatatatgtggtttgttattgattgaaatgttatatgattatattatagtaatgtgatttatagttatataatttattatagttttaatataagagtaagaagtaaaatttttatatatatatatatatatatatataaaattttagtttttttttttagattttagtatggttatttaaaaaatttttaaaaataattttgatttaattttattagtattatattagagtaaagtagtagtaatatgttaaattttaatatgtttagtttgttataataaaaattattttatttaataatttatttttttaaaaaattttgtatgtgtttataaattattttttttaagatttttttttttttatatgggttttagtttttataaattttgatatttatatttttaaaattattgtataatgtttaatttagtagagtttatatatggtaaatagtttagtaagtattaatttaaagttttagtattttagtagattttttttttatattagaaataaatagataaatagataagtgaaaaaggaaggaaggaagaaaaaaaaatatgaattatgttttttttaggttaatgtttaagtttgttttaattatgttttttgatatattttaaggtttatattagttaaggtaaatattttaagggattgagtagatggatgttgtagtttagaaagtgtgtggtaaatttaggatttaagagtggaataaaagatttattttttttataattaagtttttgattaatgttttaggttttttagtatatatttgtaattatttatagaggtatttattgtgttgggatttgttttggaatattaggtattaagttatttggtagtagatggaagtatatttttgttgatatatgttgtaatgaaaggatttgtgtaaatttggttagtaaggtagtagaatgttatgtatttgaagattaataatgtaaataattatgatgttaattttgttatgtttgtgttaattttatttgttgagatgtggaattaaattttgaagtttgtgggttttaaaaatttttagtatatatttgaattaaataagtttttttttattattggaatttagagttttaattaaaaaatgtttttttaggttaaatttatgggaattatgaattaaattttttaataagttaatattataatttgtaaatgaatttattttgtattgtaagatttgtatgtgtaaaggtaataatttgtaaaatggggtatttaaaaaatatgattaagttgttatattgatgttaaagatagtagataggtatgtagttgagataaagttatatggtttttttattttttggattttagttaattattttaatggaatttgttattatgagtaagaaggttggaaagagagggtaaaataatagatggttagtttattttattttgttatttatgtaagatagtgttttgaggagatatagtgtttgtgtgaagttgttaaagatagtattgggggagggtaaatgggggggttaaagagggaattatatgattagttagttaaattatggttatatgtttgtttttgttgtttttttatattgaagtggaataatttgaagattgtatttttgtgataatattttaaaattaggaataattatgtggtatttaaagaagagttgttgtatatttttaatagtgggatatttataaaatgttttatttatttttaatttagtagaattttttttttattatttttattatatattaagatatagttataatagaagtttttgaaaaatataataaaaatttgaaattttttttatagtttttagggttttatatatatatgggaaagaatgatgtttttagatatgagttatttatgtgtaatttttatgttttttgttatttttttgtttaaagtgaatattatttgtttaataggttttttaaagtgatttatgttttaatttttttatttttataggtttttggggaataggtgttatttggttagatg

SEQ ID NO: 3796 - DNA, 2499 bp, Artificial Sequence
  chemically treated genomic DNA (Homo sapiens)
tatttgattaaatagtgtttgttttttaaaaatttatggaaataaaaaaattaaaatatgagttattttgaaaaatttgttaggtaagtaatgtttattttggatagggagatggtaaaaggtatgaggattgtatatgaatgatttatgtttgagagtattatttttttttatgtatatataaagttttggaggttgtgaggaaggttttagatttttattatattttttaaagatttttgttatagttgtgttttaatgtatggtggggatggtgaaagaaggattttattgagttagaaatgagtggggtattttgtggatgttttattattgagaatatgtagtggtttttttttgagtattatgtggttatttttaattttaaaatgttattataaagatatagtttttgagttgttttattttagtgtggagaagtaatggaagtaggtatatggttataatttggttgattggttatatagttttttttttaatttttttatttatttttttttagtgttgtttttggtgattttatataggtgttgtgtttttttagggtgttgttttatgtgggtggtagggtagggtaggttagttatttgttattttgttttttttttttaatttttttgtttatagtagtaggttttgttgaagtgattggttgaggtttagggggtgagggagttatgtgattttattttagttatatgtttatttgttgtttttagtattagtatagtaatttagttatattttttgaatgttttattttatagattgttgtttttatatatataaattttataatgtaaaatggatttatttataaattgtggtattagtttgttaaaggatttagtttataatttttataaatttagtttagaaaagtattttttaattaaaattttaaattttagtggtgaaaaggggtttatttgatttaagtatgtgttaaagatttttaaagtttataagttttaaggtttagttttatattttaatagatggaattaatataagtataataaagttaatattatggttgtttgtattattaatttttaaatgtatggtattttgttattttgttagttaggtttgtatgaatttttttattgtaatatatgttaatagaaatgtgtttttatttgttgttggatagtttgatgtttgatattttgagataagttttagtataatgagtatttttgtgagtaattataggtgtgtgttgaggagtttagggtattaattagaggtttaattatgaaaaaggtggattttttgttttatttttggattttgagtttattatatattttttaaattgtagtatttatttgtttggttttttagaatgtttgttttgattgatatggattttaaagtgtattaaaggatgtgattaaagtaggtttaaatattaatttggaagaagtatggtttatgttttttttttttttttttttttttttttatttatttatttatttgtttatttttgatgtaggaaaaaagtttgttgaaatgttaaaattttaaattagtatttgttaaattatttattatatgtgaattttattgaattaagtattatatagtaattttaagaatgtaaatattaagatttgtagaaattaagatttatgtaaagaaaaaaaagttttaggaaaaatggtttgtgaatatatataaagttttttaggaagataagttgttaaatgaggtaatttttattatgatagattgaatatgttagaatttagtatgttattattgttttgttttaatgtgatattgatagaattaaattaggattatttttaaggattttttagataattatattgaaatttaagaaaagaaattaggattttgtgtgtgtgtgtgtgtgtgtgtgtggagattttgttttttatttttatattgagattataataggttgtataattataagttatgttattatagtatagttatgtaatattttagttagtggtagattatatatatgatggtggttttataagattatagtgttgtgtttttattgaattttttttgtgttagatgtggtttgatatgtagataatttttattgtgttataattgtttatattatttggtatagtaatatgttgtgtatatttgtattttggatgtgtagtaggtatttattatttaggtttgtgtaagttattttatgatgtttataagatgattatagattgtttaatagtatattttttagaatgtatttttattataaagtgatatgattgtattttagtgtgtgttttgattaatgtatatggttaatagttgtataagtttgtggtttgtggtttttttattaatttttgttatatatatatatatataaatatgtttgtatagatggttttagagatgtggtttggttatggatggtatgaatgttgtttagtggtggatttttgatttgttataggtaagaattagata

SEQ ID NO: 3797 - DNA, 2400 bp, Artificial Sequence
  chemically treated genomic DNA (Homo sapiens)
ataaattattttttttaagatttttttttttttatatgggttttagtttttataaattttgatatttatatttttaaaattattgtataatgtttaatttagtagagtttatatatggtaaatagtttagtaagtattaatttaaagttttagtattttagtagattttttttttatattagaaataaatagataaatagataagtgaaaaaggaaggaaggaagaaaaaaaaatatgaattatgttttttttaggttaatgtttaagtttgttttaattatgttttttgatatattttaaggtttatattagttaaggtaaatattttaagggattgagtagatggatgttgtagtttagaaagtgtgtggtaaatttaggatttaagagtggaataaaagatttattttttttataattaagtttttgattaatgttttaggttttttagtatatatttgtaattatttatagaggtatttattgtgttgggatttgttttggaatattaggtattaagttatttggtagtagatggaagtatatttttgttgatatatgttgtaatgaaaggatttgtgtaaatttggttagtaaggtagtagaatgttatgtatttgaagattaataatgtaaataattatgatgttaattttgttatgtttgtgttaattttatttgttgagatgtggaattaaattttgaagtttgtgggttttaaaaatttttagtatatatttgaattaaataagtttttttttattattggaatttagagttttaattaaaaaatgtttttttaggttaaatttatgggaattatgaattaaattttttaataagttaatattataatttgtaaatgaatttattttgtattgtaagatttgtatgtgtaaaggtaataatttgtaaaatggggtatttaaaaaatatgattaagttgttatattgatgttaaagatagtagataggtatgtagttgagataaagttatatggtttttttattttttggattttagttaattattttaatggaatttgttattatgagtaagaaggttggaaagagagggtaaaataatagatggttagtttattttattttgttatttatgtaagatagtgttttgaggagatatagtgtttgtgtgaagttgttaaagatagtattgggggagggtaaatgggggggttaaagagggaattatatgattagttagttaaattatggttatatgtttgtttttgttgtttttttatattgaagtggaataatttgaagattgtatttttgtgataatattttaaaattaggaataattatgtggtatttaaagaagagttgttgtatatttttaatagtgggatatttataaaatgttttatttatttttaatttagtagaattttttttttattatttttattatatattaagatatagttataatagaagtttttgaaaaatataataaaaatttgaaattttttttatagtttttagggttttatatatatatgggaaagaatgatgtttttagatatgagttatttatgtgtaatttttatgttttttgttatttttttgtttaaagtgaatattatttgtttaataggttttttaaagtgatttatgttttaatttttttatttttataggtttttggggaataggtgttatttggttagatgagtaagttttttagtggtgatttgtgagattttgatgtatttattatttaagtagtaagtattatatttaatttgtagttttttattttttatttttttttatttttttttttaagtttttaaagtttattgtattatttttatgtttttgtgtatttagaatttagtttttatttatgagtgagaatatataatgtttggttttttatttttgagttattttgtttagaataatggtttaattattttgaaaaatttatgtgtatttttttttataagtaaaaagtaatttaagtaatataatgatagtaattaatgttgttaaatttttgttaaaaatattattttttgatgaagattttgggtttgagagtagttttttttgttgaatataagtatagaatgtaatgttagggtggtgtgaaagaataattttttttaattttagttggtttatttaatagtattataaggatttgtagagaggaggaaaggggttattttttttattgtgtgatttaatgttatttagtgttgtttttattgagatggttagtgagaaatggttttgtattttgatgtggtgaaaagaattttagaatttgagttatgaggtttaggtttaaagttttgtgtgattgtgggtagattatgttatatttagagttttatgttttttttttgtaaaatgaaatgatattt

SEQ ID NO: 3798 - DNA, 2400 bp, Artificial Sequence
  chemically treated genomic DNA (Homo sapiens)
gagtattattttattttatggaagagaagtatgaagttttgggtatgatatgatttgtttatagttatataaggttttggatttaggttttatggtttaagttttagagttttttttattatgttagagtgtagggttgttttttattagttattttagtggaggtagtgttgaatagtattgaattatatagtagaaaggatggtttttttttttttttttgtaggtttttgtgatattgttaggtaggttagttggagttgagagaagttatttttttatattattttgatattgtattttgtgtttatatttaataaggagagttgtttttagatttagagtttttattagaggatggtatttttagtaaaaatttagtagtattgattattgttattgtattatttgagttattttttatttatgagaaaggatatatataaattttttagaataattgggttattattttaagtgaagtaatttgggaatggaaaattaaatattgtatgtttttatttataagtgggagttaagttttgagtatgtagaggtataagaataatatagtggattttggggatttgggggaaagggtggaaggggatgagggataaaagattataaattgggtatagtgtttattgtttgggtgatgggtgtattaaaattttataaattattattaaagaatttatttatttgattaaatagtgtttgttttttaaaaatttatggaaataaaaaaattaaaatatgagttattttgaaaaatttgttaggtaagtaatgtttattttggatagggagatggtaaaaggtatgaggattgtatatgaatgatttatgtttgagagtattatttttttttatgtatatataaagttttggaggttgtgaggaaggttttagatttttattatattttttaaagatttttgttatagttgtgttttaatgtatggtggggatggtgaaagaaggattttattgagttagaaatgagtggggtattttgtggatgttttattattgagaatatgtagtggtttttttttgagtattatgtggttatttttaattttaaaatgttattataaagatatagtttttgagttgttttattttagtgtggagaagtaatggaagtaggtatatggttataatttggttgattggttatatagttttttttttaatttttttatttatttttttttagtgttgtttttggtgattttatataggtgttgtgtttttttagggtgttgttttatgtgggtggtagggtagggtaggttagttatttgttattttgttttttttttttaatttttttgtttatagtagtaggttttgttgaagtgattggttgaggtttagggggtgagggagttatgtgattttattttagttatatgtttatttgttgtttttagtattagtatagtaatttagttatattttttgaatgttttattttatagattgttgtttttatatatataaattttataatgtaaaatggatttatttataaattgtggtattagtttgttaaaggatttagtttataatttttataaatttagtttagaaaagtattttttaattaaaattttaaattttagtggtgaaaaggggtttatttgatttaagtatgtgttaaagatttttaaagtttataagttttaaggtttagttttatattttaatagatggaattaatataagtataataaagttaatattatggttgtttgtattattaatttttaaatgtatggtattttgttattttgttagttaggtttgtatgaatttttttattgtaatatatgttaatagaaatgtgtttttatttgttgttggatagtttgatgtttgatattttgagataagttttagtataatgagtatttttgtgagtaattataggtgtgtgttgaggagtttagggtattaattagaggtttaattatgaaaaaggtggattttttgttttatttttggattttgagtttattatatattttttaaattgtagtatttatttgtttggttttttagaatgtttgttttgattgatatggattttaaagtgtattaaaggatgtgattaaagtaggtttaaatattaatttggaagaagtatggtttatgttttttttttttttttttttttttttttatttatttatttatttgtttatttttgatgtaggaaaaaagtttgttgaaatgttaaaattttaaattagtatttgttaaattatttattatatgtgaattttattgaattaagtattatatagtaattttaagaatgtaaatattaagatttgtagaaattaagatttatgtaaagaaaaaaaagttttaggaaaaatggtttgt

SEQ ID NO: 3799 - DNA, 2490 bp, Artificial Sequence
  chemically treated genomic DNA (Homo sapiens)
ttagttaattatttatttttttgagttgtttttttatttataaaatgggtataataattttttaaattataaaaatgttttgaggattaaatgagattatgaatataaagtatttagtagaaggttgggtatttattaagtgtttagtggtagttattattattagtattatttaggttaataagaaataagataaattgaggaattaaaagttttaaaattttaaatttttttttttggattttatttttatattttttttattgaatttagagatagtggttttttttttttattattttggtatttttttgtttattattttttataattgttttttttatggaggtgttaaggagtaataaaatgtttaaaaggtaagagaggaggaaggggaagtttttatttaggaaatttatattttagttagttttggtattagatgtgttttttagtagtgtattaatattaggagggtttatatgggaaggtaatagtagatttttagtattttttttaaattaggattagaattggttttattttgattattattatttttttgggttattgtgttttagggtttagattatttttttttagtaaagtttgtttaatatttttaggtgttgagaggttttttttatagggttttagagtatatatgtatattttttttagaagatggtagtgagtttgtattggaatttatttttttttattagtttgattgtttgagggtttgtattattttttttttatttttatatatttaatatttagaaaaggaattttaattttattttagataggtaaattagttattgaatgtaggttgatttttagggattaatttaggtttaggtagttttggtttaaattgggtttgtagttatttttaagtggggagttgaaattttaaagtttgatttttttttttgttgaatagaaggggagatgtgtaagaatgatataattttattttagatattaatttagaggaagaggatgggagttattatattgatttttaaaaggggataagagatttatatttatatttttaagtttattatagattattaattatgatgtaatttgttataatagggggattttttttgaagagatggtgttaaaatttgattatgaggtttttttatgtgaagagagaaaagggggtgtttggggattatttatgagaatttggggagggttttaattgtataaattagttgtgggttatagaatgtttgtttagtttattagtatttgttgtttatagtgattatttatttaatagattggttgtgaataagatgatgggattagtgggtttatgttttagagagttttgtttattattaatatgagttatgttttgtttaggaattattttttttgttgaagaaatattgtgatgtaatatgataaatatgtttttattatgagtgtagatttgtttagaaagatttgtattaaggtggttgtattttgtatgaattatatgttggggaggggtaggtagtattaaaaattagttttatttgagtttttaagttattatggtatatgtgtttgttttattataaattttaaaggtttgtgatgtttggtttttattgtttaagttttttttttttttgtaagggtggaattatttgtttgtaatattagtaattattatgtattttggaattgagtagagagtgtgtttgagtgtgtatgtttagattggagggaattatttttatttttaaagttaaattttattttttttttaatttgaaattatgtattttagtttttggaaagttgggaatggtagttagaaggaaataagttatattaatttggttgatgtgagagaggagtttagttttggaaattttatataaatttagaaagagaatattatgtttttattttttatatgtttattttatttgtttttttgaataagtataaataagatataatagtttagtaggttgttattgaaagagtgagtaatgggtttttaggaaagaggttggtggtggttaaggagtttgtattgatagaattaaaggaggaaagtagtagttatgtgtttattttgatttgtttttaatggggttatgtttttataaagaaaagagttaatattttgattttatttttttatattttttaaaaggtataggaagtttttatttatagttattagtagttttttggataattaaagttgttagtgttatttaggaatttttttggggatttagtttttttttgttttttgtttgaaaatttttttgatttagaaagatttttgggtttgttttatataagtagaaggtttgtttttttagatttgtttttttttagtaaaattgtgaaagaattttattttttttttaaagttgtttttttggttttatattttaattttaataattatagattatagagaagttgatagaatttgtttttataaaataaatataa

SEQ ID NO: 3800 - DNA, 2490 bp, Artificial Sequence
  chemically treated genomic DNA (Homo sapiens)
ttgtgtttgttttatggaaataggttttgttagtttttttatagtttatagttgttaagattaaaatgtgagattagaagagtagttttgaaagagaagtagaatttttttatagttttgttgaggaaggataagtttgaaggaataggttttttgtttatgtaagataaatttaggaatttttttggattagaggagtttttagataaagggtagagagagattagatttttaaaagggtttttaggtaatattagtagttttggttatttaagaggttgttggtgattgtaggtagggattttttgtgttttttgaaaagtgtaggagagtaggattagggtgttggtttttttttttgtgaagatatagttttattaaaagtagattaaggtgagtatatggttgttgttttttttttttggttttattagtataagttttttagttattattagttttttttttagaagtttattatttatttttttagtagtagtttattaaattattgtgttttgtttgtgtttgtttaggagaatagatgaggtggatgtgtgggaggtggggatgtaatgttttttttttgagtttgtgtggagtttttagggttaggttttttttttatattagttaaattgatgtgatttgtttttttttggttgttatttttaattttttagaggttgaggtgtatgattttaaattgaagggggagtagaatttgattttgaaggtaggggtaattttttttaatttaaatatgtatatttgagtatattttttgtttaattttaaggtgtatagtaattgttggtattataaataggtaattttatttttgtaaaggaggaggggatttaaataatgaaagttagatgttataggtttttgaggtttatagtgaagtaggtatatatgttataatgatttgaaggtttaagtgggattagtttttagtgttatttatttttttttagtatgtgatttatgtaaaatgtagttattttaatgtagatttttttagataaatttatatttgtgatggggatgtgtttattatattatattgtagtgtttttttaataagaggaatggtttttgaataggatgtagtttatgttaatgatgagtaaagttttttggggtatgaatttgttgattttattattttgtttatggttagtttgttggatgaatggttattgtaagtagtaggtgttaatgagttgagtaagtattttgtggtttatagttagtttgtgtagttggagttttttttagatttttgtggataatttttagatatttttttttttttttttatatggaaaagttttatgattaaattttggtattatttttttaaagggaatttttttgttgtagtaggttgtattgtggttggtaatttgtggtaagtttgggagtatgaatgtgggttttttgtttttttttgagagttagtgtggtaatttttattttttttttttggattagtatttggaatggagttgtgttgtttttgtatatttttttttttatttaataagagaaagaattagattttaagattttggttttttatttgggaatggttgtgaatttagtttaaattagaattatttgggtttaggttggtttttgagaattaatttgtatttagtgattagtttatttatttgaaataaagttagggttttttttttagatattaggtatatagagatgaaagagagatgatgtaagtttttagataattaggttggtggagaggagtaaattttaatgtgagtttgttattgttttttaaaggagatgtgtatatgtattttgaggttttgtaggaggggttttttagtatttaggggtgttggataggttttgttaaagagggatggtttgggttttgagatatagtgatttagagaagtggtggtggttaggatgggattagttttagttttggtttagggaaaatgttaagaatttgttgttgtttttttatatagatttttttgatgttgatgtattgttaagaaatatatttggtattaggattgattaggatgtaaattttttaagtagaggttttttttttttttttttttgttttttgggtattttattgttttttagtatttttatgaggaggataattgtggaaagtagtggatgaggaggtgttagggtaataagaaggaggaattgttatttttaggtttaatggaaaggatataaaagtgaggtttagaagaaaaagtttgaagttttggggtttttggttttttagtttattttgttttttattagtttagatggtattagtaatagtagttattattaagtatttaatggatgtttagttttttgttgaatgttttatatttatgattttatttaatttttaaaatatttttataatttaggagattattatgtttattttataaatgaggaaatagtttagggaagtaagtaattggttga

SEQ ID NO: 3801 - DNA, 2475 bp, Artificial Sequence
  chemically treated genomic DNA (Homo sapiens)
gttattgtgtttggtttatggataaggttttgatgttggagaaaggagagtgaataaaataattatgatttttgtttttatggggtttatagatagggagtaattagataattgtataaataaataattatagattttggtaaatgttaagatatttatagagggttagaagaaaatatgttaggtagttttaatttttaggttaagagagataggtattttttgttgagttggaagaggaaattaaggtttaggatagggtaggtgtgtttgttgttgtttggtgagttagggttgtattaggattagaagttttatttttgattattgaataaaaggtttagttttaggttgatatttattatgatatatttttttatttttttttttgttattttttgattttattttttttggaaaataagttttgatttgtagttttgatatttgatgtttataaatttttaaattttatttttattatttttttatttttattttatatagagtgtagtttagttaggttggtaagggttgttggttagggttagatgattagaaagtgtagaggaggagagaatttggggtttttaggttgggagtagttagggaagggttaagttggaaaagtagtatttgttaggttggtaagagataaggtttaagtgtaggtattgtgaggaagtgagagtgaggtagaaggatgttttaatgttaggaagtgatgtgtagggatagagggatgggggatgaaggatgaagaatggaggggaggatgaagttgggttatatggttaggaggaagagtagtagggaaggaatgtatagagagttttttgtttttaggttttttttaatttttgtttttttttttttttatttttattttttataattttagtagagggttgaggggaatatagtaaaattttggagattgttttttagggagtagagtattttattaatattttggttagatttatggtttagggaggggtggggtaatttataggagagtgaaggtgttttagtttttaaggatttttgagaggttatgtagtttatgtttttgttttttaatatttaatagaggggaattatattttttttatttttttttagatatgaagagattttttgttttttttagattttttgttttttataatttttggttgtggggaattttttttaaggtatagattggattttttttgttgtagtttttgatttggttttttttattttgttttttgtggttagagaaagtttttttttgggtgattatagtggttttttaggattttttttttaatatttttttattgttagttggttttttttagaaggtaagtttaattttttttattgtagtttttagtattttttttgttgttgtattttatgtttttaaggtagaaatgtatttttttttttattaaataattaatagagataagggagaagaagggagagatttaagaagatggggatgaattaaggagatggagttggaggtggatgtttgatatagaagaaggaagattggggattttttaaggtagggtagggatggggttagtgggttttattggtgttggggttttttagaaaggtgtttttgtttttgtggttttttagtggggttgtgggtgttggtttgtttttgggtagttgtgggaagttggtgatgtttatgtagtttattggtgagtaggtgtttagggtgtttttttggttggttttgttttttgttgttatttttgtttgtgttttttagtagtgtagtgtttgttggaagtggttgtggtgggggagtgggagggtggagggtggggtttgatttttgtgatagttgggagggggtgttttttttagtttttggttgtgttttggtttgatttgtttttgtttgtttagtgttattagtttgtagttggtatataggtgtgtgtagatggatagttaggaaggtagtgtagggttgaggggagagtgtggggtaagtgagattttagtggttttgtattttatgtagtttagggattaaatttttttttttttttagtttgaatatagttagtgttttttttaaattttaggttttttttttgggttttagatttttttattgattgtaaattttttttgattttagattttgtttttgattttaaattttttggattttagatttttttttgaattttgagattttttttttttgattttagattttttttttgattttagattttttttttgattttagattttgtttttatttttaaatttttttgaaaattttagtttatgttttatttttaggtttttttgattgtagatgtttttttggataatagattttttttttgattttagatttttttttgtattttgatatttttgattttttttttaattgtatttttaaattttagtgtgtgttaggatttttgaaagtggattttt

SEQ ID NO: 3802 - DNA, 2475 bp, Artificial Sequence
  chemically treated genomic DNA (Homo sapiens)
ggggatttgtttttaaagattttaatatatattaaagtttgagaatgtggttgaaagaggagttagaagtgttggggtgtgggaagggatttgaggttagaggagggatttgttgtttaaagaggtgtttgtagttaaagaggtttggagatgaagtatgggttggggtttttaaaagggtttgggggtgaagatagagtttgaagttgaaaaagaggtttaaggttggaggaggagtttaaaattggaggaggaggattttggaatttaaggaggggtttggggtttgaggagtttggggttagagataggatttggggttgagagggatttgtggttagtgaaagggtttggggtttgaaaaggaagtttgggatttgaggaggatattagttgtatttaggttggaaggaggaaggggtttggtttttgagttgtgtaaagtgtagagttattgaagttttgtttgttttgtgttttttttttgattttgtgttgtttttttggttgtttatttatatgtatttgtgtgttagttgtaggttgatagtgttgagtagatgggggtgagttagattgggatatggttgagggttgggagaggtgtttttttttggttgttgtgaagattaggttttgttttttgtttttttatttttttgttgtagttatttttggtaggtgttgtgttgttggggggtgtgggtgaggatggtggtggagaatgaggttagttaggagagtgttttgggtgtttatttgttagtggattatatgagtattattagttttttgtggttgtttgaggatgagttggtgtttgtggttttgttgaggggttgtaaggatgaggatgtttttttgggagattttgatattggtgaggtttgttgattttgtttttgttttgttttgggaagtttttggtttttttttttttgtgttaagtatttatttttagttttatttttttaatttatttttatttttttggattttttttttttttttttttgtttttgttaattatttggtgaggaagggggtgtatttttgttttggaggtgtaggatgtgataatggagaggatgttagggattgtagtagaagggattgggtttattttttgggaagaattaattaatgatgaaggaatgttgaaggggagattttaaggaattgttgtgattatttagaagagggttttttttagttatagaggataggataggagaaattaagttagagattgtagtaagagggatttaatttgtgttttaagagaagttttttatagttagggattgtgagaagtagagggtttgggagaagtggagaatttttttatgtttagggaggggtaaagagaatatgatttttttttgttgggtgttgggagatggaggtatggattgtatgattttttaaaagtttttggggattagaatgtttttatttttttgtggattattttatttttttttgagttatggatttggttggggtattagtaaggtattttgttttttaggaagtagtttttagaattttattgtgttttttttagttttttgttggaattgtgagaagtgggggtaagagaaggaggagatagggattggaagagatttgggggtaaagagttttttgtgtattttttttttgttgtttttttttttagttatgtggtttagttttatttttttttttattttttattttttattttttatttttttgtttttgtatgttattttttggtattagagtatttttttattttatttttgtttttttgtagtgtttgtatttgagttttgttttttattagtttggtagatgttgtttttttggtttggtttttttttagttgtttttagtttgaaagttttaaattttttttttttttatattttttggttatttggttttgattagtagtttttgttaatttgattggattgtattttgtatggggtgggggtgaggagataatgaagatggagtttagaggtttatgggtgttaaatgttagggttgtggattaaaatttattttttaaagggagtggaattaggaggtagtagggagaggagtgggaagatgtgttatgatggatattagtttgaagttaggttttttatttagtagttaggagtgagatttttggttttaatatagttttgatttattaagtgataataggtatatttattttgttttgggttttagtttttttttttagtttaatagagaatgtttgttttttttgatttagagattggaattgtttgatatgtttttttttggttttttgtaaatgttttagtatttattaaaatttatgattatttatttgtgtaattatttgattattttttgtttgtaagttttatgagggtagggattatgattgttttgtttatttttttttttttagtattaagattttatttataggttgggtgtggtggt

SEQ ID NO: 3803 - DNA, 2498 bp, Artificial Sequence
  chemically treated genomic DNA (Homo sapiens)
ttttttatagttgggtgtttaggtgattgatagttttttaaatattatgttagtattgaagatatttatttttttattttgtaggttagaagattgaggtttagtgatgttggagggttttatagttagtgagtgaggaagttaaaatgtgaatttgatggttttttttgatttattttatgtttgtgtgtgatagttatggttgtggtgggggtgagagtgggtatagagatgttagtttgggtttgttattgttagaagtgaagatgatattttagtgttgtagattttgtaggaggggattggagttaagttataaatttttttttgttaggagatgggtttttggagtgggtgtggtgtttgattatttggggagatggttgaagttggggatttgggaaggtttttagaagggaggtggtttggggaattaggggtttagtttttttaggatggattggtttgatggtggttttttaagtttgttttgtttttagttattgggtattttgtttattttggaggaggaatgtatgttttttaaggttttagatgttagtttttgggttaagttttatgataattatgtggggaagttatttaatttttagtagttttggtttgataagaagtgtaagtattaggtttattttgaggtggtttattatgtaggtgtggtaggtgtttgttggaattttagtttttggttaggttttttttgttttgttttaggttttttatttgggtttagtatttgatttgtttttttaggtgttttatagtattgtgggttggttggagaaaaataaggattttttgaatgagattgtggtttttattttttagaagttatagaataggtttttggtgattttttatgagaattatgtgggtttttgttttagtgagtatggagggataagatttttattttgataggggtttatagagtgatattttttggagtgattaggttttttgtttttattagttgagttttttaagtttggggtgaaagagaagtgtaagaaggtagtattgttttagatggtgttttagttgtataaggtaaggttttatttgggagatagatttttttttttggtagtttttagttttgttttttattttttgttttgttttttgtgttttgggtgggtggttgttaagatttgtagtgatgtttaatttttttttatgtgaatattatagtaagtttgtgttgttttttgtttttatgttgtttgggtagggtttgtggggaaggggtgggagttttggggttttgggagggatggggatttggtagggaagtgaagattttggtggtggtgatgggagatagtgaagggttttttattattagaatgagagtgaaagagtaaaagtgtagggtatttagggttttgtttttgttttggttttgattattgtggtatttaattttggttttttgttttttttgtgttttttttttatttttttttattgttaggagaattttaataagttgatgattaatttgtgggttatatagttttattttgtttgttgtattgtttttaatgagaataaaattttaggtagttatttagggttggtttggttggggttgggaggtattatgggaaggtgatagggtagaggttgggaggttgagtatatttttttttttattttgtagggtttttattgttgttttttttttggggtttgtgggtgtgtttgttgatttttgattttttttttttttatgtttaggggttatggatgtttttttggtgttatattagttgtgttgtaatggggttttggaggggatttggatttgttgttaagggttttttaataggttgttttatattgatttttggtagtggtgggtgattttttttttttgtttgttgttttaggtggaggtttgaggggttgggtaggatatatatattagagtttaatagatggttttttgtttggagggggaagtagggattgtgaggggtttggttaggtattttagtaagatatgggggtggtttagatttggttggggatttggggagaagtgaataggtttggggtaaatagtggaggtggagtttataggttttgttgataagttggatatggaattttggatgtagaaaagatgaatgatttttagttttgggagtgagtaatttgggagttattagtggtagatttattgagttataaaaatagggttttttgatttggaggagaggtgaagggatattggtttgagttttgttttgtgtgtattaggtttgaaatgtttttagtagatattttagaaaagttatgggggagattgggattattaatttggagtttagggtagtgggtagaaaggatgtagatttgggagttgaatgagaattatgtggatgaggttttatgagatatttggtatatagtaagtatttgggtagtgttgttagtttttttttgtttttttaatgggtaataagtat

SEQ ID NO: 3804 - DNA, 2498 bp, Artificial Sequence
  chemically treated genomic DNA (Homo sapiens)
atgtttgttgtttattgagggaatggggaggagttggtagtattgtttaggtgtttgttatgtgttaggtgttttatgaagttttgtttatatgatttttgtttaatttttaaatttgtattttttttgtttgttgttttgagttttagattgataattttaattttttttatgatttttttaggatgtttgttggaggtattttaaatttgatatatgtaaaatagagtttaaattagtatttttttattttttttttaaattaaaaaattttgtttttgtagtttagtaaatttattattggtagtttttaggttgtttatttttaaaattagaaattatttgttttttttgtatttagaattttatgtttagtttattagtgaggtttgtaggttttatttttattatttgttttaagtttatttatttttttttaagtttttggttaggtttgagttatttttatgttttgttgggatatttggttaggttttttatagtttttgtttttttttttagataggggattgtttgttgggttttgatatgtgtgttttgtttagttttttaggtttttatttggagtagtaggtagggggaaggggttatttattgttgttggaagttggtgtagagtaatttgttggggaatttttggtggtagatttggattttttttaggattttattgtagtgtagttggtgtagtattaagaaggtatttatgatttttggatgtgagaggggaaaaggttagaggttaataggtatatttgtaggttttagagaaaaagtagtagtggagattttgtgaggtgagggggaagatgtatttagttttttggtttttgttttgttatttttttatgatgttttttggttttagttaggttagttttgggtgattatttggggttttgtttttgttggggataatgtagtggatgaagtggggttgtgtggtttgtaggttggttattagtttgttgaggtttttttggtagtggggaagagtgagggaaaggtataaagggggtagagaattagaattggatgttgtagtggttaggattgagatgggagtagggttttaagtgttttgtatttttgtttttttatttttattttggtgatgggagattttttgttgttttttattattattattaaagtttttatttttttgttaaatttttgttttttttagagttttagggtttttattttttttttataaattttgtttaggtagtgtagggatgggaagtagtatagatttgttgtgatgtttatgtggagaggagttaaatattattgtaagttttaatagttgtttgtttaaggtataggggatagggtagggggtgaaggatggggttggaggttgttaagagggagggtttgttttttagatggggttttattttgtgtagttgggatattgtttggaatgatgttgtttttttatgttttttttttattttagatttggggggtttagttaatagagataaggggtttggttattttagggaatgttgttttgtgggtttttgttagagtggagattttgtttttttatatttattggagtaggagtttgtataatttttatagagagttgttaggagtttattttgtgatttttggaagatggggattatggttttatttaggggatttttgtttttttttagttagtttataatgttgtaaggtatttggagagataagttaggtgttgagtttgggtgggagatttggagtagggtgggaggagtttggttgagggttggggttttagtaagtatttattatgtttgtgtagtggattattttgaagtgggtttggtatttgtgttttttgttaggttgaggttgttggaaattgggtgatttttttgtgtggttgttgtagagtttggtttggaagttggtgtttgaggttttggggaatatgtattttttttttaggatggataggatgtttagtggttgggaatagaatgagtttgaaaagttattattaagttagtttattttggaaggattgaatttttggttttttaggttattttttttttgggagtttttttagatttttagttttagttatttttttggatggttagatattatatttattttaagaatttattttttaatagagaaaagtttgtggtttggttttagtttttttttgtaaaatttgtagtattgaggtgttatttttatttttaataatggtaaatttaagttggtatttttgtatttatttttatttttgttatagttatggttgttatatataaatatggggtaagttaaaaaaagttattaagtttatattttggtttttttatttattagttgtggggttttttgatattattaagttttagttttttaatttgtagagtgggaagatgaatgtttttagtgttgatataatatttaaaaagttgttaattatttaaatgtttagttgtagggga

SEQ ID NO: 3805 - DNA, 2282 bp, Artificial Sequence
  chemically treated genomic DNA (Homo sapiens)
ttggttaaatttttggagatataggattttgttgtgttgtttgggttggttttgaatttttggatttaagtgatttgtttgttttggttttttaaagtgttgggattatagggttttaagttaggttttaagaatataagggggaaaaaggttgtttatttatggttgtgtgatggttaggaaaatattttttatttataattgttttttttgtttatagttttttatatatatagattttttagtttttattttattttattttttttgttatttgaggaagtgatatttaaattaaatttaaataaagttatattgtgaaaagttttatttttattttttttttttttagtttaatttttattttatttttattaattattttattagttttttgagtattttttaaattttttatgaaaaagttgtttttaaataaagttaatgttttataggtgttagtaaggtttggggtgggggagggtggaagaagtagtggattaggttttatttaatttggtttattttaaagtagtgttttttgtttatttaaaaataataataattatatgttgggtatttgttataagttagatgtttaatattaattatttttagtttttagtatgtattagaaatgtattaatgttttatataattgttttttttgatttttataataattttaaaaggtaggttattaatttttatttttattttataagtgaggaaattgaggtatagaaaggttatttgtttaagtaagagagaggagtagggttttgaatttaggtttgattttagagttttttttaattgtgatgttttatattagtaaattagatatagtttttgtatttgttggaatttagtttaatgtgggagatgggtgagaaaaaggtagataataaagaaatatgaaattatagattaagaaagtaatgtaaatgaaatgaatttgtggttgtgatagaataataatggggatttattttagaaaggggaaggaaagagtgttaaggaaaggtttgagaaaatgatatttatgaaatgtttgggaattatttgggggttgtaatgatgatttttttttttatgtttaatatatgggataaatttgaggtttatagaggttaaaataaatatgatagggttttttagatgtgtagatgtggtgtaaagaagggaggatttagaaattgggtttagggtttgtatatgttattagtgtttatagtagtttagttttgtttggtttttgataagggatattaagttagttgttttttatggttttgttgtagttgagagtgtttgggtagtttatagggaggttttttggttagttaaaagggttttggtttgtttagtggtggtttggaaaggttttttttttggttttttgttagtttttgtttggtttgttttgttttgttttttttggtttagttttgtatttgtattgtttggattaggttttggttggttagttggttttgttgtagttgtagtagaatgttattaggttgtggttggttgttttatttgttttaagttgttattgtggttgttgattgttttttttggttggttttagatttagttgttattggtgttgttgttatgtttttttgttggataaataggaagtaagtggttttggggttgtggagatttttatggggtggtggaggggttgttgtagtgtttttagtgggttgttggtggaggtgtaagttgtgtggtagggattgtgtgtggtgtggaggttattgggaattgtagttttgtgtggtagtggggtaggtgggaaaagagatgtggttttttttgtattgttggtttttttggtttttgggtttagtattttggtgaaattttttaaggtttatatttttttattttttttgttgatttgggtaggatgtaggtagttggttaagaaatgattttgggttttaggttaggagttaggtttttgagtttgttttttgtttgtttttttttatatgtgatttattgtggatattgattaagttattgtgttttgttattgtgtttgtgtttttgttaggttattttatttatagattttgggagtttgattaattgtagtttttggggttttttttgtgtttgatattaaattatgtttaggggaaagggagggtgtttgggatatagtggtgagtagaatggtttgggattttttattatgaaatgtaggttataggggaagatagtagatttatatataaagaaatgtagttttaaattggata

SEQ ID NO: 3806 - DNA, 2282 bp, Artificial Sequence
  chemically treated genomic DNA (Homo sapiens)
tatttagtttgagattgtgtttttttgtgtatggatttgttgtttttttttgtaatttgtattttgtgataaaggattttaggttgttttgtttattattgtattttagatatttttttttttttttagatatggtttggtgttgggtgtagagaaagttttaggaattatgattgattaggtttttagaatttatagatggagtgatttgatgaggatataggtgtagtggtagagtgtgatgatttggttgatgtttgtggtgagttatgtgtagagagaagtaggtaggaagtggatttgagggtttgatttttgatttgaagtttaggattattttttggttagttgtttgtattttgtttaaattggtgagagaaatgggagaatgtggattttgggagattttgttgaaatgttgggtttgggggttagagaaattggtagtgtaggaaaggttatatttttttttttatttattttgttgttgtgtaggattataatttttagtagtttttatgttgtatatggtttttgttatgtggtttgtgtttttgttgatggtttattgggggtgttgtggtgatttttttgttgttttgtagaaatttttgtggttttgaggttgtttgttttttgtttgtttgatgaggagatatggtggtggtgttggtagtggttgggtttggagttggttgagggagatggttggtagttatagtggtggtttggggtggatggggtggttggttgtggtttggtaatattttgttgtagttgtggtagggttagttgattggttggggtttggtttgggtggtgtaggtatgaggttggattaggaggggtggggtggggtggattaggtgggagttggtggggggttggggaagaggtttttttaggttgttgttggatgggttaaagtttttttggttggttggaaggtttttttgtgagttgtttggatgtttttagttgtagtggggttgtgggaagtagttggtttgatgttttttgttaggggttgagtggggttgggttgttgtggatattgatggtgtgtatgaattttgggtttagtttttggatttttttttttttgtgttatgtttatatgtttgggggattttgttgtgtttgttttagtttttgtgggttttgagtttattttgtgtattgggtgtgggggagggggttattattgtagtttttaaatggtttttgagtattttataaatgttatttttttaggtttttttttgatatttttttttttttttttttaaagtaggtttttattgttattttgttatagttgtgaatttgttttgtttatattatttttttagtttataattttgtatttttttgttgtttgttttttttttgtttgttttttatattaggttgagttttagtgggtgtagagattatatttggtttgttagtgtagagtgttatggttaagagggattttggagttaggtttgggtttaaagttttgttttttttttttgtttgggtaggtgatttttttgtgttttagtttttttatttgtaagatgaagatgagaattagtaatttattttttaagattgttgtggagattaaagggggtaattgtgtaaagtattagtgtatttttggtgtatattaagggttgaaggtagttaatattaagtatttgatttataataggtgtttaatatatgattattgttatttttgagtgagtgaaggatattgttttagggtaaattaggttgaataggatttagtttattattttttttatttttttttattttgaattttgttaatatttgtaaaatattagttttatttaaagatagtttttttataaaaagtttgaaggatatttaagaaattgataaagtggttggtgggagtgaggtgggaattgggttaaagggggagaaaatgggagtgagattttttatagtgtaattttatttaaatttaatttgaatattatttttttaaatgatgaaaaggatagaataaaataaaggttagggggtttgtgtgtatggaggattgtggatgaaaggagtagttgtgagtgagaaatgtttttttggttattatataattatagatgagtagttttttttttttttgtgtttttaagatttgatttaagattttgtaattttagtattttgggaggttgaggtaggtagattgtttgaatttaggaatttgagattagtttaggtaatatggtaaaattttgtgtttttaaaaatttagttgg

SEQ ID NO: 3807 - DNA, 2452 bp, Artificial Sequence
  chemically treated genomic DNA (Homo sapiens)
aaaaatataaaaaaattagttggttgtggtggtgggtgtttgtaattttagttatttgggaggttgaggtggagaattgtttgaatttgggaggtgaaggttgtagtgagttgagattgtgattatattattgtattttagtttgggtgatagagggagattttattttaaaaaaaaaaaaaaaaaaagagtttttagatattgttggtgttttagggattatattttagaattatttttgttttttgataggaagagatgaatagagggaaaagaagtggtgattgattttatttggattattgtaatgttttattgtggttttaggttttttttttattttggttattgagtttttattaggagtaaattaatttttttaaagtttagttttaattatgtttttgtttaaagttttttggattttttgatattatttattattgttgtttattagaaatgtttgtagtgatgaaatgttttatatttgtattgtttagtatggtaattattaattatatgtggttatgagttttatattttgttttattaaatttaaatttaaataattatatttggttagttgttagatagtgtagtgtatttggtttgttatttaaggttttgtttggtattagtttttttttatttttttagggatagttttaatttttagtattttaggttttaggttatatgtagtgttttttgattttattttgtaatttttagtattatggtttgtgttatgttttttttttagtttatattgtttttttgttttgtttttaatgtttaatttatatatgattttttttttgaaattttttttgatatttgttgttttttaattttttttttttttgaattttttaatattttgttttttttttataatttttagtgttttttgttttatattgtagttggttggtgtgggtatttttttttattaaattgtgagtttttggaggatgtgattgttttttgtagagagtttttgttttttattgtaggtttttttaggtatatagaggagtttgataaattttataaatttttgtattggtatattggggatatagagattggtattataatttttttgtttttaagttgtttataggtttttatgagagtttgatttatgtttagagaattattgaagttaatggttattttaggtagggagataaaagttatagagggtttagttggtgaggggagtttggtaggagttgtttaagtagaaggttgtgtttatatatatagatgatttttttgtttagtttggtttagtgtggggagatgggaatatttaggtgttattgtttggttgttttgtgaagttgtggattaattagtgatgtagtggttggtttagttgtttggtttttgtagatggatggatgaagagaggattgaaaagatagtagagtagtgttagtttttggaagtgaagtgttggttgggtggagtgggtatttgggttgggaatgtgagtgtaaggaaatgtttgtgatttgatagtagatagtaggtgaaattttgttgggtttggtttggggggttatgaggtttttataatagtttttgttttaaatggaaaaattgttgaaaagaaaaaaaaaaaaaggaggttaggtgtagtgggttatgtttgttattttagtattgtgggaggttaaggtgagtagaatatttgagtttaggagtttgagattagtttaggtaatatggtaaaattttatttttataaaaaatataaaaattagtagtgtatggtggtgtatatttgtagttttagttatttagggggttgaggtaggaggattattttagtttggggaagttgaggttgtagtgaattatgattatattattgtattttagtatgggtgatagagtgagattttgttttaaaataataataatagtaataataaaatagaggaaaaaaagatagaaatagttttttggttttagattttaattttaagagtattttatattttgaaaatttttagtatatatttatttttgggataaaaatattaaaaaaaggaaattttattgatgttataatataaatatagaaaagtgtatagattataagtttatatatatttgtgtaattattttttagatatgaatagaatatgttagtatttttagaataaatttgtgtgaagtttaatgtgtgtaggattaatgatagaataaatataggttttggagttaggtatgtttggggttgaattttgggtttttgtatttattagtagtgtgattttggatgagtgatttaattttagtttttttttttgtaaaattaaggtggatttataatgtttgttttatagggaagtaggagatttaaaattgaaaatataggtaagttgttaggtatagtgttagtatataagtggggatttagatgttttttgtaatg

SEQ ID NO: 3808 - DNA, 2452 bp, Artificial Sequence
  chemically treated genomic DNA (Homo sapiens)
tattgtagagagtatttgagtttttatttatgtgttggtattgtgtttagtaatttgtttatatttttaattttaaattttttatttttttgtaaggtagatattatagatttattttgattttataggggaggaaattgaagttaaattatttatttaaggttatattgttagtaggtgtaggggtttaggatttaattttaggtatgtttgattttaaggtttgtgtttgttttattattaattttatatatattgggttttatataggtttattttggagatattgatatattttgtttatgtttggggggtagttatataagtatgtgtaaatttatgatttgtgtatttttttgtgtttatgttataatattaataaagttttttttttttaatgtttttgttttagagatgaatatatgttagagatttttaggatgtaaaatatttttaggattagagtttaaagttagaaagttgtttttattttttttttttttgttttgttgttgttgttattattgttttgagatagggttttattttgttgtttatgttggagtgtagtggtgtgattatggtttattgtagttttaatttttttgggttgaggtaatttttttattttagttttttaagtagttgggattataggtgtatattattatgtattgttaatttttatattttttgtagagatagggttttgttatgttgtttaggttggttttaaatttttgagtttaagtgttttatttattttggttttttatagtgttgggataataggtatgatttattgtatttgattttttttttttttttttttttttaatagtttttttatttaaaatagggattgttatgaagattttataattttttaagttagatttagtagaattttatttgttgtttgttgttagattataaatatttttttgtatttatatttttagtttaggtgtttattttatttagttagtattttatttttagaagttggtattgttttgttgtttttttagttttttttttatttatttatttgtagggattagatggttagattagttgttgtattattggttaatttgtaattttataaggtagttaggtagtgatgtttgaatgtttttatttttttatattaggttaggttgggtagagaagttgtttgtgtatgtaaatatagttttttgtttaggtagtttttgttggattttttttgttaattgggttttttgtggtttttatttttttgtttaaaataattattggttttagtggttttttgggtatgaattagatttttgtagaagtttgtgagtagtttgaggatagggaagttatggtattgatttttgtatttttagtgtgttagtataaaggtttgtgggatttgttgaatttttttgtgtatttggagggatttatagtaggaagtaagagttttttatagaaaatagttatattttttaaaagtttatagtttagtaagagaaagtatttatattagttaattgtaatgtaaaatagaaagtattaaaggttgtaagaagaggatagagtgttggggagtttagaggagaaaaagattagagagtagtaggtgttaaaggaggttttgaggaagaggttatatgtgggttgggtattaaaggtagggtagaaggataatgtagattgaggagagagtataatataagttatagtgttgggaattataaggtagaattaggaaatgttgtatatgatttggagtttgggatattgagggttgaggttatttttgaggagatagaaaggagttggtgttaagtagagttttgaatgataaattaagtgtattgtattgtttagtaattggttaaatgtgattatttaaatttaaatttaatggaataaaatgtaaaatttatagttatatgtggttagtggttattatattggatggtgtagatgtagaatattttattattatagatatttttagtggatagtaatggtggatagtgttagaggatttagagagttttgagtagaggtataattagagttgggttttaggaaaattaatttgtttttggtgaagatttagtgattggagtgaaggagaagtttggaattatagtgggatattgtaataatttaggtgagattagttattattttttttttttttgtttatttttttttattaggaaatagggatgattttaaagtgtggtttttggaatattagtaatatttgggaattttttttttttttttttttttgagatggagtttttttttgttgtttaggttggagtgtagtggtgtgattgtaattttagtttattgtaatttttattttttaggtttaagtaattttttgttttagttttttaagtagttgggattataggtatttattattataattggttaatttttttgtattttt

SEQ ID NO: 3809 - DNA, 2498 bp, Artificial Sequence
  chemically treated genomic DNA (Homo sapiens)
tgggtttaatttttagttttttgggattgtttttttttttaaatagttatgggtgttttaaatagattttgggttagagtttgatgattttttgggatggataggggtttatggagatgggtgtttaggagttttgaagtaaagttttgtaatttatttttttttattagagtgagtagtaggaattgggaggtaggggtgaggaatttagagttttggttaaggttaatttaggtagtatttattggaagtagtttagagtattaagagggtaggagtaaaagatttttgttttggtttgttatttttttttttttttttattttttatttgttttttttttattattggtttttgaagatttaaagagttgattgaatttttagttgttaatattgaatttggtttttgggaagatatttttttatttaatggatgaggagattgaggtttggtttggggaaaggtgttttttgatttagatagattttgtttttttatattataagtatttatagaatttaggttggagagtagattttggggaaaatggggagatagagatatagttgagtaagatattaatattttaatgagggagaagtttatttggttagaagagttataaggaaaagttaaaatttaagtgttgagggtagatataaattagtagtatgttgtgagttttatagttaggggtattttgggtgttgtgttaggttattatttattgataagagttggtaatattttagttttttttaaaattgtgtttagttagtggtaggagagtttaggaagtttttagttttttagggagaggttaatatgtgtaagttgggttgtttttaaagttgttatggtatttggaagtgtgtagatggagtttggttggtatttagtaggtgtttatgtttattgaaaaagtaaaggtaaagtttgttgtttgggggaagttttagggtttttatatggttatagggaagttttgttttaggtgggtagttgttttttttttattgtgaatatggaaaggtattggttatgaggggttaatggggttgttgtgtgtataaggtttgttttagggagggtaaaagatattgttttgggatttaggaagttgtttttgaattggtttttttatgatattattttttaggttgtgggattgttaggttgggtggaagtggattttagttaaggggatgtttttagatgttatgtttttaaattggatttgtttagaaaggtaggtagagataggtttgtgtttgggaaagttttgggtaatgatttaggatggtatttaggttttttttgggtaggggatggttataggtttttttggtggtggtgtttattaattttgttttaagaaggagagtttgggtgtggaggttttgggtagttgaaggtagagatttattttttttttggttatttatttttattttagtaatgttttttagaatgttttaaagtttttttaagtttttgtttttaggttagggttttgtagttagttttaaggttttttttaggagtgtgttttttaaataaagttgagagggggtggggggaatgagggagttttagatttattttagagtggtttttagagggtttgggtttttttttttggattgtttagtgggaaggagggttggttggtgttttaggtttgtgggattgtgatagttggtgatttttgtgatttttttttttatttgggtgtttttattttgagatagttgttttttgagtgtagtttttttagtttttgtattaagttgttgggtttgtagtttagtatttttttggtgaggttggagaaggtaagtgaggtgttgagtggtaagtggttgttgtttattgatgatgtggttattgatggtttgtttggggaggtgggtggttgtgggggttgttgtgtggagggtgtgggttgggttggttgttttgtatggatttttgttgggtttttggttgtggatttggtgttgttgtttagtgttagttttaggtttagtaggtgtgttttttttgatgtgtagtttgatatttttgagttgttatttgtgaggttggggggtggtggtggtggttgtggttttgtatttgagtgtggatggtttttggtatggattttggtgtggattttggttatttgtatatttgtattgtgtgttttgggagttattgtgtgtttttttttgtttggttgtgaggagaatgtggtgttgtaggtgattgttgagtttgggtttgggttgtggtggtttttagttagtgattagttggttatgtttttgggttgggttggtgatggtgtgtggtggtttttttttttttttggggtaggtgtgggtgtaggtgtgggttggggattgtagttttggattgggggtttggttgttggtgtttttattgtggttttttttggttttagtgagttgtgtgtatggtttaggtttgtttggttttgatgtttttgg

SEQ ID NO: 3810 - DNA, 2498 bp, Artificial Sequence
  chemically treated genomic DNA (Homo sapiens)
ttagggatgttgaggttgggtgggtttgggttatgtgtgtagtttgttgaggttgagggaggttgtgatggaggtgttggtggttgagtttttggtttggggttgtggtttttagtttgtgtttgtatttgtgtttgttttggagaggaaaaagagttattgtgtgttgttgttggtttggtttaaagatgtggttggttggttgttggttaagggttgttgtggtttaggtttgggtttagtagttgtttgtagtgttgtgttttttttatggttggataagaaggggtgtgtagtggtttttggggtgtgtggtgtgggtgtgtgggtggttggggtttgtattggggtttgtgttaagggttgtttgtgtttgggtgtggggttgtgattgttattgttgttttttagttttatggatagtagtttggaggtgttggattgtgtgttggaggaggtgtgtttgttgggtttggagttggtgttgagtagtgatgttgagtttgtggttgggggtttggtgggggtttgtatggggtagttggtttagtttgtgttttttgtgtagtagtttttgtggttgtttgtttttttggatgagttgttggtggttgtgttgttggtgggtagtagttgtttgttgtttagtgttttgtttgttttttttgattttattgaggagatgttggattgtgggtttagtggtttggtgtgggagttggaggagttgtgtttggagaatgattattttaaggtgggggtgtttgggtagaaagggaggttgtaggggttgttggttgttatagttttgtgggtttgaggtattagttggtttttttttttattgaataatttggagaaaggggtttaagttttttggggattattttgaggtggatttggggtttttttattttttttgtttttttttaattttatttgggaagtgtgtttttgaaaaagattttggaattggttatagggttttaatttgggagtggggatttgagaaagttttggagtgttttgggaggtgttgttgaggtgggggtgggtagttagggaagggatggatttttgtttttagttgtttagaatttttatgtttaggtttttttttttgggatgggattgatagatattgttgttagggaaatttgtggttattttttgtttaggaaaggtttgaatgttattttgagttgttatttagggtttttttgggtgtaggtttgtttttgtttgtttttttgggtgggtttagtttgaaagtatgatatttgggaatatttttttggttggagtttatttttgtttagtttaatggttttatagtttggaggatgatgttgtgggagaattggtttagaggtagttttttaaattttaggatagtgttttttgttttttttggggtagattttgtgtatataatagttttattggttttttgtggttagtgtttttttatgtttgtagtgagaggagggtaattgtttatttggaataggatttttttgtggttatgtggggattttagggttttttttggatagtaggttttgtttttgtttttttagtggatatgagtatttattgggtgttagttgggttttatttgtatgtttttaggtgttatggtagttttagggatagtttagtttgtatgtgttgatttttttttgggaggttggaagttttttgagtttttttgttgttggttgggtatggttttggaggaggttgaaatgttgttgatttttgttagtggatgatggtttggtataatatttagagtgtttttggttgtggagtttatagtatgttgttggtttatgtttgtttttagtatttaggttttaatttttttttgtggtttttttgattaaatgggttttttttttattagagtgttggtgttttgtttaattatgtttttgtttttttattttttttgggatttgttttttagtttgagttttgtaaatgtttgtagtatggaaggataaggtttgtttgaattaagagatatttttttttaagttaggttttagtttttttatttgttaaatgggaggatgtttttttaagggttgggtttggtgttggtaattgggagtttagttggttttttgagtttttagaagttggtggtaaggagagggtaagtggaaggtgaggaggaggagggaggtgatgagttaggataagggttttttgtttttgtttttttggtgttttgagttgtttttagtgagtgttgtttgaattggttttaattgaaattttgagttttttatttttgttttttggtttttgttatttattttggtgaagggggatgggttgtagagttttgttttagggtttttaggtatttatttttatgggtttttgtttattttaggaagttattaggttttgatttaaagtttgtttgaggtatttatgattgtttaaaggggaaaatagttttaggaggttgggggttgagtttg

SEQ ID NO: 3811 - DNA, 2500 bp, Artificial Sequence
  chemically treated genomic DNA (Homo sapiens)
tttttttttattgttatttttattattttggtggggatagaaatagagatatagttttttgtaaagttagatttgaggttggttgagatgtaggttgggtattttgtatattttgttggtgtgttaggttgtgtttttataagtttagattaaaaatggggatattaggagttgttatttgttttagaggtataatggtagtaagagatatttttgaaatagtattttgttttttttttgggagaatgaggagtttgttttttttatttttatgggaatttattatagtttttattatttttgtatttaggtatttttatttttttaaaaggttttgtatttttgattttttaggttttttatagtgggagttttagaatagagtaatttagtttttatgtaagttgtggatttttatttgttttaaaggaaagaaatatttttgtatgttttatatattaggtgttatagtatatttataggttttaggggttaggatgtggatatttttggtggggttatgattttggttattatatagttttattttttggttggtatgtaggattttttgagttttttaaatagtatggtgagtatggtatgattgtaaggagggtttttttttggtgtttttttggtggtttgtagagattataaagagggaaaagattttgttaatgttgttggatgtggttgaaaatgttttttttgttgagtttgagaagtgatagtatgttttgttggttggtgtggttttaggattttattttgtaaatttgattatagatatttggagttttaaagagttagaaaaatttgtaaggttgaatgtagaagtttgaatgtttttattttgagtttttattgattataattatttttgaatagtaattattgtaggaatgaaagaaaatttggggttgattaaatgaagtagtgtaagattttgagtaggggtagatttggttagtagtgtaaaaaaaataaggttttgtgagagtttatattttttttttattttgttgtagtttataggtagttttgtttaatttttaatgtatgtttttatggtttttaggtaaattataggagatggtattggtttttttaggagtgatttagtaatgtttaggttttaaggtagatttgtttatgttgttaggttgggttagtttggaggttgttttggtatgagtatgtaggtagatagatgttgatgttgttttaaagaattgtttttttaggtgttgagggtggtttttttgatgtttattttgtgttattgtttatttttataaggtgtttagttgttgtggtgatgatatttatattaataagtgttttatttatttgttggttttagggaatgtttgttagttgtgtatggtagttaattttagggtatttttgagtttgatgtttttgtatttagagaattagtttttaaattttgtattaatatttgggtttgaaagattttttatttatttaggatttattttgaaagggggagttatagttaatgattttgatttttgttttaaaggttttatatgttttgaagtgaagttttttgaaagttattttttgtgtttgagttttggttttgtagaaagggatgttgaaaaagagaagagtaaatagggttttgtaggttagattttatgtttaggtttatgagttgagtttatttttttatttttttagttaaaagtgtagggtggtgatgtttttagattttaaaattttgtagggaatgttttagaattttttgttttatgagaatttatttattttttatagttattttagtttttaattttttattgtttaggttttaattattgatattattttttatttttttttttttttttgatagggttttattttgttgttttaggttagagtattgtggtgtgattatagttttttatagttttgattttttgggtttaagtgatttttttgttttagttttttaagtagttaggattataggtatggattattatgtttagtttatttaaaattattttgtaggattgggtgtagtggtttatgtttataattttagtattttgggaggttaagattagtagattatttgagattaggagattaagattagtttggttaatattgggaaattttatttttattaaatatataaaaattagttggttgtggtggtttatttttgtaattttagttatttgggaggttgaggtaggagaattgtttgaatttaggaggtggtagagttgagattgtgttattgtattttagtttgggtgatagagtgagattttattttaaaataaaaatttttttgtagagatagggtgttattgtgttgtttaggatggtttttaatttgtggttttaatttttgattttaagtgattttgtttttttggttttttaaagtgttaggtaagattataggtatgtttggtttttgattttttttttttttttttattttatagttaat

SEQ ID NO: 3812 - DNA, 2500 bp, Artificial Sequence
  chemically treated genomic DNA (Homo sapiens)
attgattatggaataagagagagaaagaggaattaagggttaggtatgtttgtaattttatttagtattttgagaagttaaggaagtaggattatttgaggttaggagttgaggttatgagttaaagattattttggataatatagtgatattttgtttttataaaagaatttttattttgagatggagttttattttgttgtttaggttggagtgtagtggtgtgattttaattttgttgttttttgggtttaagtgatttttttgttttagttttttaagtagttgggattataggggtgagttattatagttagttaatttttgtatgtttagtagagatggggttttttaatgttggttagattggttttgattttttgattttaggtgatttgttgattttggttttttaaagtgttggggttataggtatgagttattgtatttagttttataaaataattttaaatgaattgggtatggtggtttatgtttgtaattttagttatttgggaggttgaggtaggaggattatttgagtttaggagattaaagttgtggagaattgtgattatattatagtattttagtttagggtgatagagtaagattttgttaaaaaaagaaagaggaatgaaggataatgttaatgattggggtttgagtaatagaaggttagaaattgagataattataaaaaataaatgaatttttataaaatagagagttttggaatattttttgtagagttttggagtttgaaggtattattattttatgtttttggttgaagaaataaaagaatgaatttagtttatgagtttgggtatgaagtttggtttgtaaaattttgtttgttttttttttttttaatatttttttttgtaaaattagagtttaggtatagaggatgatttttaaagaattttattttgggatatataaaatttttgaaataaaggttaaggttattggttatagtttttttttttagggtgggttttgggtgaatgaagaattttttaggtttagatgttggtatagagtttgagaattgattttttaaatgtaaaaatattaggtttagaagtattttgaggttggttgttatatgtagttggtaagtattttttgaaattggtagatgaatagagtatttattgatataaatattattattgtagtagttgggtgttttatgaaaataaataatgatataggatgagtattagaaaagttgtttttagtatttggaggggtggttttttgaagtggtgttagtatttgtttgtttgtgtgtttatgttaaggtagtttttaagttagtttagtttggtaatatggataggtttgttttaggatttgagtattgttaggttatttttgagaggattgatgttattttttgtggtttgtttgggaattataagagtgtatgttggggattgggtagggttatttgtaagttgtagtaaaataagaagagggtgtaagtttttatagggttttattttttttgtattgttggttaaatttgtttttgtttagaattttatattattttatttagttagttttaaatttttttttatttttgtagtggttgttgtttaaaggtaattatgattaatgagggtttaaaataaaggtatttaaatttttgtatttaattttatagatttttttaattttttaggattttaaatgtttgtggttagatttgtggggtaaaattttagaattatgttagttagtaaagtatgttgttattttttagatttagtagaaagaatatttttaattatatttaatagtattgataagattttttttttttttgtggtttttatggattattagaaagatattagaaagaagttttttttgtagttatgttatatttattatattgtttagagagtttaggagattttgtatgttagttaaagggtggggttgtgtggtagttagaattgtggttttattagagatgtttatattttaatttttgagatttatgaatgtgttatggtatttggtgtatggagtatataaggatgttttttttttttaaaataaataagagtttataatttatataaaagttgagttgttttgttttggggtttttattgtggaaagtttgagagattagggatgtaaagttttttggaaaggtgagggtgtttgagtgtaaggataatgggggttgtgatggatttttatggaagtgagagaggtaagttttttatttttttaggagaaaagtagggtgttattttagagatgttttttgttgttattgtgtttttagggtaaatagtaatttttaatatttttatttttagtttgggtttgtgaaaatatagtttaatatattagtaaaatatgtaaaatatttaatttgtattttagttagttttaggtttgattttgtaaggggttgtgtttttgtttttgtttttattagaatggtaggggtaatagtaaaaaagaa

SEQ ID NO: 3813 - DNA, 2477 bp, Artificial Sequence
  chemically treated genomic DNA (Homo sapiens)
atggagttttttttttagtttttatttgaggattgataaagagaagttaggagagaaggaagttgatttagaagttgttgagaaggagggtatttgagaatagagaggttttgggagttagatttaggtaagagtttatggatttataaagggatatatatatatataatggaatgttgtttagtaagaaatgaataagttgtagatatagatatatataataatatgagtaaattttaaaaaaatttatgtaaaagaaaaataaaagaatgtatgatgattttatttatgtgaaaagtttaagaataagaaaaattgttttatggtgataaaagttagaagtatagtgatttgaggggtaggtattgattgggatagagtttgagggaagtttttgggatgttagaatgttttttatatattgatttgggtaattaaataatagaaattaaaatagtgttattataagggagatgattgtttgaaagaaggtataagaaaaatttgggaggttataattatttttgtattttaattggggttatgtaaaatttattaaattgtgaattttaaatagaagtatttttatgtatataagtgatattttaaaagttaaaaaaaataaaaatatggatatgtgatttattggatgaagagaatgttattaattatttgaaagggaattttagaaaattgggagaaaatgagtttttatttttatattatttttttttattagtattattagatgtttgaatttttaatagttttttaaataagaggttgtttaggtatatattagttttttatttatgaggttttttatttttaatataattaatgtttttttaatagattttatattattatttgtgtaaagttaggagtaagtgtttaatatttgatagtattttttgtttataaagtttgtaattaaattaaggaggaggaagttttgtttttatggagttgagggttgagttgggagatgatattagtgttttttagttaggtattaaagtgttgtgaggataaggatgttaggagttatttatgagatttgggtagtagtggttttgagtttttaaggtttttttttaatatgtagatggtgaagtgatttttttttgtaattttgttatatttttaggtattaatttttagaataattttgttttttttttttttgttgtgagtatttgtaatagtttgattttttagaaatttttatagagagtaaaagtgttttaaatagttggagatggagttgtgtgtatgtattgtttgttttagatagaaattaaatgttttgagaaaaattaaatgttattaagatgtgaagtgagttttgatatgattaaggtgagtgtaatttagtttttaatattttatattatatgttttattttatttgattatttttttaattgtattttttatttattgattttttaggtttgtgggaatgtttttatttatttaattttagttattaatataaatatatttatatatagatagaaatatggttgtgttatttttatttttagatttttgtttgtgttattttttttaattagaatggttttttttttatttgttttttttgttttgttttgttttgttttgagatagagttttattttgttatttaggttggagtgtagtggtgtaattttggtttattgaaatttttaatttttgggtttaagtgatttttttgttttagttttttaagtagttgggattataggtatttgttattatgtttagttaatttttgtatttttagtagagatgtggtttttttatgtttgttaggtaggttttaaattttttattttaggtgatttattttttttagttttttaaagggttgggattataggtttgagttattatgtttagtttttaattatttttaattaaattatgtttatttttttttttaaaattgttttatgatgatttatttttgtgtagtatagggttaggtatagagtagatgtttaatgttgattaaattttttatgatttatgtgtaatattgtttttatataataatggattgaggattaaaaaggattattttggggttagggtttaagttttttttgattttggtttattattagttagatgtgtgattttatttaatttttatggtttttaaatttattttattttgataatgaaagatttaagttataaaagtttttaaattttttttattaagggttatagggattttatgtgtattgaatgattattttaatagtgagtaattggtagtagtttagtttttttatttttttttggtttgggtttatagtttttggatataatttaagtagatatagtattaaattttttagtaggtgttaattagaattagtttttgttggttgggaatggtgatttatttttgtaattttagtatattgggaggttaaggtaggaggattatttgaggttag

SEQ ID NO: 3814 - DNA, 2477 bp, Artificial Sequence
  chemically treated genomic DNA (Homo sapiens)
ttgattttaagtgatttttttgttttggttttttaatgtgttgggattataggaatgagttattgtttttagttaataaagattaattttgattggtatttattggaggatttgatgttatatttatttaggttgtgtttaaggattgtgagtttaagttagggaagaatgagaaggttgggttattgttgattgtttattgttagggtagttatttagtatatatagaatttttgtggtttttggtagagaaaatttagggatttttatgatttgaattttttattgttaaggtaaaataaatttgaggattatgaagattgagtagagttatatatttggttagtggtaagttaaggttaaggaaagtttgaattttggttttaaggtagttttttttgatttttagtttattattgtatgaaaatagtgttgtgtataaattgtagaaagtttaattagtattgaatatttattttgtgtttagttttgtgttatatgaaagtaagttgttatgaagtagttttgaaaagaaaaataggtatggtttagttaaaagtaattgaaggttgggtatggtggtttaagtttgtaattttagttttttgggaggttgaggagggtggattatttgagataaggagtttgagatttgtttggtaaatatggagaaattatgtttttattaaaagtataaaaattagttggatgtggtgataggtgtttgtaattttagttatttgggagattgaggtaggaaaattgtttgaatttaagagttggaggttttagtgagttgagattgtattattgtattttagtttgggtgatagggtgagattttgttttaaaataaaataaaataaaataaaaaaaataagtaaaaggaaagttattttagttgggaaaaatggtatagataaaagtttggaaatgagaatggtataattgtgtttttgtttgtgtatgaatgtgtttgtgttggtggttagggttgggtgggtggaggtatttttatagatttggagggttagtgaatagaaaatgtagttaaaagggtgattaggtggggtgagatgtgtggtgtaaagtgttggaggttaggttatatttattttaattatattaaggtttattttatgttttagtaatgtttggttttttttaaaatgtttgatttttatttagagtagatagtatatgtgtatagttttatttttagttatttgaaatatttttattttttgtaggaatttttagggagttaaattgttataagtgtttatagtagggaaaagaaagatagaattgttttggagattgatgtttgaggatgtggtagaattataggaaggggttattttattatttatatgttgaaggagagttttggaagtttagggttgttgttgtttaggttttatggatggtttttggtatttttgtttttgtagtgttttgatgtttggttggaaggtattgatgttattttttagtttagtttttagttttatgaaggtaagatttttttttttttaatttagttgtaaattttgtgagtagagggtgttgttagatgttaaatatttatttttggttttgtatagatgatggtgtggagtttgttaagagggtattggttgtgttagaagtgaaaagttttatggataagaaattggtgtgtgtttgaataattttttgtttgaaaaattgttaggaatttaagtatttgatggtgttgataagagggaatggtataggagtaaaggtttatttttttttaattttttgaggtttttttttaggtaattagtggtattttttttatttagtgagttatatatttatatttttgttttttttaatttttaaggtattatttatatgtataaaaatatttttgtttaaagtttatagtttaatgagttttatataattttagttaagatatagaaatggttataattttttaaattttttttatgtttttttttaggtagttattttttttatagtaatattattttgatttttgttatttaattatttaaattaatatatagagaatattttaatattttagaaattttttttaggttttgttttggttagtatttgttttttaggttattatgtttttggtttttattattatagagtagttttttttgtttttgaattttttatataagtggggttattatgtatttttttattttttttttgtatgaatttttttgagatttatttatgttgttgtgtgtgtttgtgtttgtagtttgtttattttttgttgagtagtgttttattgtgtatatgtgtatttttttatggatttataagtttttatttaggtttggtttttagggtttttttatttttgaatgtttttttttttaatagtttttgagttagttttttttttttttgatttttttttgttaatttttgagtgaaggttggaaggggagttttat

SEQ ID NO: 3815 - DNA, 2439 bp, Artificial Sequence
  chemically treated genomic DNA (Homo sapiens)
ttttaaatagagatatgtttggtagagttaagaaggaatgtttatttttgtttggggaagttgtagaagtttttatagagaggatgatatttaatatgagttttgaaggatgattgtgagaagaaggtgaaggggtaggtatagaataaagaaaattatagaggtaaaagtattaaatgatgaaagattgtgttgttttatgtttagaggtttggtaagttttttgttgtaagttttttgttgtaaagttgattagaatttaggtttttttttattgaaagtttgatgtttgggggtttaatagttgaaatatttgttttagggtttagaatttaaatgtggtggtaaagtattatttttgaaaagaaggaaaaatgtattgatttttaaaatttaaggtgaaaagggaatgtagatgtttatattttaatatattataaaagatttttggatatttattttttggtttatattttttttgtttttgtattgtagatatattttagtatatataggttgtatagaagataaagtattagttttaggatgaataaatgggaatattgatattttgagaggtttttttagtatggaaatataatgatgtaattttatgtggaaataaaggtgttttatttttatttttatttattttaatatgttggtatatgtttgtttttaagtaattttttttttagatatggggtttaattatttgttttgtagatgatgtgtatattttgatatttgtatggaaataaggtaatttagttttagaaagttaggagggtggttaagattatagtgggaggatggagtaaatttttgggtttatgtttttttagatgaggggggtttatttttttttgaaatatgggtttatttatataagtaaatagattagaatatattataggaaggaatttttatggtatgtgttgttttttgttttgttttgtgaagataaaaggaggaagaaataaaagatttagagagtagagttggtatgaattatgaagttgttttatattaattatttttattgtttttattttttgttgttttttttgatataggttttgggttttttgttgggaaaaggtaggttgaattggagttggttggggagtttattagtattttgttagagttgagggttgtttgttttttaggaggtattttgaattttttttttagttatttttttgtaattaatatgttgtttttgtagttgttttatttattgtttttgtagttattggaggttataggtttttaagaagaattgttggggtttattaatatatatatttttattttataggaagtagtattttatggtttgtatattggttttttgggtttataatatagtagggtttagatttggggagaagtaggtatgagggatgtattgggagtagggaggaaggttttggttaggtgttttggtaatgtgggtaggaaaaggttttggtggtaatgggtgttgtatgaggaggttttatggttagtttaggtaaaggtttaggagttttaattgggaagtagattttgaagttatgttttttaatttagatttaggggttttgaaatgttgtgtttgagatgttttttttttattgatttttgtaatgtttgagttagtttgtagttgttatgtatatggttattagggattaggagaatttgagttttatatgtggtttggttggttttatttttttgggaggttattattatagttgagttataagattttgggattgggatttttatagatttttgggatagtaggttttggggagtgatattgattttaattttgtaggtgtagttttttagaagttagtttttttttgtaaaataaaggtatataaaggattatttttagtttttttaattattagtaggaatttaagagagagtttttttagttttgagagtttttaatagtattattttttttatttaaatttaataaagtaatgttgttttttaaggtttattgattataatttaatggagagttgaggttgttagatattaagatttagtattatagaagggtagagtatggtaggattttaggggaaaagaattagtataattttatataaaatggagtaataatatatttattttagaaaatttgttatgagaattatttagattatttttttaaagtattgtattatttagtttttttttagtgataaataattttgaattttgatgtatgtagatatttgttttttgtttttagttagttttaggttgtgtttgaatttattttttatgttttttattttaggaattagtttgaaggagttgttgttgttaggggtaggtttttttagtgatggatggtagtaggtaatagagtaagtagggatatatgatattttttgaaattttttttgggaattggtatattat

SEQ ID NO: 3816 - DNA, 2439 bp, Artificial Sequence
  chemically treated genomic DNA (Homo sapiens)
atggtgtgttagtttttaggagagattttaggaggtattatgtgtttttgtttgttttgttgtttgttgttatttgttattggaagaatttgtttttggtagtaatagtttttttagattagtttttggaatgagaggtatagggaatagatttaaatatagtttggagttaattgagaataagaaataagtatttgtgtatattaagatttggggttgtttgttattaagaaaaagttaagtaatatagtgttttaaagagatgatttaggtaatttttatagtagattttttgaggtaggtgtattattattttattttgtatgaggttgtgttaattttttttttttgggattttgttatgttttgtttttttataatgttaagttttggtatttggtagttttagttttttattaggttgtggttagtgggttttgaagaatagtattgttttattggatttggataagaaggatgatgttattggagatttttagggttagagggatttttttttgggtttttgttggtgattggaagggttaagagtggttttttatatgtttttattttatagagaggaattggtttttggaaggttatatttgtagggttggagttaatgttattttttagaatttattgttttagaggtttatgaggattttagttttaggattttgtggtttagttgtagtgatgattttttagagggatggggttaattaggttatatgtagaatttaaatttttttggtttttagtggttatatgtatgatagttataagttggtttaggtattataggaattagtaagggaaaagtattttagatatagtgttttagggtttttaggtttgaattgggagatatggttttagggtttgttttttagttgagatttttgggtttttgtttgagttgattataggatttttttatgtaatatttattgttattaaggtttttttttgtttatattgttagagtatttggttaaggtttttttttttatttttagtatattttttgtgtttgtttttttttagatttggattttgttgtgttatgagtttagaggattaatgtgtaaattatggaatgttgttttttgtgaagtgaagatgtgtatgttgataaattttaatagttttttttagaagtttgtagtttttgatggttgtaagggtagtggatggagtaattgtaaaagtagtatattgattgtaaggaagtaattgaagggagagtttaaaatgttttttggaaggtaggtagtttttggttttggtgaggtgttaatgagttttttagttagttttagtttgatttgtttttttttagtaaaagatttagggtttatgttgagaagggtagtaggaagtgggggtgatggagatgattaatgtagagtagttttatggtttatattagttttgttttttaagttttttgtttttttttttttttatttttataaggtaaagtaaagagtagtgtatgttgtgggaatttttttttgtaatgtgttttgatttgtttgtttgtataaatgagtttgtgttttagaagagagtgaattttttttgtttaaagggatataaatttaaggatttgttttatttttttgttgtgattttggttatttttttggttttttaagattgagttattttgtttttatgtagatgttagaatgtatatgttatttgtagggtaggtggttaaattttatgtttagagagggagttgtttgaaagtaagtatgtgttagtgtattgaagtaagtgagggtggaagtaaagtatttttatttttatatgaggttgtattattgtgtttttatgttgagaaggttttttgagatattagtgtttttatttatttattttaaaattggtattttgttttttatataatttgtgtatgttaaagtatgtttgtaatataaaaataaggaagatgtaggttaggagataagtatttagggattttttgtagtgtattaaaatatgaatatttgtattttttttttattttgaattttaaaaattagtatatttttttttttttttagagataatattttattattatgtttaagttttgggttttgaggtaaatattttagttgttgagtttttaagtattggatttttaatgaaaggaaatttgagttttaattaattttgtagtaagaaatttgtaataagaaatttgttaaatttttaagtatgaaatagtatgattttttattatttgatgtttttatttttgtggttttttttgttttatgtttgtttttttattttttttttgtagttattttttaaagtttatgttagatgttattttttttgtgaagatttttatagtttttttaagtagaaatgaatatttttttttggttttgttaaatatatttttatttaaaa

SEQ ID NO: 3817 - DNA, 2500 bp, Artificial Sequence
  chemically treated genomic DNA (Homo sapiens)
atttttttttaaaatttattttggaagaagagatgttttaggaaatataaatagattattgttttgtaattttaggaaaattaaagagaatttaagttttatgaaataagtaattaaagggtgagaaaatatgatagttgtttaagattgggagtgtattagttttttgataatatttttaggtttttttagggttgttttttgggtaattttttaggtattgtttttttattaatattagatttgttgtagtttttgaatatgtgatggtatagtatgtaaaaatgtatatattattagggttggaggatttttatttagttattgttaatgataggataataaaaattaagtttatgtatttattaagtggtaaagttatagtttagattttaatttgattttatatgtataaagaggaaagaagagggatgaagataggatgttgggagggaaaaaggaggagaaaaaagggagagaaaatggaagatggaagtaatagttggggtgtagtaaaaaggggtattggattagttagaaaatttattatgaattaaatttgagtatatgtttttaatttttggggttatatgtttaataaatagaattgttgggttatatagttatttgatgtttaaattttgagaaattgttaattgttttttatattagttgtattatttggtatttttattggtaatgtataaggttttaattttttagttttagtatttattatgttgtatgattttgaaaaagttattttatttatttgaattttattttttttttttttaaagagtaggggttagaattagttattttgtttttgtttatttatatattttttttttttatttaaattttgattttttattgtttatatttgtttttaagagttttttgatagtgtgaagtattgtaatgagtaagttttagttttgttttttagagttagaattattttaatttatatttttaagttatattaatgtatttttatttttatttatattttttagtgtatatttttttttttttgtttatttttttaatttttttgtaagtattattttgttttgtttgttggttgttagtttttttttttgagtttttgtggagttgttagatttttgattatttttttatttttagtttataattgtttttttttggagtttagtgattgttaagtggtttttgtgaaattttattaggataatttttttgtttgtgtttttttttagttgggttgtttttagaaattttagttgtttttttatttataattggtaaattataggttggtttttgagttatttaatattgtatttatttataaatatgtttagatgagttttgaatttgttgaattttgtagtttataagtaagagttaaatttattggagatttaatttatatgtttttttttgtagaaggtgttttttgtttatgtgggatttttattttttttataattttaggaatgatatttgttttttttttattttttttgtttttgtttatgtttattatttattttttttattagattgtgagatttatgagagtaaggagttggagtattttgtttaaagttgtatttttagtgtttggtatattataggtttttagtatatgtttgttgaatttatgaatatgtgttttttttttatagagttaattatggatttgtttatttgtttatttattagatttaaagttattttggggtagattgagatttatttgttatggtaatatttgttaaaaataaaattattttgatatttgttaaaatggtaaggaagatattatttaagattattgtaatggaggagagaaattaggtaaatataataaagatagttggggatttagagttaaggaatagagtgagtggatgaaaaattattaagaggagataagggtagggagatttttgttaaaataatttattagggtttttattgaaggtaggttaggatgattagatagtgttattatttgaatgtttgtggaggttaaaatttgtatgttgaaatgttaattgttaaggtgatggtattaagtgatgaggattttggggagatgaattaggttatgaaggaatgggattagtgtttttataaaagggattttagagagttgttttgttttttttattatatgaggatataattagaaggtgttattttttaatgaagagagattttatgagatatggaattttttagtattttgatttttaattttttagtttttataattgtgagtaataaatttttgttgttaagaattagtttatggtatttttttatagaagtttaattggattgatagatgttaaggggttgggggatttttagtaggttaatttagtagagtttttgttaaaattgggttagataggttatagataagatagttaaaattaaagtttagttgagaagggaatttagaggagtatgattaaaatttggttaaggggagagtttt

SEQ ID NO: 3818 - DNA, 2500 bp, Artificial Sequence
  chemically treated genomic DNA (Homo sapiens)
aagattttttttttgattaaattttagttatgtttttttgaattttttttttaattaggttttgattttggttattttgtttgtggtttgtttagtttagttttagtaagaattttgttaggttagtttattgaggattttttaattttttgatatttgttagtttagttgggtttttataaaaaagtattataaattaatttttagtaatagaaatttattgtttatagttgtagaggttgggaagttgaagattaaggtgttagaagattttatattttgtgagatttttttttattaaaaaatgatattttttagttgtgtttttatgtgatggaagaggtaaggtagttttttggggttttttttataaggatattaattttatttttttatgatttaatttatttttttaaagtttttattgtttaatattattattttggtggttagtgttttaatatatgagttttggtttttataaatatttggatgatagtattatttgattattttggtttgtttttggtaagaattttggtaagttgttttagtaagaatttttttatttttgtttttttttggtaattttttatttatttattttgttttttggttttaaatttttagttgtttttgttatatttgtttaattttttttttttattgtaataattttgaataatgttttttttattattttaataagtgttagagtaattttatttttaataagtgttattatggtaggtaaattttagtttgttttaaagtagttttgggtttaataggtagataggtaggtagatttatgattgattttatggaagaggaatatgtatttatgaatttaataaatatgtattgagggtttgtaatatgttaggtattgaggatatagttttggataagatattttagttttttgtttttatgaattttatagtttgatgagagagatagatgataaatataaatagaaatagaaaaagtaaaaagggggtaggtgttatttttgggattgtagagggaataggggttttgtataaataggagatattttttgtaggagaagatatatgagttgaatttttagtgaatttaatttttgtttgtgggttataagatttgataggtttagagtttatttaagtatgtttgtgaataagtatgatgttggatgatttaggagttagtttatgatttgttgattgtgagtaggaagatagttgaggtttttagaggtagtttagttgagaggagatatagatagggagattattttaataggattttataaagattatttagtagttgttgagttttagggaaaaatagttatgagttgagggtggggaaatagttaagaatttggtaattttgtagaagtttggagagaaaagttgatagttgatagatagaataagatgatgtttgtaaaaaggttaaaagaatagataagagagaaaaaatgtatgttgagagatatggatggaaatggaagtgtattaatataatttggggatatggattaagataattttagttttaaggagtagagttaggatttatttattatagtattttatattgttaggaaatttttggaaatagatgtgggtagtggaaggttaggatttggatggaaagaaagaatgtgtgaataggtagaaataggatagttagttttaatttttattttttagagaaaaagaaagtgaggtttagataaataaaatgatttttttagagttatgtaatatagtgagtgttagagttaagagattagaattttgtatattgttgatgggaatgttaaatggtgtagttaatgtggaaaatagttggtaattttttaaaatttaaatattaagtgattatgtgatttaataattttgtttgttgggtatgtagttttagaaattgaaggtatgtatttagatttgatttatggtaggttttttggttagtttagtgtttttttttattgtattttagttgttgtttttattttttattttttttttttttttttttttttttttttttttttaatattttatttttatttttttttttttttttttatatatgtagggttaggttggggtttaagttatagttttgttatttaataaatatgtgaatttggtttttattgttttgttattgatgatgattagatgagggttttttagttttaatagtatatgtatttttatatattgtgttgttatatgtttaggaattgtagtggatttagtattgatgagaggatagtatttgggaggttgtttagaagataattttgggggaatttgggggtgttgttgagaagttgatatatttttggttttgaataattgttatgtttttttattttttaattgtttgttttgtagagtttaaattttttttaatttttttgggattataaagtagtgatttatttatgttttttggagtatttttttttttagggtgagttttaaaaaaaaat

SEQ ID NO: 3819 - DNA, 2473 bp, Artificial Sequence
  chemically treated genomic DNA (Homo sapiens)
tttaaattaaaggttgatatgtttttgttttatattttatttaatgttggtaatttaatgagggatattaggataaaattgagaatgtgtggtttgtgtttgtgaatttttattatttggttttagttagttttttattttttatatttgttaagataaatttttttaaatttttttttttttggttagaagtgatttttatatttagttttgattatggaaggttgttataggttattttttttgttgggtaagttttttttttttttaagtttatgtttaattgttatattttttttgaggattttttttagtttttttttttatttttattgttatatttaatagagtggagttgttttttttggtattttattgttgatagtttatttttgagttatagtaataatggttatttgattttatttatttgttgatttgtttatttttttattagtttatgattttttttagggtaagatttatttttatttgatttatttttgtattttagattttagttaggtaaataatagggatttagtggagagagagatggataggtgggtaggtgaagatatagatgtatggttgaatatataaattggtaaagttttaaatgaattaataagtggatattttattgagagatttaaatgtagaagggtgttaggatataagaggaatggttgtgagttatgaaaatgggttttatggggtaaattaaaagtttattgaaggtaaatgtattataataagattggtattttttggagtttttgggttgattaattatttttatatgtattatttatttattttttataatgatttggtgaggtaatgagttattattagtttaatgtataaggaagttgaggtttgtggatattagttgaagttttatagttagtgaatggtaggttagggtattagggtttaggtttgtttgttttttttatttattttttgttattataagttttttgatttttagttttttgatttgttttagtgggatttttttgtgtttttgttttagttgtagaggatttattaggtatttagagagaaatgagtggtgttgtgaatatttgattgtgtttatgtggaatttatatatatagtttgtttgaaaatgattgataggatggaaattgataagttattatttgttttgggtattagtgatgattggttaatatgaatattgtgttgatttttgttagatagaagaagatgttatttgttgttaatggggtgttatatgtatatttgtttaaaggaaaatgtttttttggtgattgtttttaatttttattttattttatagttataaaaaagaaaagatttagtagaaaggatgaatttatttaggggtaggatggaaaggtattttttttatttatttttttttttttttattagaataattaaaatttagtgaaaatgttggtgtaagttagaagagggggatttgggttttaagagtagttaggtattttgggttttagattagagttttagaatttagtagttatgtttataaggtagttaaagtttagttagtattattggttttttggttagttatatttgtttttgtttaataatgatgatttgaatgtatatgtataaataataatagataatattattgagtattttattatgaattatggaatgtgttaggtaaagatgttattttatgtaagttataaaattaatttatggggtaggtgtagatttataaattttgatttaagaattttgaatttttaaaagttttgaaaattaaaatatttttttgtaagtttggtatagatttatttggtgttaagatttgagttaaagtgatatatattgattaatagttttttttattttttttttattattaatatttatattttttgttataaaaatattaatatgtttgatttaagggtgttattatagtttttgttgagggatgttattaataaatatggtatatttattatattgtttttttttaaaagttaaataaatttaaatttgagtatatttggttttaaggattgtagataagaaattgagaatttgttaaatttattatatggatgaggaaataggtttagaaaaggtaggaaatttttttgaggttatagagtttaaaagtagtagatgaaggtttatatttaggtagttttgttttagagttggtttggttaattagtgggttttgttatttttgataaatgtttttgttagttggttttagttttatttttttagtgtagtagtttagtttttgtttgtttttgagtaagaagtaagtatgtgtttttttagttgaggtataaggtaatttttagggtatttggattataattataatgttttattaatataaattttaggatatagatttgtgttttaaattaagagttaaatataataataatattagttttaggtaattattagttaa

SEQ ID NO: 3820 - DNA, 2473 bp, Artificial Sequence
  chemically treated genomic DNA (Homo sapiens)
ttgattggtagttatttaagattgatgttattgttgtgtttgatttttgatttgaaatataggtttatattttgagatttatattaataaagtattgtaattatgatttggatattttggggattgttttgtattttgattaagaaggtatatgtttattttttgtttaagaataaatagggattgaattgttgtgttgggaggatggggttgagattagttagtaggggtatttgttaaaggtagtaaagtttattgattaattgggttagttttggagtaaggttgtttagatgtaaatttttatttgttgtttttgagttttgtaattttaggaaagttttttattttttttgagtttgtttttttatttatataatgggtttaataggtttttaattttttgtttgtagtttttggggttaaatgtgtttggatttagatttatttaatttttaaaggaaagtaatatagtaaatgtattatatttattaataatattttttagtagaggttgtggtagtatttttaaattaagtatgttgatatttttgtagtaaaaagtatgaatattaatagtaagaaggagatagaaaaaattattagttaatgtatattattttaatttaaattttagtattaaataagtttgtattaaatttatgaaaaaatgttttggtttttaaagtttttgaggatttagaatttttaaattagggtttgtggatttgtatttgttttataggttgattttatggtttatgtggagtaatgtttttatttagtatattttatagtttatagtaaagtgtttagtaatgttatttgttattatttgtatatgtatgtttaaattattattgttgagtagaggtaagtatagttggttgagagattggtggtattggttggattttggttattttgtgggtataattgttggattttgaggttttgatttgaagtttagagtatttggttgtttttagaatttaggttttttttttttgatttgtattagtatttttattgggttttggttgttttggtaaagaaagaaggaaataaatgagaagaatgtttttttattttatttttaggtggatttattttttttgttgaatttttttttttttatggttataaaatgaggtgaaaattgagaataattattaaaagagtatttttttttaggtaagtgtatgtgtgatattttattaatgataagtgatatttttttttatttagtggaaattaatataatatttatgttaattagttattgttggtgtttgaagtggatgatgatttgttagtttttattttattagttatttttaggtaaattgtgtgtgtggattttatatggatatagttgaatgtttataatattatttatttttttttaagtgtttgatgggttttttataattagagtagagatgtaggagggttttattggggtagattagagggttggagattagaaggtttgtgatgatagaaggtggatggaagaggtaggtagatttaggttttggtgttttggtttgttatttgttggttgtgagattttagttgatgtttataagttttagtttttttgtgtattgagttaatagtaatttattattttattaggttattgtgaggagtaaatgaatgatgtatatgaaagtgattgattagtttggaaattttaggaaatgttagttttgttatgatgtatttgtttttagtggatttttgatttgttttatggagtttatttttataatttgtagttgttttttttatgttttggtatttttttgtatttaagttttttagtgaggtgtttatttattagtttatttggaattttgttagtttgtgtgtttaattgtatatttgtgtttttatttatttatttatttatttttttttttattggatttttgttgtttgtttggttaagatttgggatataaagatgaattagataaggatgaattttgttttaaaggagattataggttaatggagaaatggataggttaatagatgagtggagttaggtggttgttgttgttgtaatttaggagtgggttattgataatgggatgttagaggagataattttgttttgttaagtgtggtagtagaggtggagggaagagttaaaggaagtttttaaaaaggatatgatagttgaatatagatttgaaagggggaagggtttatttagtaaaaggaatagtttgtgatagttttttataattggggttgaatgtggaggttatttttggttaggggagaggggatttgggggaatttgttttggtagatataagggatgggaggttagttggggttaggtggtaggaatttataagtatagattgtgtatttttgattttattttgatgttttttattgggttgttagtattgagtgaagtgtagggtaagaatgtattagtttttggtttgag

SEQ ID NO: 3821 - DNA, 2408 bp, Artificial Sequence
  chemically treated genomic DNA (Homo sapiens)
gttgatttatataggatagggagtgggtttttggttttggttttgtttagtttaggatattttttttagttgagttagtttgggttgggatagatagggttgttttatgtatattttaagatagttttaggttagggtgttgtttagatttgatgatttaggagtgtatttttggatttagttttgttttttaaatattttttatagatttattttgttgttagtattatgtagatattgagaggtataatttttatttttatagattatttattttagtatttataattattatttagttattattttgtggagatatagttgattaggatagagttttaggtttatttttattaaattgtttgttaaaagaaagtgttaaaggttttgggtagttttatagtatattagttattttgtttttattttgtagttttattgagtgggaataatgtatttttaagagtataggaaatatttggatgtttattattttttttttagtttttgggtttaggtttttgtttgtttagagaatagtagttttgagtaaagtttattattttattaattaatttaaatattaaagtgtttagtatttgttaggagagttggggttttttattaagtttaatatattatgttttttttgttgaaagatatttttattttttttagatgttataattgtaggagttgggggtttgtttagaattatagaatgttaggatttaaggagtttttgtttttttgttttatataatttgaatttgagtttggaatagggtagggatttgtttaaggttatatagagtgtttgttatataatttaggatagaaagaggttaggtttttgttttggatattttaggtagttttttatttagttgagattgttattgataaaggagggtgtttgagaaggaatatttgtttttaagataaggttattattattgtaggagaggtttaggaaagttgttttagagttatttttgtattttttttattgggtttttggggagaggtaggtggaatttgatttttatgtatttttttttatttttatagagggagaatgttggatttttggaagggagtggggttaggttataaggaaggtagtggttaggaattatttttttttggggagtggggagaatgttgaatgtttggtatttgtgggggtggaaagttagagaggttaagtgttgtttagagatgattttatgatttgggaattaggagttgttgggttgttggtgttggaatttaagtttttgtatatagtttgtgtttgtggttttggtttggtagagtaggaggaaggttttttatggttgtttaagtgtttatatttaagggtagggtttttgtgtttttatttttattttttgtggtaaattttttaagaatttaagtgataggttttaattaagtatatagtttgtttaggtttttttaatagtttttttttgtagagatggaaataagggtttagaaaagtaaagttatttgtttaaggttatataagtaggaagtagttatattgggttagaatttaggttttattgatttggatatttaattataaatatataaatatatgtatgaatatatatgtatatggggttattagtttgttttaggttttaagggagttttgttaagtaggggggttaatttagttgggagaaagaaagaatggtatattttggttagttgttgattaggttaaagtttttaataggggttgtagttttattaggagatttgttttaggttgagagatttttttttattttttattgtttttaggagttatggaaggttgtttatgtatttagttttttttttagtatgtgaaagtgttaagaggtattttaaaataatttatgggattagtatgtttattggttgttaggaattatttttgttttatattagagaaatgaaggttatgagtgaaagtggggtgtgaagattttgtagttaagttagtagtaaaattaaggttgaaattaagatttatttttagtttagttttttttgtgggtatttgtttatttttaattttttatttttatatttagtttttaaaaaagaaattagtttagtttgaagttattttggggttttgtggtatggtttggatttgattttattttaaagttttgaaaagatggagtttttaaaggttgtatttagatgagtttaggattttttttttatagtaagttaaggggttgggaagaaattttttttagtttttagtggtgataggaggatatagggaattaaatttttttttgagttttggaagttttttttttgttttgttttggttttttttttatttatgatttttgataagagggaaggtaattttaaagtggataagagttatt

SEQ ID NO: 3822 - DNA, 2408 bp, Artificial Sequence
  chemically treated genomic DNA (Homo sapiens)
aatggtttttatttattttggagttgtttttttttttgttagaggttatgggtggagaagggattaaaatagggtagagagggggtttttagagtttaaggagagatttaattttttgtgtttttttattattattgggagttggaagaagtttttttttagttttttgatttgttgtaggagggaaattttgggtttatttaaatgtagtttttgaagattttatttttttagagttttgaaataggattgaatttaggttgtgttgtggagttttggggtgattttagattagattagttttttttttggaaattgagtataaaaatgaagggttaaggatgaataggtgtttataaagagggttgaattgggaataaattttggttttagttttggttttgttgttgatttggttgtaagatttttatgttttatttttgtttatagtttttatttttttaatgtaaaatggaggtaatttttaatagttagtgggtatgttaattttatgggttgttttgaaatattttttagtatttttatatattgaaagagaggttggatgtataaataattttttatggtttttgggggtagtgaggggtgggaaaaggttttttagtttgagataagttttttgatggaattatagtttttgttgaggattttgatttggttaatagttggttaaagtgtattatttttttttttttttggttagattgatttttttatttaatagggtttttttggagtttggggtaggttggtgattttgtgtatatatgtgtttatgtgtgtgtttatgtgtttgtggttaaatgtttaggttagtgaagtttgggttttggtttagtgtggttattttttgtttgtgtggttttggataagtgattttatttttttgagtttttgtttttatttttgtaaaaagggattattaaaaggatttagataggttgtgtgtttggttaaggtttgttatttgggtttttgggggatttgttataggagatggaggtaggagtatagggattttgtttttaggtataggtatttgggtagttatgaggagttttttttttgttttgttaaattaaagttataggtatgggttatgtgtgggggtttgaattttagtattagtagtttggtagtttttgatttttgagttatgaagttatttttgagtagtatttaatttttttggttttttatttttatgggtgttaagtgtttagtattttttttattttttgggagagagtgatttttggttattgttttttttgtggtttgattttgtttttttttgggaatttagtattttttttttgtgggggtggaagagggtgtatgagggttaggttttatttgtttttttttagaagtttagtggggagagtataggagtggttttgaagtagtttttttgggttttttttgtaatgataataattttattttagggatagatgtttttttttagatatttttttttgttaatggtagttttagttgagtgaaggattgtttggggtgtttgaaatagagatttgatttttttttattttgagttatgtagtgaatgttttgtgtgattttgggtaagtttttgttttgttttgggtttagatttaagttgtgtgaaatgggaggataggagttttttgggttttggtattttgtgattttaagtagatttttagtttttgtagttatggtgtttggagaagatgggaatgttttttagtgggaggggtatggtgtattgaatttaatgaaaaattttaatttttttggtaaatattaggtattttagtgtttgaattaattagtagaataatgaattttgtttagagttgttgttttttgggtaaatagaagtttgagtttagaagttggaggaagggtgatgggtatttaaatgttttttgtgtttttgagggtatattgtttttatttggtggagttataggatgggagtagggtaattgatgtattgtagggttgtttgggatttttgatatttttttttggtaagtggtttggtgggagtggatttgagattttgttttgattagttgtgtttttatagggtagtggttgagtgatgattatgggtattggagtggatggtttgtgagggtagggattgtgttttttggtgtttgtatggtgttggtagtagagtagatttgtgggagatgtttggaaggtaagattgaatttaggagtatatttttgagttattaggtttgggtagtgttttgatttgaggttgttttagggtgtgtgtgaggtagttttgtttgttttggtttagattgatttagttgggaaaagtattttggattgggtaagattagaattaggagtttattttttgttttgtgtgaattagt

SEQ ID NO: 3823 - DNA, 2498 bp, Artificial Sequence
  chemically treated genomic DNA (Homo sapiens)
gttgtgtattaaggtagatttataagtgtgagttttgttattttttaattatatgagtttgggagtttattttatttttgaaatttttagtttttttttttgtgattagggttggtagtattttgtagggtgatgaggattaagaggaatgtatttgtgtgtgtaagggatttagtatgtgattaatgaatagtggttgtgattaatttttatttgttttttttttggttagtgggattagtgtttaaaggattagaggtttgggaaaatttgtagaggtagttttgttgttggaaggaagttagtttggggatagggagatggtgttttgtaaattgtaaaggaatataatttataataggttattattttgtttttgagtttagagattttttaataattaattaggtttttttagattgtgaaaaaaagatatagagatagttagagatttgtttaaggttatatagttttgattatttgttttaagtagatagaggtaaagattatttttattttttttgaaggtgtaaatgatagtgattagaaatatttgaaattttatttggggatttgggtttttagggataaaataaataaataaaaatttagaaggtaaaaagaaattatatattaatttatggtttggtgttttggtgtttgaatggttaaattaggtttgggggtgggggtggagtgagggtttaaatgttgtttttaaggttgggttattttgaatataattatttaggagagagttaggtttggtattgtttgtaattagttttttattaagttttagggtagtttatttttatagtaagaattttaggattttagggtgttagttagaaatgggggaagggtttaggagtttttggatgtttttttgttaggagttgatttagtatttttgttattaattttttggatgattgtggataatttttttttttgagttttagttttttaatttgtaaaagataggttttaaagagataagtttttttttgttttagtttagtaattaagttgggtattgttttgattattggtggagatagttaggagggggttggtttttttagggttttagagatagaggtgtattgaagttggagtttgtaatttaggtagtagatttgaaatttttgttggatttgagggttagggaggtttttgggatgtaaataaattttttgtgtttttagagtagagtagagagtttatgttgtagttttattttagttgattagattagttttgggtgttggttttttgtttttttttagttttttttattgatttttaaggaagttattttttagattaggttagtttgttttatagatggttttggtagggtttttttaaggtaaggagtatttttattttgggtagttgggttagttatgtgttatatttgtttttatgtttagaggttagagtgatattgttagtttttgtaggtttggttattgattgttgggttttattaagttattgtttttatatatattagtttttttttgttttttttttttattattttaggtgttatttgattagtagttttttttattgtgttagagaaaattggagtagttgagtttttgggtttggaggatagggggaggggtgagatgtagtttgaaggggtgggggttgttgaataggaaggtttgggttgaaggtgggggttgggggaagtaggaggtaagaataaggttgggaagtgggggagggaggaaggatggttgtagaaaggttaaagttagaaagaattgttgagattagagtgattttttggggagtattgtagttttttgaaaaggataaaaaggtttaaattttaataattgtaatttttagtttatatttttaatatatgtatagatattatttttttaaagttaaattttggttgggttaagaatttttgtttaggtgttaataaagttagaattttataagtttgttaaatagtgatgatgatttttgagtgttataggtgttttatagaggatattggagtttatattaataaagtgatgtattaattgtgtgtgtttttgggtgagtagtagagttaggatgggggttggagttttttgtatttttttttttagttatttagtttttagtagatgggattagagaggttttagtgagatgtaagaatgtgtttaaggttattattgtgttagttaatgataaataagtttaagaagttaggtttatttttttaaggttaaatgagattttaattgttgatatatgtgtttttttttttttttttttagggtattatgtagtgaaaatatatgagaaattggttttttagaatattgtattttttttgtttattaatattttattttttaaagtgttatttgtaattatttagtttttttaagggtagaaattttgtttttttagtataggagggtgattttaggttttggatagtgtttagagtggtttgatatttttggtaa

SEQ ID NO: 3824 - DNA, 2498 bp, Artificial Sequence
  chemically treated genomic DNA (Homo sapiens)
ttgttaagggtattagattattttggatattgtttaggatttggggttatttttttgtgttggaggggtagagtttttatttttaaggaggttgagtgattgtaaatagtattttgaggggtggggtgttggtggatagaaaaggtatagtgttttgaaaagttagttttttgtatgtttttattgtatggtgttttagagagggaggagagagaatatatatgttaatagttggggttttatttaattttagaagaataagtttgattttttgggtttgtttgttattaattaatatagtggtgattttgggtatatttttgtattttattggggtttttttggttttatttgttgaaggttgggtgattgaaaaagagggtatagaaaattttagtttttgttttagttttgttgtttatttagggatatatatagttaatatgttattttgttgatgtgaattttagtgttttttataaaatatttgtggtatttaaaggttattattgttgtttggtaaatttgtaaagttttggttttattagtatttagatgagggtttttaatttggttagagtttggttttggggaggtggtgtttgtgtatatgttgaaaatgtaaattaagagttatagttattggggtttagatttttttattttttttagggggttgtagtattttttaaaaggttattttgattttagtagttttttttggttttgatttttttatagttatttttttttttttttttattttttagttttgtttttgttttttgttttttttaatttttatttttagtttagatttttttatttagtggtttttatttttttaggttgtattttatttttttttttgttttttaggtttgggagtttggttgttttagttttttttggtatagtagaagaggttgttggttaggtgatatttggggtaatggaaaggggaggtagggagaggttggtatgtgtggaaatagtgatttggtgaagtttagtagttagtggttaggtttgtggggattggtggtgttattttagtttttgggtgtgggggtagatgtggtatatggttggtttggttatttagagtggggatattttttgttttggagaagttttgttggagttgtttgtgggatagattgatttggtttggaggatggtttttttgggggttggtgagggaggttgggaagaggtaggaagttagtatttagggttgatttaattagttgagataaggttgtagtgtgggttttttattttgttttgagaatataggaggtttgtttatattttgagagtttttttagtttttggatttagtagggattttggatttgttgtttagattataagttttaattttaatgtatttttgtttttgaggttttgagggagttagtttttttttggttgtttttattggtaattggagtaatgtttagtttggttattgggttgggatagagggaggtttgtttttttgagatttgttttttatagattggaaaattgaggtttagagaagggaattgtttatgattatttagggagttagtaataagggtgttgggttagtttttggtagggagatatttagaggtttttgaattttttttttatttttagttggtattttaggattttggagtttttgttgtgggaatgggttgttttgaggtttggtgaaaagttggttgtaggtagtgttaggtttggtttttttttgagtgattgtgtttagagtaatttgattttgaaggtgatatttgaatttttattttatttttatttttagatttggtttaattatttaggtattagagtattagattatggattggtgtgtagtttttttttattttttagatttttatttatttattttgtttttggggatttaggtttttaagtagaattttaggtgtttttggttattgttatttgtatttttggggaaaataaaaatggtttttatttttgtttgtttaggataggtggttaaagttgtgtgattttgggtaggtttttgattatttttgtattttttttttatagtttgaagggatttgattggttgttgaaaagtttttgggtttagaagtaaaatgataatttattatagattatatttttttatagtttgtaaagtattatttttttgtttttaggttagtttttttttagtaatagaattgtttttgtaagtttttttaggtttttgattttttgagtattgattttattggttaggaggaaggtaggtaggggttaattatagttattatttattgattatgtgttgggttttttgtatatataaatgtattttttttaatttttattattttgtaaggtgttattagttttagttataaaagaggaaattgaggattttagagatgaaataaatttttaagtttatatagttaggaagtggtagaatttatatttgtgaatttgttttgatgtataat

SEQ ID NO: 3825 - DNA, 2452 bp, Artificial Sequence
  chemically treated genomic DNA (Homo sapiens)
tgaatatgtgtgtgtgtgtgagtgtatgtgagtgtgagtttgtaagttttttgagggttaagtatttggttgtttattttatttttttagtatttagtatggggtatagtattaaatatattgaataaatgaataataaaatatataatagttattagatttttttagttgttttttaggatttttggaggatttagttatttttaaattttaggtatagatggatagttgttgggaatttgaaatattttaggtatagttttagattttttattgttgttttattgatgttttattttgtgtattagagtttattttttttttgttgtgtagatgggtaaattgaggtttagagagagtttaaattttatttaaagttatataggtaatgagagatggttttaaagtttgatattatatttagaattttttttattatattaagtgtggttagttttggaggagaaattttttttaagttttattttttgattataaataatatgaaaaatataagagtgatgtttttttattttagggggttgaaaaatgggatttatgaagttattaattatttttttttaattaaattaaaattaaatgtgagtataggtatgttttttttattaaagataattaaatggatagtgtggttatgtaaataaaatgagtttaggatttaaatggaaagtaaattaaataaaaagtttttttgggatgaggggtttgtttatgattgtgttatttgtaaattaggagtttattaattttttttaaatattagtaatttaattaaatttgtttttttttttattttaattttgttgtatatttaaaatagattttattatttataggagttggttatgagtgttgattttataattttatttttttttaaaaaattaaaaattttataaaatttatatttagttgatagaggttttgggggaaattatagtttggaaaatggattagttagagtatttagattttatggaaatgttgggaggttgttttgagggtgggtgttgtgagaaggtttggggagaggtgggttagggttgttaatgggggtagggttgtggaaggagttgtttgtgtggggttttggtgataattgtggggtttagtggtttttgtgggtgttgataggagtttggtggtgagtgatggaggaggtggttgtaaaataggttattgttgggtgtttggggtttattttgtggatggtgttgttgttaagttatttttagaatttgataaggatggatgttttgagtggttttttggggtggggggaattaggaagtagtgaattaattgaaattgtggtgaagttttttttttttgaagagtgagagagtgtggtatgagagtgtgtgtttgtatttatatgtgtttatataagtatttgtatatatgagggatttagttggaaaggggataggtggtttttaaaagtttaagtttatatttttagggttggggggtggggtgggttaatgataatttttttttttatttagtggtaagaaattatattgttaggttgttaaaaagattttttgggatttggggtgggagtttatagttagatggtatatttaagatggtggaattatttataatagtgagatttataaggtgagatttaataatataaaagtgaatatttattgagtatgtgttaggatttagagagtattttaggtttttgataaatgttaatttattgattttttaatgttagattttgagttaggttttagtaatagttttatttaatagataaggaaattgaggtatagagagggtaaaaaagttggttttttgtatttgtgggttttgtattagtgaatgtagttaatttaggattaaaaatatttagaaataaaattgggtttgtattgaatgtgtatagatgttttttttgttattttttaaataatatagtataataattatttgtatagtatttatattgtattaggtattattaatattttagagatgatttaaagtatatgggaggatgtgtataggttattggtaaatgttatgttattttatattgggttttggtatttatgggaggttttggaattaattttttattgagagatattgagggataattgtaatgtgtttaaagttaggaagattataagtagttgagttgggatttgagtttatgtagtatagttttaggtggttttttaattatatataatgttattttttttaagaaagtgtatattgggtaaatatttgttaagagatggaaattttttttttttttttggatggagtgtttttttggaggtggttttgagagtaagagagtagggtaggggttttgggtgaaggtgatagagaaggagggtgataagttataatagtagtggtaatgtggggattggttgttgggggaaatagaaagggttttggg

SEQ ID NO: 3826 - DNA, 2452 bp, Artificial Sequence
  chemically treated genomic DNA (Homo sapiens)
tttagggttttttttgttttttttagtaattagtttttatattgttattgttgttgtgatttgttattttttttttttattatttttatttagagtttttgttttgtttttttatttttaaggttatttttagaaaaatattttatttagggagggagaagaagtttttattttttagtaaatatttgtttaatgtatatttttttaagagaggtggtattgtgtgtggttaaagggttatttggagttgtattgtgtgggtttaaattttagtttggttgtttatgatttttttgattttgggtatattatagttgttttttagtattttttgatgggggattggttttaggattttttatggatattaaaatttaatataaaatagtataatatttgttgataatttatgtatatttttttatatattttaaattatttttagagtattgataatatttaatatagtgtaaatattatgtaagtagttgttatattatattgtttggagaatgataagaaaaatgtttgtatatatttagtatagatttaattttgtttttgaatgtttttgattttgggttggttgtatttattgatgtagaatttatggatatagagggttaatttttttattttttttgtgttttagtttttttatttgttaagtgaggttattattgggatttagtttaaagtttggtgttggggagttagtgagttagtatttgttaagaatttagaatattttttgggttttggtatgtgtttagtaagtatttatttttatgttgttaagttttattttgtaagttttattattatggatagttttattattttgagtgtattatttaattgtgaatttttgttttaaattttaaaaagtttttttggtaatttaatagtatagttttttattattaagtgggggggaaggttgttattagtttattttattttttaattttaggaatatgagtttgggtttttaaaagttatttgttttttttttagttgagttttttgtatgtatgagtgtttgtgtgggtatatatgaatgtaaatatatatttttatattatgtttttttattttttaggaagaaaggattttattatggttttagttaatttattgttttttggttttttttattttagggagttgtttggagtatttgtttttgttgaattttaaaggtagtttagtaatagtattatttgtagagtgaattttgggtgtttgatggtaatttattttataattgttttttttattatttattgttaggtttttgttagtatttataggaattgttgggttttgtggttgttgttaaggttttatataaatagttttttttgtggttttgtttttattggtaattttggtttatttttttttgaatttttttatgatatttatttttaaagtaattttttagtatttttataaaatttgggtattttgattaatttgttttttgaattataattttttttgaggtttttgttagttggatgtggattttgtaggatttttaattttttaaaaaaagatagaattatggggttagtatttatgattaatttttgtaggtggtgagatttattttagatatatggtaggattaaagtggggaggagagtagatttaattaagttgttaatatttaaagaaaattgatgaatttttggtttatgagtagtatagttgtgaatagattttttattttggggaggttttttatttgatttgttttttgtttaaattttggatttattttatttgtgtagttgtattgtttgtttaattgtttttaataaggaaaatgtatttatgtttatatttaattttgatttaattaggaggaagtaattaatggttttataaattttattttttagttttttgggatgagaaaatattgtttttgtgttttttatgttgtttatgattaagggatggggtttgagggggattttttttttagggttggttatatttgatgtggtagaaagaattttgaatgtggtgttaggttttggggttgttttttattatttgtgtgattttaggtggggtttagattttttttgggttttagtttgtttatttatatgatggggagagagtaagttttgatgtataagatgagatattaatgagatagtagtaaaaggtttagaattgtgtttggagtgttttaggtttttagtgattgtttatttgtatttgggatttaagagtggttgaattttttagaaattttagaagataattgggggagtttgatgattgttgtatattttattatttatttatttaatatgtttggtgttgtgttttgtgttgggtgttggggagatggaataaatagttagatgtttggtttttaaggagtttgtaagtttatatttatgtgtatttatatatatatatatattta

SEQ ID NO: 3827 - DNA, 2489 bp, Artificial Sequence
  chemically treated genomic DNA (Homo sapiens)
atttttttttttttagttatgtataatatatttatataaaaattttatattttaatgggattttataaatatatatatggtattatattgggtgtattatttttttttttttttaaatagagttttgttttgttatttaggttggagtgtagtggtgttattttagtttattgtaatttttattttttgggtttaagtgattttttttttttagttttttaagtagttgggattataggtgtatgttattatgtttggttaattttttgtatttttaatagagatagggttttattatgttggttaggttggtttttaatttttgattttaagttatttgtttattttggttttttaaagtgttgggattatagatgtaagttattgtgtttagttggatgtatgattttttaatttgtgttttttatattttaggatgttttggaattatttttatgtgttagtataaaaatttatttttttggtttgggatgtggtttatgtttgtaatttttgtattttgggagtttgaggtaggggggttatttgaggttgggagtttaagattggtttgattaagatggagaaattttgtttttattaaaaatataaaattagttaggtgtggtggtgtatgtttgtaattttagttatttagaaggttgaggtaggagaattgtttgaatttgggaggaagaggttgtagtgagttgagattgtattattatattttagtttgggtaataagagtaaaatattgttttaaaaaaaaaaaaaaaaaaaaaatttattttttttttttgtattgttgggtaggattttattgaatggatatattatattttatttagttatgattttattaagggaattttaggtgttttttagttttttattaggatgatggatatttttatataaggttttttgtaggtgttattttgggttagaaagtaaaaattttttgagatggggattgtattaggttttggtttttagttttattgtattttatttgtgttaaggttatgggaatttttttattgtttttgttagtagatgttatttagtatttattttaagatatttatattttgatttggaagagattagaagtattttgtagtttgtgtggataagttttttttttgatttatagtttttttatttttgtatttaggagagggatggtagtgttgagggttgtgggatttttttttttggaggtttttttatttttgtggtttttgtgtggtttagtttttttttgagttggtttaaggggtaatttgatttaggttagttggtggagtatgaggtagtgtttagttgagtgttatggtattttattaagtttgaaatgtgattgttattgttgttatattttagtgtttttaataatttttttataaatgagaaaaatagagtttttttaaatgttttttttttgatattaaggaaagtgtatggaattttgtttagaggtttgagtttgggtgattttaggagtggttttagagtttgaggaaaggtttggggggtggagggggtgtttttttagttttaggtaaagtagtgagttgggggttatttgttgttttttttgtgtttgggtttgtaaagttagtggttgttgtttaaattttattttttttaatatgttaggattgtttattttaggttatttatttatatggttatggtttagaggttttagatttatatgtttagtggggttaaggatttaggtaatgtaaattgaagtaagttttgtagagatggtgggaaattgtaaatggatgttttggttgaaggaggtagttgaaaatttggagagagaataagaataagaagagaaagggaagaggaggtagagagaaaagagagaggatattttttaagtttatatattgtttattgttttaaaaaaatttaaatatgtaatgagttaagtaggtatgtttttaggttagtttgtaggtttttttttaattgaatttattaatatagtagataagttgttggtttggtttttttatttttttagagtagtattgtttagtagagatttttgtgatgataaaatatttgtagtgtttattgtaataattattggttatatgtagtttttgagtatttgaagtaggattaaagaattgaatttttaatgttatttaattttattgaattttaatataattataattagttataggtaattaattgttattatattagataatatggttttagatttttttaatgtggagggtattattgtgtttgattattgtaaaaaagattatttttttttggggagagggggtagattatatttgagattattaagtattaattagagttttgggtaaatggaaagaaaggaaatttgaaatattgagtagtaaaagtttaggtgtaattagatgtttgttggtttaagagtggttatttagtgtttttttatttttttattttttagtgagttt

SEQ ID NO: 3828 - DNA, 2489 bp, Artificial Sequence
  chemically treated genomic DNA (Homo sapiens)
aaatttattgggaagtgggggagtggaaggatattgagtgattatttttgagttagtagatatttggttatatttaagtttttattgtttagtattttgaattttttttttttttatttatttaggattttgattaatgtttggtggttttaggtataatttattttttttttttaagaaggagtgattttttttgtagtagttaagtatgatgatattttttatattgaaagaatttagagttatgttgtttaatatggtagtaattagttgtttgtggttagttatagttatattgaaatttagtaaagttaaataatattaaaggtttagttttttagttttattttaagtgtttaagagttatatgtagttagtggttattgtagtgaatgttgtagatattttattattgtagaaatttttattggatagtgttgttttagaggggtgagggagttaggttggtagtttgtttattgtgttgataagtttagttagggaagagtttgtaaattggtttggagatatatttatttagtttattgtatgtttaaatttttttgaagtaatgggtaatatgtaaatttgggggatgtttttttttttttttttttgtttttttttttttttttttttttgtttttgttttttttttagatttttagttattttttttagttagggtatttatttatagttttttattatttttatggggtttgttttagtttatgttatttggatttttgattttattaggtatgtgagtttgagatttttgagttatggttatataaatggatggtttagaatgagtaattttgatatgttaaggaaaatgggatttaaatggtaattgttgattttatagatttaggtgtagaggaaatagtagatagtttttagtttattgttttgtttgaaattggaaaaatattttttttgttttttaggtttttttttaagttttggagttatttttggggttatttgggtttaggtttttgggtagggttttatgtgttttttttgatgttagaggaaaggtatttggggaggttttgttttttttatttgtaaggggattgttgggggtgttaaagtgtgataatagtagtgattatattttggatttaataaaatattgtgatgtttagttagatgttattttatattttattagttgatttggattaagttattttttgagttagtttggaggggagttggattgtgtagaggttatgaggatgggggagtttttagggaagagaattttatgatttttagtgttgttattttttttttaggtatgagggtgaggggattgtaagttagaggggagatttgtttatatgaattgtagggtgtttttggttttttttgggttaaagtatgagtattttggggtgggtgttgaatggtatttgttggtagagatggtggaagggtttttgtggttttgatataggtgaagtgtagtggggttgaggattgggatttggtgtaatttttgttttgagggatttttattttttgatttagagtaatatttgtaaagagttttgtgtaaaaatgtttattattttggtgagaaattggaaaatatttaaagtttttttgatgaggttgtagttaaataaaatgtggtatatttatttagtggaattttatttagtagtgtagaaaaaggaggtggattttttttttttttttttttttgagatagtgttttgtttttgttgtttaggttggagtgtaatggtgtagttttggtttattgtaattttttttttttaggtttaagtaatttttttgttttagttttttgagtagttgggattataggtatgtattattatgtttggttaattttgtatttttagtagagatggggtttttttattttggttaggttggttttgaatttttgattttagatgatttttttgttttggatttttaaagtgtggggattataggtgtgagttatgttttaagttaaggaggtgaatttttatgttagtatatggaaatggttttaagatattttggagtgtgaaaaatgtaggttaaagaattatatatttggttgggtgtggtggtttatatttgtaattttagtattttgggaggttaaggtgggtagatagtttgaggttaggagttggagattagtttggttaatatagtgaaattttgtttttattaaaaatataaaaagttagttaggtatggtggtatatatttgtaattttagttatttgggaggttgagaaaggaggattgtttgagtttaggaggtggaggttatagtgagttgagatggtgttattgtattttagtttgggtgatagagtaagattttgtttaaaaaaaaaaaagagtgatatatttagtatgatgttatgtatatatttataaaattttattaaaatatgagatttttatatggatatattgtatataattggaaaaagaaagat

SEQ ID NO: 3829 - DNA, 2458 bp, Artificial Sequence
  chemically treated genomic DNA (Homo sapiens)
gtgtgtgtaaagtaatatggaaaaatgtggaggtgggaaagatagagatagagagatagaagagatagagagatataagagatagagagatagagagatgttggtttgaggttttggggatttatttttatttgaaattattttttttttttttttttgagatggagttttattttgttttttaggttggagtgtagtggtatgattttagtttattgtaatttttgttttttgagtttaagtgatttttttgttttagttttttgagtagttgggattataggtgtttaatattatgtttagttaattttttaatttttagtagagattaggttttattatgttggttaggttggttttgaatttttgatttgaggtgatttgtttgttttagttttttaaagtgttagaattataggtgtgagttattgtgtttagtttaatgttttaatttttagtagagatggggtgttattatgttgtttatgttggtttggaatttttgggtttaagtgatttttttgttttggttttttaaggtgttgggaatatatgtatgagttattatgtttattatatttttattgtattttattaatatgtttatgtatgtttagatatataaatattttttattgtgttattattgtttataggatttagtatggttatatgttgtaggggggtttgtagtttaggagtaataggttatgttatagagtttaggtgtgtagtaggttatgttatttaggtgtgtaatgtattttatgatgtttgtataatgatagaattatttaatgatatgttttttagtatgtatttttattgttatgtgatatatgattgtatattgtttggaattggtatatagtaagtgtttattaagggttatatttttattatttattaatgggtttgttttttgttatagttaattttttgttgttaatatttggtttaatggagtttttttgtttttttggagaggattattagttttttatattttttttgtattttgttttgtggtttagtaggttggttattttttttgtaggtagttttatggtggaggttttatgtggttgtttttttatttgtttgagttaagtgtttttggggaatgatttggagtttgatgggaggaggagatttttttgtttttttttttagttttaaatttaattgaaattgttttgtaataattgtatttgtggtttgtgaaagttgtgttttgtggtgattagggattgagattagttggtgaaaaatttggtataggggtatatatggtattattggggatattaagtaagttatggataatgggggagatagagggtttttgtaattagaaattattgggaattttggttatttttttttgttgtagatatgtttttgttatgttgggttggtgtaggaatatgttgttttttttagtattagttttttttttttttagtaatataggtggtaatgtggtagagtgtttaaagtgtttttgtagttagattgtttgggtttgaattttggatttgttattttttagttgtgggattataaaggattttgttttttgtggttgttggtaatgaaatgatagtgtatttttatttattgttatgtatgtggatgaattgataggtatgtgaagggtgaaataggatttgatttgttttaggggttttttaagaggtagttagtaggatagaaagtatttgttgtttttggaggatttttttttttttatgatgggttatttggttggaaatattaatagggtttttttaaggatattagtaatttttggtatatgtttattttatattatttttatttatatattatattaaaggtaattgataaatagttttttaagagtttaaatgttttagagttgatttgttgaattatgtaatattattttattaaatatttatttattttgatttggtaatttgtttttatattttggaattagtatataaatatatttatgtatttgtataaatatataatatatatatatatatatatgtatgaatatatatatataagtataaatatattatatatatatatatgaatatataatatatatatatatatgagtgaatatatgatatataaaaatatatatatgtattaatatatggtatatatatgtatatgtatagatatataatatttatatatatataatgtatgaatatataggtatatatgtatatatatatgatgtaggaaaatatagtaaaagtatatatatatatatatatgaatatataatatatatatatatataggatataaaattttaaaaaagatagaaatgtattttgtttttttatttgttttttttttatagttaatttttaattggatttttgtttttgtagtttttttagagtttagatttttttaaatggttagagggtttttttgagtttaagag

SEQ ID NO: 3830 - DNA, 2458 bp, Artificial Sequence
  chemically treated genomic DNA (Homo sapiens)
tttttggatttagaagggttttttggttatttggggaagtttgggttttgggaaggttgtggaggtagaagtttagttggaagttggttgtgagaaggaaataggtgaagaagtaagatgtatttttgttttttttgggattttatattttgtgtatatgtgtatgttgtgtatttgtgtatgtgtgtatatgtgtttttattgtatttttttgtattgtgtatatgtatatatgtatttgtatatttatgtattgtgtatatgtgaatgttgtatatttatgtatgtgtgtatgtgtgttatatattaatgtatatgtgtatttttatatgttatgtatttatttgtgtgtatatgtgtgttgtatatttatgtatgtatatgtagtgtatttgtgtttgtgtatatgtatttatgtatgtgtgtatatgtatgtgttgtatatttatgtaggtgtgtagatgtgtttgtgtgttggttttaaaatatgaggataaattgttaaattaaagtgaataaatatttaatgaaatggtgttgtatgatttagtgagttagttttggaatatttggatttttagagagttgtttgttgattatttttaatgtagtgtgtgggtggaaatggtgtgggatgaatatgtattgaaagttgttgatgtttttaaagaagttttgttggtatttttagttagatggtttgttgtgggggagagaaagttttttgaaagtagtgggtgttttttgttttgttggttgttttttgggaggtttttaggatagattaggttttgttttattttttgtatgtttgttagtttatttatgtgtatagtagtgggtgggggtgtattgttgttttattgttaataattataggggataaagttttttgtggttttatagttaggaggtggtagatttaggatttaaatttagatagtttgattgtagagatgttttgggtattttgttatattattatttgtgttattgggaaaagggagaattgatgttgggaggaatagtgtgtttttatgttggtttggtatggtggggatatgtttgtagtagggagaggtggttgaggtttttagtggtttttggttgtaggagttttttgttttttttattgtttgtggtttgtttagtatttttagtgatgttgtgtgtgtttttgtgttaggttttttattagttaattttagtttttggttgttatgagatatagtttttatagattataaatgtaattattataaggtaattttagttagatttggggttgggagagaaaatagaagggttttttttttttattaggttttgaattgttttttaggagtatttaatttagataaatggggaagtagttgtgtggagtttttattgtagagttgtttgtaggggaagtggttgatttgttgggttatgaagtagggtgtaggaaggatatggggagttagtgattttttttaagggggtagggggattttattaaattagatgttaatagtaagaagttggttataataggggatgggtttattggtggataatgaaaatataatttttagtaggtatttgttatgtgttagttttaagtaatgtatagttgtgtgttatgtaataatggggatatatgttgagaaatgtgttgttaggtgattttgttattgtgtgaatattatggagtgtattatatgtttggatggtatagtttattatatatttaggttttgtggtgtgatttattatttttaggttataaatttttttatagtatgtgattatattgaattttgtaggtggtggtaatataatgggaagtatttgtgtatttaaatatatgtgaatatgttaatagagtatagtaaaaatatggtgggtatggtggtttatgtgtgtatttttagtattttgggaggttaaggtgggaggattatttgagtttaggagttttagattagtgtgagtaatatagtgatattttatttttattaaaaattaaaatattaggttgggtatggtggtttatgtttgtaattttggtattttgggaggttgaggtgggtagattattttaggttaggagtttaaggttagtttggttaatatggtgaaatttggtttttattaaaaattaaaaaattagttgggtgtggtgttggatatttgtagttttagttatttgagaggttgaggtgggagaattgtttgaatttaggaggtagaggttgtagtgagttgagattatgttattgtattttagtttgggagatagagtgagattttattttaaaaaaaaaaaaaaaaagtggttttaggtaagagtggatttttagggttttaaattagtatttttttatttttttattttttgtatttttttattttttttgtttttttgtttttattttttttatttttgtatttttttatattgttttatatatat

SEQ ID NO: 3831 - DNA, 2422 bp, Artificial Sequence
  chemically treated genomic DNA (Homo sapiens)
ttattggaaagagaagttttagtattttaatggagttttgtttttagtataggtaaggataggttttaggtttagagttgttagtttgagtttaataatttagtttatttttgtggtatttatttttaattttgtgtttaatttaaggtgattaattttatatagtttgttagaattatttaggttttaaaattgaaagtttataggtgaatggaggtaagggtggttggttatttttgttttaatttatgggtattagatattggttttttattaatggtagtttttttttaaaataaatatttgaatttaaaaaggggttggatgtagtggtttatgtttgtaattttagtattttgggaggttgaggtgggtagattatttgaggttaggggtttgagattagtttggttaatatggtgaaattttatttttattaaaaatataaaaattagttgggtgtggtggtgtatgtttgtaattttggttatttgggaagttgaggtaggagaattgtttgaatttgggaggtggaggttgtagtgaattaagattgtgtaattgtagtttagtttgggtgatagagtaagattttgtattaaaataataatagtaaaaataaaataaaataattttaaaaatttaaaaagagagttatttgagggaaaatattaagaaattaatagtatttttggtgaaaagaaatggtaaaaatattgtgaatattgtgttatgtgagtgagtgatggtgttgagaaatgtataatgtttgtaagtttggaaatttaagtttagtttttgggttggtggtttattggttgtttgattttaaataggttgtttgttttttttgagtttttatattattttaagtttataaggttaattatttttagaggtggggagaggttagagggtaggtaggttttgttgtgggtaggtaggttttgtttatttttatttttttaagggtgaggttttaaggtatgagttgtttttagtgtaaaagttggtattaatagtagtaatttataaatttttggagaggtttggtattttttatttagtgattgttgagtttgattgatggggttatgttggtaaattagttattatttagtagagatattttttagagatgttaattgtttagtgtttatgtgtttttatttttttttggtataggtggttggttgttgattttttgttattattgtttgataatagtgtttgatttgtttatatagattagggtttttgtatgtatgttgttagtatttaattattagttagtatggtgtatgaagtatggtttattaatgtttttgaggggagtaaataggtgttggtagaaatttatttttgtggataaatttgtggatatgtgtatttttatatgtgtttatttagtttttaagtataggaatgagttagtgttatgtgtgtatatgtattttgtgaattatttatatgttggttaagaagtagttttagatatatatgtataggatggagtatatgtatgtatataataggtaatgttatatggggttgtgttaggattatattatagaatatttgtaaggtgttttgaatagtgtttggtatgtggttaattattttttagtaaattagattttttattatttttttttagtgtttttttatttattgaggtataatttatatataataaaatgtataagttttaagtgtttagtgtagtgttttttgataaatagatatatttgtgtatttattaatttagttaaggtttagaatatttttattatttaggaagtttttttgggtttttttttagttaatatttttaaaagtaattattgttttgattttttttgttatagttgaattttgtttgtttttgagttttatataaatggaattatatggtgtgttttttttggtaatgtttattgtggatgtttagatgtgtgtatagttatttatatttatatatatgtgtatggatatttagttagatttatttagaaatggggatttttgagttgtaaattttttggttttagtttgtagtttagttaagtttttttgggtttagaggattaaaggagatggggagagtttttgatgttgggtttagttattgtggggggttttttttatattttttttagttttttttattgagtgattttagataagaattgaaaatttgtttttttttgtgaaatgaaatgaataataataatatatagtttataatttttttgtattgagtatttattatgtagtaggtattgttttaaggattgtgtaagtttgagtttattttgtttttttagtaattttataatttaggtattattattatttgttttatgggaaaggaatttgaggtatagagaggtttagtagtttgtttgaggttatataggaa

SEQ ID NO: 3832 - DNA, 2422 bp, Artificial Sequence
  chemically treated genomic DNA (Homo sapiens)
tttttgtgtgattttagataagttgttgggtttttttgtgttttaggttttttttttataagataggtaatgatgatatttggattatagggttgttgggaggatagagtggatttgaatttgtgtagtttttagaatagtgtttattgtataataagtgtttaatataggggagttatgagttgtatgttattattatttattttattttataggagaaaatagatttttagtttttgtttgaggttatttagtaagggaagttgaagaaaatgtggaaggagttttttatggtggttggatttagtattaggggttttttttattttttttagttttttgaatttagagaggtttagttgaattgtaagttgaggttaagggatttatagtttagaaatttttatttttgaatgagtttgattgagtatttatgtatatgtgtgtaagtgtgagtggttgtgtatatatttgagtatttataataggtattgttaagaaggatatattatatgattttatttatatgaggtttaagaataagtaaaatttaattataataagagaaattagaatagtgattgtttttggaggtattgattggaagggaatttgagagaattttttggatgatggaaatattttggattttaattgagttggtgggtatataagtgtatttatttattaaaaggtattgtattaaatatttaaaatttgtgtattttattatgtgtaagttatattttaataaataaaggagtattgggaaaaaataataagagatttaatttattgaggagtaattaattatatgttgggtgttgtttaagatgttttataggtgttttgtaatgtaattttaatataattttatgtagtattgtttgttatgtatatgtatgtattttattttgtgtgtatgtgtttgaggttgttttttagttggtgtatgagtagtttatagaatgtatatgtatatgtgatattgatttatttttatatttgggggttaagtgggtatgtatgagggtgtatgtgtttatagatttgtttatgggaatagatttttgttagtatttgtttgttttttttaagagtattaatgaattgtgttttatgtgttgtgttggttggtagttagatgttaatagtatgtatgtaggggttttggtttgtgtagataaattaagtattgttattagataataatggtaggggattgatagttagttgtttgtgttagggaggggtggggatgtatgagtattgggtaattagtatttttaaagggtgtttttgttgaatggtggttaatttgttgatatggttttattagttaaatttagtagttattgagtggggaatgttgggtttttttaaagatttgtgagttgttgttgttggtgttagtttttgtattgggagtaatttatattttaagattttatttttaagaggataagggtgaatagagtttgtttgtttataatagagtttgtttgttttttgatttttttttatttttgaggatggttggttttgtgagtttgggatgatgtggaggtttggagagggtaagtaatttgtttagagttaaatggttagtgggttattaatttaggaattgagtttgggtttttagatttgtaggtattgtatattttttaatattattatttatttatatgatatagtatttataatatttttgttatttttttttattaaaggtattattagttttttggtatttttttttaagtgattttttttttaaatttttaaaattattttgttttatttttattattattattttgatgtggagttttgttttgttgtttaggttggattgtagttgtatgattttggtttattgtaatttttgttttttaggtttaagtgatttttttgttttagttttttgaatagttgggattataggtgtgtattattatgtttggttaatttttgtatttttagtagagatggggttttgttatgttggttaggttggttttaaatttttggttttaaatgatttgtttgttttggttttttaaagtgttgggattataggtgtgagttattgtgtttggtttttttttaaatttaaatgtttattttaaaaggaagttgttattaatggaaaattagtatttgatatttataagttgaagtaggggtgattaattatttttgtttttatttatttgtgaatttttagttttaaaatttagatggttttggtaaattgtatggagttaattattttaaattgaatatagggttaaaaatgaatattataaaaataaattaggttattaaatttgaattggtagttttgagtttggagtttgtttttatttgtgttgaaggtggagttttattagaatgttggagtttttttttttggtag

SEQ ID NO: 3833 - DNA, 2465 bp, Artificial Sequence
  chemically treated genomic DNA (Homo sapiens)
ttttgttaatagggtttttaaagaaattatgggatgtttggttgaatttgaattttagataaataataaattttttaagtataagtatattttttaattattagtagtttggtatatattattttaggtttttttttgtgaagatatgtatttttttttgagatggagttttgttttgttgtttaggttagagtgtagtggtgtaattttggtttattgtagtttttgttttttaggtttaagtgatttttttgttttagttttggagtagttgtgattataggtatatgttattatgtttggttaatttttgtattttgagtagagatggggttttgttatgttggttaggttggttttaaatttttgattttaggtgatttgtttgttttatatattttttttggtatggtttgtatttgatattgtttgtagtttgttttttttttttggggtattattggggttattgtgtttattagagtaggttgtgaggttgtggattttatttggattaggatttttgttttgttgtttgttaattgtgtgattttgagtaggttattttatttttttgagtttttgtgtttttatttgtataatgtggaggatatgggtagttttgttattttttgtatttgttgattttgttttttttgaaagttgtatagaatggagaggttgtggtggttttaattagttttttgtgatgggtgttaggattgttgtttgtttattgtttttttaaaggaggtagtggaagggggttgagtaggaattgggtatataattttaagatttagtttgttttaaaaaaaaaaaaaaaatgaagggtgtttgtttttttggaaattatttgttaatttttaggatattgttttttttttaggtgaaggaggtggaggagattattgagggtatgttttttaggttggaagagttttgtagtttggttgatttggtgagtggttgtttggaaggtgtgggtttaggtttaggttagattttaggtttttgttggagttttttgtggaagttattttggtggtgagttagtaattaggaggaatggggtagtggttagtgttgagaggaaagttatgtgtaaatattttttttttttttttttttttgtttttttttttttatttaattttaagtgttttttgaggtggttattttgattttgttttttttttgagatggtttttattttgtagaggagttaggagtggattataaggtggtatttttgggtattgatgtagggagttgtttagtggggatgttagattatatttaattttttttagttttgtattgttttttgtgtaaatatggagatagttaggaaatggttttaggtttgtgaggtttaggaggagttttttgtttaggttatagtttgtggtggagttgggtattgagtttttttttgaatttttttgttttttttgtttttattttttattttgtttggttggtttaaatttattagtttggttgaggaggaagatggaagataatggtttagaagataaagttttttatgttagagtttttagaaattgtttttagaggttgggtgtagtggtttatatttgtaattttagtattttgggaggttaaagtgggtagattatttgaggttaggagtttaagattagtttgattaatatggtgaaattttgtttttattaaaaatataaaaattagttgggtgtggtggtaggtgtttgtaattttagttatttaggaggttgaggtaggagaattgtttgaatttggaaggtggaggttgtagtgagttgagattgtgttattgtattttagtttgggtgatagattaagattgtgttttaaaaaaaaaagaaaagaaaaagaaattgtttttagattttagtgtttttaggattgttgttagttaggtgtggagtttttaggagtgttgatagaattttttagaagtttttaagtttattagaggtaaattagtaatttgggtttgaggtgtttgtttggaggtttaaagggtagagttttatattgtgattaggttttgtgtttttttagagtggaggaagtttggttatttgggtttagtggtgtgtgtttatgtttttgagaagtattgtgtttggattttgagagtgtttgtgagaatttaagggagtaatagtaatagtagttttagatgtttattgaatgtttttttttgtgtttggtataaagttattttagatagtaggtattgagttatttttatttatttagtggattttggtttagtttttagggttatagtagaaattttaagaggatttatatggtttttttttttgagttaatttttatgtttagatgtgggtttaggtgggagttaggtaataagataggtttttaatagtttggattgttttttttttattattatgtattggattttttttttttttttttgtttt

SEQ ID NO: 3834 - DNA, 2465 bp, Artificial Sequence
  chemically treated genomic DNA (Homo sapiens)
aagatagaaagagaaagaaagagtttaatgtgtggtggtaaagaaaggataatttaggttgttaaaagtttgttttgttatttagtttttatttggatttatatttgaatgtaaaaattgatttaagagaagaaattatataggtttttttgggatttttgttgtgattttagaggttgggttgaggtttgttgaataggtagggatgatttagtgtttgttgtttagggtggttttgtgttgggtataaagaaaggtgtttaatgaatatttggggttgttgttattgttatttttttgggtttttataaatatttttagggtttggatatggtgttttttagggatataaatgtatattattgggtttaggtggttaggttttttttattttggggagatatagggtttggttataatatggagttttattttttgggtttttaggtagatattttaagtttaggttattggtttgtttttaataagtttgggagtttttagaaaattttattagtatttttgggggttttatatttggttggtagtaattttaggaatattgggatttagaagtaatttttttttttttttttttttttttgagatataattttgatttattatttaggttggagtgtagtggtgtaattttagtttattgtaatttttattttttgggtttaagtaatttttttgttttagttttttgagtagttaagattataggtgtttgttattatatttggttaatttttgtatttttggtagaggtagggttttattatgttggttaggttggttttgaatttttgattttaagtgatttgtttgttttggttttttaaagtgttgggattataggtgtgagttattgtatttagtttttagaggtgatttttagagattttggtgtgggaggttttgttttttgggttattgttttttatttttttttttagttaggttagtagatttgggttaattagatagagtaggaggtaaaagtagagagaatagaaggatttaggaaggaatttgatgtttaattttattatgggttgtggtttgggtaagaggttttttttaggttttgtaggtttgaagttattttttggttgtttttatgtttgtataggggatggtgtagagttgaggaaagttaaatatagtttagtgtttttgttgaatggttttttgtattggtgtttgagagtgttattttgtggtttatttttggtttttttgtggaataaaaattattttgagggaaggatgagattaagatggttgttttaggaagtatttggggttgagtgagagagagagagtgagagagagagagaggagggagtgtttgtatgtggttttttttttagtgttggttgttgttttattttttttggttgttaatttattattaaaatggtttttgtagaaaattttagtaagggtttgaagtttggtttgggtttaaatttatgttttttaggtagttatttattaggttagttaggttgtaaaatttttttagtttgaggagtatgtttttgatggttttttttattttttttgtttgaaaaagagatgatattttggagattagtaagtggtttttagggagataaatattttttattttttttttttttttaaagtaaattaagttttaggattatgtgtttggtttttgtttgatttttttttattgttttttttgaaagagtaataaataggtagtagttttggtgtttattatggaggattggttaaagttattatggtttttttattttatgtagtttttaaaagagataagattaataaatataggaaataataaagttatttgtattttttatgttgtatagatgaggatatggaggtttagagaggtggggtaatttgtttaagattatatagttaataaatagtggggtaaggattttaatttagatggagtttataattttatagtttgttttaataaatatagtggttttggtgatattttggagaggaaaagtaagttgtagatggtgttagatataaattatattaaaaaaaatgtgtgaggtgggtggattatttgaggttaggagtttgagattagtttgattaatatggtagaattttgtttttatttaaaatataaaaattagttgggtatggtggtgtgtgtttgtagttatagttattttgaggttgaggtaggagaattgtttgaatttaggaggtggaggttgtagtgagttaagattgtattattgtattttagtttgggtaatagagtgagattttgttttaaaaaaaagtatatgtttttatagagaaaggtttggaatgatatgtgttagattgttaatagttaagagatgtgtttatatttaaaaaatttgttgtttatttgaaatttaaatttaattgggtattttatagtttttttggaaattttattaataggg

SEQ ID NO: 3835 - DNA, 2474 bp, Artificial Sequence
  chemically treated genomic DNA (Homo sapiens)
gataggagaggaatttattttgttaagaaggattttttttttagataagaaattaatatggttttgttttttgaattttgtgtgaagttaattaggtttttagagtgtaggtagaagggtagttgatgttttttgagtatttattatgtgtttgatatttttagttttttgatttttttttattgttaatatattattaattttattttagagatgggaaaattgagttttaaggtatatagtgtgaggttaatttaggttttaggttgagtttgttgggtgatttaaaatttagtttttgaagtgggaattatataaaggtttttggtattaggaataatttttgatggtggaagtgtttagatataatgagtgttttaattaaaaatttatttttttgtggttttttttaaatggatgtaaatggaatgaattgtaggatttttggatttaaaagtttgttttttaatgtaggggattaagtttaggtaaatatttagatttttgaaaatgagattattttttttatttttatggtagttttggagttgtaatttggattgtatttttggagagtagttttgtgttttagtaaagttgtgggtaagtgatgggttttagtttggggggttattgatattagggatatgagttatagagggtaaaggtttggagagttttagttatgttttagttttgtttggagtttgatattttttagagggaagttttatttagagatttttatattaggtttattgttttagagaatattatgttgggtataattaaatttagggagagaaataggtgggaagagtaggtgtttgttttaagatggttttgattgttttagggtataaatttatggaaaaatatttaatttagaaaaaaaaaaattattttaagtatatgtatttatatttattaaataaagtttaaaatataatttttggggatttttaagtaataaaatgatttatgttaggatatgatgatttagtgggaaagagggaattttattatttatgtgttttttttaaaaaattaatttgttttttggataggtgatgggagtttttgttattagattgttttaagaaaattgtttagtaaaataaaataaaaaattttttttaaataatttaagttttaaagttgagtaatttgatgtaggttagtttttaatttatgtttttgtaggatatatagagttagggagttagttggttaagtttgggggtttgaattaagaaggatttattagttgaaaaattttaaaattttgtgttatgtgaaggaattttttaaaatattggattttatttaggtgtagtgagttgtttaaagttatggtaattttttttttgttgttatattatttttatttttgtgtttttagatttttttttgttttgtaatgttttgttgggatttttgattttgtttgaggttttgtggttaagggttagggtttttattgaagttaggaatagtttggattttttagtgtgaattttgtttgaagggttatatattttttaaattttagagaatatttaaatggttttttagtaattattgagaatgataaataggaaagattttgattgttttgtttggtttttttgttttttttgatatgattagaaaaaattatttgagttgatgataaatgttgttttgggattttatttttgttattagttgtgggttgatttggggtgtatgatttgatatttgtgagttttagttattttatttgtaaaatggggataatgttgtttgttttttagggttggagtgataattaaaagagatgtatttatttaataatataaatgagtatttgttatgtgttggggattattttggatgttgaggatatagtagtaaatgttgagattttgttgttaaggaattaagagtttagtatgagagattaggtgataaatgaatagatagataaggtaggtgattttaatagtgttaagtgtttttaagaaaatagagttgggtagtggtatagaaggtgataaggtgtttgggaagtgggataattttagaatgatggttaaggaggattttgtggaggaagtgatttttgagttgagattgggaggaataggaggttgtaggtttgaaaagaaatggtggaggaggttggatgtagtggtttgtgtttgtaattttaatattttgggaggttaaggtaggtagattatgaggttaggagattgagattattttggttaatatggtgaaattttgtttttattaaataaattataaaaaattagttaggtgttgtggtaggtgtttatagttttagttatttaggaggttggggtaggagaatggtgtgaatttgggaggtggagtttgtagtgagttgagattgtgtatttgtgttatgttattttagtttgggtgatagagtaaaattttgttttaaaaaaaaagaaaagaaaaga

SEQ ID NO: 3836 - DNA, 2474 bp, Artificial Sequence
  chemically treated genomic DNA (Homo sapiens)
tttttttttttttttttttttgagatggagttttgttttgttgtttaggttggagtggtgtggtgtgagtgtgtgattttggtttattgtaagttttgttttttaggtttatgttatttttttgttttagttttttgagtagttgggattataggtatttgttatgatgtttggttaattttttgtagtttgtttagtagagatggggttttattatgttagttaggatggttttaattttttgattttgtaatttgtttgttttggttttttaaagtgttgggattataggtgtgagttattgtgtttggttttttttattatttttttttaagtttgtggttttttattttttttagttttagtttaaaggttattttttttatggggttttttttgattgttattttgaagttgttttgttttttagatattttgttattttttgtgttattgtttggttttgtttttttgggggtatttagtgttgttgaaattatttattttgtttgtttgtttatttattatttggttttttatgttggatttttagttttttgatagtagagttttagtgtttgttgttgtatttttagtatttagagtggtttttggtatatagtaggtgtttatttgtgttgttgaatgaatgtattttttttagttgttattttagttttgagaagtgggtagtattatttttattttatagatgaggtaattgaggtttatagatgttaagttatgtattttaggttagtttataattggtgatagaggtggaattttaaggtagtatttgttgttaatttgagtaattttttttagttatgttagagaggatagagaaattaaatagaataattagggttttttttatttattatttttagtaattgttgaaaagttatttggatgttttttgaaatttaaaaaatgtgtaattttttaggtaaagtttatgttgggaagtttaggttgtttttgattttagtgggaattttggtttttggttatagggttttaggtggagttgggggttttagtaaaatattgtaaaataggaaaaaatttaaggatataaaaataaaagtgatgtggtagtgggaaaggggttgttatggttttgagtgatttgttgtgtttgggtgggatttaatgttttggaaggtttttttatatgatatagagttttggaattttttggttggtaaattttttttaatttaggtttttaggtttggttaattagttttttggttttgtgtgttttgtgggggtgtaggttggaaattggtttgtattagattatttagttttgaaatttaaattgtttgaagagaattttttgttttgttttgttggatgatttttttggaatggtttgatggtagaggtttttattatttgtttagaggataaattgattttttagaaaggatgtgtgggtggtggaatttttttttttttattgagttattatattttgatatgagttattttattatttggaggtttttaaaggttgtattttgagttttgtttaataaatataaatgtatatgtttaaaataatttttttttttttaaattaagtatttttttgtgaatttgtgttttggaataattggaattattttagagtagatatttgttttttttatttgtttttttttttgggtttggttgtatttggtgtgatgttttttgaaataatagatttggtatgggagtttttagatggggtttttttttgggaaatgttagattttagatagggttggggtatgattaaggttttttggatttttgttttttgtgatttatgtttttggtgttagtggttttttgggttggagtttattatttatttatagttttgttgggatatgaagttgttttttaaagatgtgatttagattgtaattttgaagttgttgtggagatagagaaaatggttttgtttttagggatttaaatatttgtttaaatttggttttttgtattgaagaataggtttttaagtttaagaattttgtagtttattttgtttgtatttatttgaaggaggttatagagaaatgagtttttagttagaatatttattgtgtttaagtatttttattattagaaattgtttttggtattaaaggtttttgtgtaatttttattttaaaggttggattttgaattatttagtagatttggtttgaagtttggattggttttatattatgtattttgggatttagtttttttatttttgagatggggttggtggtgtattagtaatagaaggagattaaggaattgaaagtattaggtatatagtaggtgtttagaaaatattagttgtttttttatttgtattttgggagtttggttgattttatatagggtttagagggtagagttatgttggttttttgtttgggagaagagttttttttggtgaggtgaattttttttttgtt

SEQ ID NO: 3837 - DNA, 2463 bp, Artificial Sequence
  chemically treated genomic DNA (Homo sapiens)
tttgtttaattaatttttttgtgattttaattatttttttgtttgttttttttagtagattgggtattttttgaaagtaagaattgattttatttttttttttatttagagtatatagtttatatttagtatttgttgattgaatgggtattgttgtttattttggttgttgtgatagttttggaaggttttaggtagggtggtaggggttagaatttattttattttttgtagtttaatggggttttgtagagggttttaagtgatgttgtaaagttttatattgagaaatgttatttttattttggttttgagaggggataggggtttggttataagttgggattagtatttaggttattaataagttttaataagttttttaaagtttaatttttattaaattaggtattttttgaggttttgtttttgtttaaggtaagtgtagtaatgtgtttgttttatgattttaataattttgggtttaaagttaaggtgtatttgggttaattattttttttttttttgtagtaagaaaaataataatttattaaaagataaatgtaaaaagaagatgtatgtgagaatgagtttatgtggatgtgtaagtatttgttttagagatatagttatggggttgttttagggttagtgtatgaatttaatatgattttatttttgtataagatttttttgtattttttattttaatattatttggttgaaatttttggtttagttttagattatttttgtttaatttttgtaaataaggttatatttgggtatttatggtttattttatgtttttttttatgatagatgtttgtttgagtttagtttttgtagttattgttttttattaaagtagattttttttttttttttgtttatggaggagtgagggggaattgttgagaggaggggtagattggttagggagggggtgattgagaataggaagaagatggggtgagatttgagaggtatgttttggatataataaataagtttgttgttttgtttagaaagggatttgggatttttaattttattagagttttaaaagtattagtttaaagttaaagttagatatatgtaaagttgtagtttttgggggaatttagagtttaaaaataatattttttttgatttaaaaattataagggaatatttatggtatattttttgattaaaaaaggaaagtgaaaaataaggtttttttttttttttttttaattattataaaattaatttgtgtttattttattaagttatgatttttgttggttttaagtgagtttaatttatgttggttatagatatgaggggttgggaagtttgggtatgttttagtgaattgaattggttttttttgaatggttgttattttttttttttgttttttttagtataggaaagttattaaggagttgtttatgttagtatatttattatttagatttttagggtattgtttatttgagaggttagatatagtggggtttattaaagttttaaagtagtagtaataattttttaattgttgtttttgagatagatgaagtatttattatgtgataggtattgtgtttgggattggggatgaagtaatgatgaaggagatgaaagatgaatgtgtggtaggggggtggatgagtaggtgggtgaaggggttggaagggaggaggaaaggaagagagaatatatattaggttatggaaaaaaagaaataaatagaggttaggtatggtggtttatgtttgtaattttagtattttgggaggttgaggtaggtagattatttgaggttagattattggttaatatggtgaaattttatttttattaaaaatataaaaattagttaggtatggtggtatgtatttgtagttttagttgtttaggaggttgaggtatgagaattgtttgaatttagggggtggagtttgtagtgagttaagattgagttattgtattttagtttaggtaatagagtgagattttattttaaaataaatatttaagtagaaagatagatgatggtaggagagaaaggggatttattttggtaggagaattaggggaagttgttttgaggaggtgataattgagttgatagttgaatgaagtagagaaagtagttatgtggatagttgggaggagtgaaaggtatgtgtaaaggttttgaggtaggagtttatttggagtgtttgaggaatagtatagaggttattagtaggtgggaatggagtgagggagtgagtgagtgaggaagagaggtaggtagggattgggtgatatggtttggtttatggtgaggagtataaggttattttgtatttatattttgggaggggagatataggagggtttagaatgggggtggtgtagattaaggtatattttgaatagattttttggtagttgtgtggggagtagatgaatgaagggtgtaagtgg

SEQ ID NO: 3838 - DNA, 2463 bp, Artificial Sequence
  chemically treated genomic DNA (Homo sapiens)
ttatttgtattttttatttatttgttttttatatagttgttagaggatttgtttagagtgtattttggtttatattatttttattttgagtttttttgtgtttttttttttggagtatagatgtagagtagttttgtgttttttattgtggattaggttgtgttatttggtttttgtttgttttttttttttatttatttatttttttattttatttttatttgttaatggtttttgtgttattttttaaatattttaggtaggtttttgttttagggtttttgtatgtgttttttattttttttagttatttatatggttattttttttgttttatttagttgttagtttaattgttatttttttaaagtagttttttttgatttttttattaaaatagatttttttttttttttgttattatttgtttttttatttaggtgtttgttttgagatgaagttttattttgttgtttaggttggaatgtagtggtttaattttggtttattgtaagttttattttttgggtttaaataatttttatgttttagttttttgagtagttgggattataggtgtatgttattatgtttggttaatttttgtatttttagtaaggatggggttttgttatgttggttagtgatttggttttaagtgatttgtttgttttggttttttaaagtgttgggattataggtgtgagttattatgtttggtttttgtttgtttttttttttttatagtttgatatatgtttttttttttttttttttttttttttaatttttttatttatttatttatttatttttttgttatatatttattttttattttttttattgttgttttatttttagttttaagtatagtgtttgttatatagtaggtattttatttattttaagaatagtggttgagaggttgttgttgttgttttgaggttttggtgagttttgttgtgtttggttttttagatgaatagtgttttgggagtttgggtgatggatgtgttggtgtaggtggttttttggtggtttttttgtgttaaaggaagtagaggaaggaaatgataattatttagaaaggattggtttagtttattaggatatgtttaagttttttggttttttgtgtttgtggttaatatgaattgggtttgtttgaggttaatagaagttgtgatttgatggaataggtataagttagttttatgatgattaagaaggaaaaaaagaaaattttattttttattttttttttttaattaagaagtatgttgtgggtgtttttttgtggtttttgagttaaagagagtattgtttttgagttttgagtttttttgggggttgtagttttgtgtgtatttaattttaattttgaattaatgtttttagggttttggtgggattgggggttttgggtttttttttgaataaggtagtaggtttgtttattgtgtttaaagtgtgttttttagattttattttattttttttttgtttttaattgttttttttttggttaatttgtttttttttttagtagtttttttttatttttttgtgagtaaaggagggggaaggatttgttttggtggaaggtggtggttgtagaggttgggtttaggtgaatgtttattatggggggaggtgtggaataagttatgagtatttaaatgtggttttgtttgtagggattgaataagggtggtttggggttggattgggggttttagttaagtaatattggggtgaaaaatgtagaaaagttttgtgtaaaaatgggattatattaagtttatgtattggttttaaagtaattttgtgattatgtttttagagtaagtgtttatatatttatgtggatttgtttttatgtgtattttttttttgtatttattttttggtggattgttattttttttgttgtgggagggagaagaatgattggtttaagtgtattttgattttggatttgaagttgttgaagttgtgaggtagatatattgttgtgtttgttttgggtagagatagagttttggagggtgtttggtttggtagaagttagattttgggaagtttgttgggatttgttagtaatttgggtgttagttttagtttgtaattaagtttttgtttttttttagggttaggatgggagtgatattttttagtgtggggttttgtagtattatttgaagttttttgtagaattttattaagttgtggagaatggagtggattttagtttttgttattttgtttggggttttttagggttgttgtggtagttaggataggtagtaatgtttatttagttaatagatgttgaatgtgagttgtgtattttggatagagggagaaatgagattaatttttgtttttagggagtgtttagtttgttgggagaaatagatgggaaaataattgaggttataaggggattggttgaataaa

SEQ ID NO: 3839 - DNA, 2493 bp, Artificial Sequence
  chemically treated genomic DNA (Homo sapiens)
tgaagttatttttttttgttttttggtttttagaggtttttaaatatgttgaatttatatagggttttgttgttgtagtttaattttagttgtgggagttttgggtagttttgtatttgttttaataaaaagtggggaagttgtgtagttttgttaatgaatgttttgggtttgttatttttttgaaggaaaagataatttgtattttgattattttttagaaaggattgggaagaaatattttaataatgtaattttttaaatgaaatattttattttgaaattaatttttaatttaaagttgtaaaggtattatagagagttttggtatatttttttattgagttttagttttttaagtagtaaaattattaaataattatagatgttaaaattggggaaaagatttagttttagattttatttatttttaaataagtttggtgtatttatttaaattttattgatttttgaaagagggaggtgtatatatatttatattttggggattatttttttgatatttaaaataatatgggtagtttaattttagtattttaagattaagtatttaaaaattgaaatttggattaatatattaatgtaaatttttatttggttaatataataaaaataagagttattatttgttttatatttattaggtgatagtttttgtgtatgggtgatatgatttttatttttttagaatttgttgaggaagagatttttttgtagtttttataaaatgaggatataaatgtagagatgttaagtaatttgtttaaggttatatagttaatgtgttgttatagtggaaatagatatataggtttaggttgtgtttaaagagaattattgtggatgttgttttaattttttttgttaagttatatttattgttgttattgagaatttttgttatatggtagtgaagtttttaattttttattttatatattatttagaattagttgtaaagtgttaggagatttggttaggtagttttaagtattagtgagggttggaagtttttattgtgaagttttttatagaaagttgtggttggtagtttttgtttttgtatgggaataaattaatattggtattttaaatataggaaaggaaggaaattggaaatatagtttatatttggttagttttttgaaatattgtattatgttattgatattaattaatgaaaagtagggttgtgtgagaggttttggtttggaaatgtattaatatatgtttaatatgtttgtataggaattggattatatgtattttggttttaaaataataaagtaattattttaaagttggtgtttttggagttgttattaatttaatttattttatgtggattagtataggttttgtgtggttttttataatgttttttgatataaatgttgaaaaggtggtattgtatatgtttgtttgagttttgtataagtaagtgttaaattttatgtattttaatatttttttaaattataaatattttattttggagtggaaaaaaatatatagtagtagttttagtattttttggtattgttattttagtttgagtttgagtaattttttttttgttggggaagtttaaatgaattatttgttttatattaagaaatattaagttatattttttgttaattattatttgttagatgttatttgttgtaaaatttggaatttaattttagtttgaatatatagttaatattaaatggtttattaatagttgtggttgtatatgggattatttgtagtgaataaatgttttttttttataaattgttttagggattggaaagaaaagtatgtgaagttttggaataaataaagtattgtgttttgagttgtttagtatatgatttttgtatgttgtgagaataggtttaaaatgatttaagagtaagtgtttattttgtaattttgtaagaatgtttttgagaaaggattttagatgatgtaggtaaattttattgtttttgatttgtaatagaaagaattagtttgttttttgaaggattagtatttttagttattgtttttatatatatgtttatttgtatttggaatttagggtttaagtaatagatattatgggtgttttttttttgtttttggtgatgttatttttttagtttaattttatgttgatttgggatttattaagttggagtaatttgagtgtgtaaagttaaatgtgttattatttttattataaattaatagtttttatgtaaatattggtagttttttattttatgaaggtgagagaaggtaaaatggtattggtgtatttgatttaaattaattaaaagtagagggttgtgtaatttaatatattgattttattagtgggatttaaattttttataataagtgtatatagttgtagtgtttttttattattatgttgtaaaggttaatttgtatattttttttgataataatatgataggttttatatatttttgt

SEQ ID NO: 3840 - DNA, 2493 bp, Artificial Sequence
  chemically treated genomic DNA (Homo sapiens)
gtagggatgtgtgggatttgttatgttattgttagaaggaatgtgtggattagtttttatagtgtagtggtgggagagtattgtagttgtgtatatttattataaaagatttaagttttattggtaaaattaatatattgaattgtataattttttgtttttaattagtttaaattaaatgtgttggtgttattttgtttttttttgtttttatggggtgaggaattattaatatttatatagaaattgttaatttgtggtgaaaatgataatatatttagttttatatatttaaattgttttaatttgatggattttagattaatgtggagttgagttgaggagatgatgttattaggagtggggaggagatatttgtgatgtttgttgtttggattttggattttagatgtaggtggatatgtgtgtagaggtagtgattggggatgttggttttttaagaagtgagttggttttttttattgtaggttaaaaataatgagatttatttatattatttaaaatttttttttggaagtatttttataaaattgtgaagtgggtatttgtttttgggttattttgagtttgtttttatagtatgtaagggttatgtattgggtagtttaaggtatggtgttttatttattttagagttttatatgtttttttttttaatttttgaaatagtttatagaggaagggtgtttgtttattgtaaatgattttatgtatgattgtggttattagtgagttgtttggtattagttgtgtgtttaagttgggattgaattttgggttttgtagtaaatggtatttgataaataataattgataaaaaatgtgatttggtattttttaatatggaatagatagtttatttaagtttttttggtaaaaaaaaaattgtttaaatttaaattgaaatagtaatgttagggaatattaggattgttgttgtgtatttttttttgttttaaagtagagtgtttatgatttggggggatattagagtgtatgaagtttgatatttatttatgtgaaatttaggtaagtatgtgtaatattgtttttttaatatttgtgttggaaggtattgtggggagttgtgtaaagtttgtgttgatttgtgtggagtggattgaattaatgataattttgagagtattagttttagggtaattgttttattgttttggagttagggtgtatataatttggtttttgtgtaaatatgttgaatgtgtgttaatgtatttttaaattagagttttttatataattttgttttttattaattgatgttggtagtatggtatagtattttaaagggttggttaagtataaattgtgtttttaatttttttttttttttgtgtttggaatgttaatgttaatttgtttttatgtaggagtgggggttgttaattgtggttttttataaagggttttatagtgaaggtttttagtttttgttgatgtttggggttgtttggttaagttttttgatattttgtagttaattttgggtgatatatggggtgggggattgggggttttattgttgtgtaatggaagtttttggtgatagtagtgggtgtgatttggtaagggagattggaatggtatttatagtgattttttttagatatagtttaaatttatgtgtttgtttttattatgatagtatattagttgtgtgattttgggtaagttatttaatatttttgtatttgtgtttttattttataaaggttataagagaattttttttttaatagattttaaagaaatagaaattatattatttatgtgtagaggttgttatttagtaggtgtaaaataaatggtagtttttgtttttattgtgttggttagatgaagatttatgttggtatattagtttaaattttagtttttaagtatttaattttaaaatattgagattaaattgtttatgttattttaaatgttaagaaaatggtttttagagtgtgaatatgtgtgtgttttttttttttagagattaatggaatttgaatgaatgtattaaatttatttgaggatgaatagagtttaaggttgaattttttttttaattttagtatttatggttatttaatgattttattatttgggaaattggaatttagtgagagggtatattggaattttttgtagtgtttttgtaattttgaattaaaaattaattttaaaataaaatgttttatttaaaaaattgtattattgaagtatttttttttaattttttttggaagatggttaaagtataaattgtttttttttttaagggagtgataagtttaaagtatttattaatagaattgtataatttttttattttttattggagtaggtgtaaggttgtttaaggtttttgtagttggggttaggttgtaataataaagttttgtgtggatttagtatgtttagaagtttttagagattagaggatgaaagagaatggtttta

SEQ ID NO: 3841 - DNA, 2396 bp, Artificial Sequence
  chemically treated genomic DNA (Homo sapiens)
tgggtgggggttggggagttaggggtttagttgggaggggggtagggtgatttttttttattttgtagtttttgttttagaagggaatttggaagtttgttttttttttgatttgaatatgtagtgggtttggaagttaattgaattttttaagtttattgggttgtgtagttgtttaagaaggaggggggttttgagaattgtttttattatttattgtagagtttgaaggagttaaagtgggattattttttggttgttggtaggatgatgtttatttggtttttgtattggtttttgttgggtgggtgatgggtgattggggggtttgggagattttttatttttatagtttgttagttttttattgtggtaataatgatttagttgttatggtaatgaggttaattaatgtatttatttggtagaattaaaattttggatgtatttaattagttttgatatttttatttttaagaagttaatttttggtgttttatttgtttaggtatgtaggtatgttataaaataaaatattgttataaaaggaggagttgtaagaagaaatgggggaagttgtggggaggagttgggaggggggggtttttgtttattttttagagagaagaaaatttggaatgttatttttttttttttgatgatggtataaaattagtatagttaagtaaatgtgttataaatataaagatgttgttaggaggtaaagtgtttttatttaaggagaggaagaatggttgaggggttttagaaagggggttgggtggttaaatggttggagggggtgttgtttgtaatttttttaagtattgtaattagagggaaaagttattttttttgagaatgtgtatttgtagaatgtttagatagttataaagaggataattaaaaaaagaaaaaagttgtaagttgtagttattttttttgttagggtatttatttggttgtaatttttagttaattgtttgagtaggtgaaaaattataaaagtaagaaaagttagtgtgggttaggaggaggttggggagtttgggttgaaaatagtttatgagtaagtgttttgaaattttgttttaaataagttggtaaatgaatttaattttgttagatttttttttttttatgtagattaaatattttgttggtgtgttgtttagatatagataataaaggattttttatagtgtatagagatgtgttgataaagtagttatttaaagatgtagtattgtttttttggtttaaaatgatttgttagatggatttaaatgaaaatgttaagttattggtttggtttggggtttgttggtggattggttggggggagggggttggttgttttagagaattagaaattattatttgtgattgggttgttttttaggttgtttttaaaataggattgtatgtggttgtttagtaaataattttggttttttttgttttgggaaggtgtttgttaagatgtttttaatatttagtagtagtaattttgttgtagtattgtttatttaaagggggtgtgtggtaaaaaaaggttatatgaaaatgtatgggggagaatttgtttttatttgttttgggtggattagaattaagaggagaggaatttggttttatttttaattttgtattttagttttttttatataaagggttattataaaatgagttattttttttttttaggaaagaaagatagggttggaggtgggttggttgtaagggtgtggtttggggatatatttagggtgatatttaaatattttttaaattggggagtgggtttttatgtagttaaggttttaagggaggaagaatagtatttaggagtttttagagttttaatataagttgtgtgttgattttttttttaggttatattttggggtagttggataggggtggtttttttaaatgggggaattagtttttttttttgggattgttagtttttaatttagagaaagatttgttgtttgttagatgtttagtgagggtttatttattttagtgatttttttttgatggggtgttggttaagtggttattttttttttatgtttgttttgtttatggtagtttttatatgagattggtttgtttttttttttttgttttttttttttgtttttttttttttttttttttttttttaaatgttgtaaagtttagatgttggaattagataaagtttatttttattatttttaggttgtgtggtttaagggaagttatttttttgagttttagtttattttgttgtgaaatggggttttaattatttgttttaaagagttgttgtgaggattaaatgtttttgtgtattaaatttattaattagttattaatatggtatttattggttttttttaata

SEQ ID NO: 3842 - DNA, 2396 bp, Artificial Sequence
  chemically treated genomic DNA (Homo sapiens)
tgttgaaagaggttggtggatgttgtgttagtggttggttagtgggtttaatgtataagggtatttaatttttataatagttttttaggataggtggttgagattttattttatagtagggtaaattgaggtttagggaggtgattttttttggattatatagtttgaaggtggtggagatgggttttgtttggttttagtgtttgggttttataatatttgagagagaaaaaggaaggaagggaggataggaaggaaagatagaggaaggagagtagattagttttatatagaagttgttatgagtagggtaggtatggaaaggaagtgattgtttggttggtattttattagagaaaggttgttggagtgaatgagtttttattgggtatttggtaggtagtaggtttttttttagattggaagttgatagttttaggggaagaaattagtttttttatttaggagaattatttttgtttggttgttttggagtgtaatttgaaggagaggttagtgtatggtttgtgttgaggttttgggagtttttggatgttgtttttttttttttggaattttggttgtatggaggtttattttttagtttagagggtgtttgggtgttattttgagtgtgtttttgggttatatttttgtagttagtttatttttaattttgttttttttttttgggaagggagggtgatttattttatagtgattttttgtatgagaagggttaaaatgtaaagttggaggtgagattagatttttttttttttggttttggtttatttggagtaggtggaaataagtttttttttatgtatttttatgtaatttttttttgttatatgttttttttaagtgaatagtgttataataaaattgttgttattaggtgttagagatattttagtaggtgtttttttagaataagaagagttagaattatttgttgggtggttatgtatagttttattttaagagtgatttggagggtagtttaattatagatgatggtttttagttttttggagtagttagttttttttttttagttagtttattagtagattttaaattagattgataatttagtatttttatttaagtttatttgataaattgttttaggttgagaaagtaatattgtatttttaaatggttattttgttagtgtgtttttgtgtgttgtaaaaagttttttgttatttgtgtttagatagtatgttagtggaatatttggtttgtgtgaggggagagagatttgataaggttgaatttatttattggtttatttaaagtgggattttaaaatatttgtttataaattgtttttggtttagattttttggtttttttttagtttatattggttttttttgtttttataattttttatttgtttgggtagttagttggaggttgtagttgggtgggtattttggtgaggagagtgattgtggtttgtagtttttttttttttttaattgttttttttatgattgtttagatgttttgtagatgtatgtttttgggggaaatggtttttttttttggttatagtatttgggagggttgtagatggtattttttttaattgtttgattatttagttttttttttaaaattttttagttattttttttttttttaaatgaaggtattttgttttttggtagtatttttgtgtttataatatatttatttgattgtgttaattttatattattattgaaaaaggaaaagtgatattttaggtttttttttttttgaggggtgggtagagattttttttttttagtttttttttataattttttttatttttttttatagtttttttttttgtggtaatgttttgttttgtggtatgtttatatgtttagataaataaaatattagaggttggttttttaaggatgaaaatattagggttagttgaatgtgtttgaggttttagttttgttaaatagatgtattaattaattttattgttatagtgattaggttattgttattgtagtgaaaaattggtaagttatgggggtggagggttttttgggttttttaattatttattatttgtttaataggaattggtgtagaggttaaataggtattgttttgttagtaattagaaagtggttttattttggtttttttagattttgtagtgggtggtgggggtggtttttagagttttttttttttttaggtagttatatagtttagtggatttgggaaatttagttgatttttaggtttgttatatgtttaggttaggagggaagtaggtttttgagtttttttttggagtgagggttgtggggtggagagaagttattttgttttttttttagttagatttttaattttttgatttttatttg

SEQ ID NO: 3843 - DNA, 2500 bp, Artificial Sequence
  chemically treated genomic DNA (Homo sapiens)
ggttttttgtttgtggggattttgttaggttgtttagagtagttttttagtgttatttttttttttattttttttttttttggggtttagttgtttttagttttagtgttgttttttttaagttggatgtaatttagtttttgttttttatttgttattttatttgtgtagttaatattttatgtatgttttttatagtgtagaaggaaaatataattttaatttgattttatttagtgatgttaaatattgtatgtgaatatttttatttagaagtttatttaatgtagatttattaaaaagtaggagttttaaatgtttgtattgtgtaagtatttttagtatattgttatataggtgtttaagagtgttttaagagatatttggaaaattggttggggattgtttttgttggtttgggaatgtattattatttttttttagtttatataaaggggtgaagttttgatgtttggaaatttgttttttaaagtgtttttaggaattgataatatttggataatgaggggtgtttgtattttttttgatttaaattgttggtagagggggatatttttgtatgattgggtaaggttaaatatagaattaaattaggaagaatagggtttgatatgatgaatttttgttttgttttgttattgataagagatagaataaatgtttttaaagaattttgtattatgaatgtttgatggtaattttgttttagggttttgttgtttgttgttaggtagtaggtatattatttagggttgtggggaaggtgttttgtagttatattgtagtaggaggttggttatatttatgggttttattaagttaggatgtagagtttggtttgttttatggtataggtttgggttgtttggagtttataatgaattagagttatagttgattatttttaaggttggtgtttatgttgggtgtttgagaagatgatgaatttgtagtgttgaagtgttgtttggttttttaggaattagttgtagttgggattttttgtagttttttttgtagtaagttggggtagttatgagttttgtttgtttaatgtggggttaggtgggtatgtttgttgtgtttggtagttttgatatttttagattttgttggaagatgtttgtggtttgaaagtttattttgtagttgttttattttgggatgtagtttttgtattggtaggattaatgtaaatagaatttgtttggtttattttttgttgggttttaataggtttgtaatgttattgtttgttagggagagttatttggtgatattgttaattaaaattatgattttgggggtaagaaaaaattttaaaatgttgaagttattttttttaatagaaattttattttgaaggtgtttatggaggttaggttgattagaaaaatttataagttataaataagtttaaatagttttatttaatttatttaatttggtgtttggagtttttatggggagaggtgtttggtattaatatagggtgggggtggttatttttatttttagtttttgggttttagagttgagaggagggagagaattgaatttttttggaagaatgtggaattgttgagtagatgttttggaatttgttgatttaggtatttgggagtatagtttgattggttatttttgtgttaagttatttatagtttaatggttatttttaattggaaatttattttaaagtggtggtagtgatgggggagtggttgtatttgtaatttattattttatatagagaattttttttttttatttttttttggttaaagttgttgttttgaatgtgggtgggttttggagtttaagattgagttggttgtttggagaaaaattggagggatttgaaaaggtttgagggagggtgttttttgagttgggggtggtagaaaatattttaaatgtgtaggtttaagttttttgtagtgaagggaataggattttggttttggtagatttaatttagtttttgggtttttgggttaatttgtgaaattatttttttttttaggattgggagagaatggttttaaataagtgtaatttaatttttttgattgtggttttttttaatgaaaaattaaaatttatttttttttttgttagttttttattgaaagttataagaaatgaggttggggtggagggtttggagttgttatggaagtatgatgtttagaatttattatgggatggatggttattggtgttatggattgtggtgtagatattgttttttgtgttaggatgtggtttggttttgtatttttttgtttttgaagttgtgtttgtttgtgatttgggagtggtatgaatttatagaatttagtttattttgtaggaagtgggagagttttttgggtattttggtgttgaggaagtatagtttaaagaggaaatttttttgaaatttatatagatttttttttagaatgttttggaaggaagtataattttaagagga

SEQ ID NO: 3844 - DNA, 2500 bp, Artificial Sequence
  chemically treated genomic DNA (Homo sapiens)
tttttttgaagttgtgtttttttttagaatattttggaaggaggtttgtgtggattttaaggaaattttttttttaagttgtgtttttttagtattagagtatttggggagtttttttattttttgtagggtgggttgggttttgtgggtttgtgttatttttagattataggtaggtatagttttaaaggtaaaggggtgtaggattaggttatattttggtataggagataatgtttatattatagtttgtgatattaatgattatttattttatagtgggttttaggtattatgtttttatagtaattttaggttttttattttagttttattttttgtgatttttaatgggaaattagtaggagagagaataaattttggttttttattaaagaggattataattaagggaattaaattgtatttatttaaggttgtttttttttagttttgaggggagaggtaattttataaattagtttaagaatttagagattgagttaggtttgttgaagttagagttttattttttttattgtagaaggtttgggtttgtatatttaagatgttttttgttatttttaatttagaggatatttttttttgggtttttttaaatttttttaatttttttttaagtagttagtttagttttgggttttaagatttatttatgtttaaagtagtaattttggttagaaaaaaatgaaagaagggaattttttgtgtgaaataatggattatagatatagttatttttttgttattgttattattttaaaatgaatttttaattgaaaatagttattggattatagatagtttggtgtagagatggttggttaggttgtatttttagatgtttgggttagtaaattttaaagtatttatttagtagttttatatttttttaagaaagtttagttttttttttttttttagttttgggatttaggggttagagatgagggtggttatttttattttgtgttgatgttaggtatttttttttatgaggattttaggtattgagttaagtaaattaaataaaattatttgagtttatttatggtttgtgggtttttttggttagtttgatttttgtgagtatttttaaaataagatttttattagggaagatgattttagtgttttaaaatttttttttgtttttagagttatggttttaattaatagtattattgagtggttttttttggtagatagtggtgttgtaggtttgttgaggtttggtgaggaatgagttaagtagattttgtttgtgttaattttgttagtgtagaagttgtattttagggtagagtgattataaaatgagtttttaggttatgagtattttttagtagaatttgggggtgttaaggttgttagatatagtaggtatgtttgtttgattttatgttggataggtagggtttatggttattttagtttgttgtggggaaggttgtagagaattttagttgtagttggtttttgagaggttaggtagtattttggtattgtagatttattgtttttttaggtatttagtgtgagtgttagttttgaaaataattagttgtggttttaatttattataagttttgagtagtttgagtttgtgttatgagatgggttgagttttgtattttggtttggtggagtttgtagatatgattagttttttgttgtagtgtggttgtaagatgttttttttatggttttgggtagtgtatttgttgtttgatagtgagtagtaaagttttgagataggattgttattaagtgtttatggtgtagggttttttgggggtatttattttgttttttgttaatggtaaggtgaggtagggatttattatgttagattttgttttttttgatttgattttgtgtttgattttgtttaattatataaaaatatttttttttattagtagtttaggttaaggaaagtatagatattttttattatttaaatattgttaatttttggaaatattttggagagtaaatttttagatattagggttttatttttttatgtgaattgggaaaaaataataatatatttttaggttaataaaaataatttttaattaattttttaaatattttttaagatatttttaaatatttatatagtaatgtgttaaggatgtttgtataatgtaaatatttaggatttttgttttttgatgagtttatattggatgaatttttggatggggatgtttatatgtagtatttaatattattgaatggagttagattagaattatgttttttttttatattgtaagggatgtgtataaaatgttaattgtataaatgaggtaataggtaaaagatagaagttaggttatatttagtttgggaggggtaatattggagttagaaatggttagattttaaggaaagggagggtggggaggagagtgatattgaggagttgttttgaataatttggtaggatttttatgggtagagagtt

SEQ ID NO: 3845 - DNA, 2495 bp, Artificial Sequence
  chemically treated genomic DNA (Homo sapiens)
ggttttgttgggtattaattagttgtttgtgtgtggttttgttttttgttattttgttttgatgttttttttttgttgatattattttgttttgatttttgtgtgttttaagtgaattttgaaatttggtagtgttagttatttgattttattttttttaaaattgttttggtttttttaggttatttgtatttttttatgaattttagaatttatttgttatgtaaaaaaaaaaaatttgttagaattttgattgggattgttaaaattatttttaaaaattattgaagttgattttgaaatgtagtatgtaagggtttgggtgtgtaatttgtatgtgagttttagtgtataaaagaaagtgagagttagtaagttgggttagaggggataaaggagagagtggtggtgtatgtgtttaggtttttgttggtttttgagagtttttttttttttagagtgattatagggtgggtaggaggttttttaggatttttggagggtgtgtttttttattaataatgataaagggtgtgatgtagattttttaattttattatatgtgaaaagagtgtttattgttgaaaggattaaataagataagatgttgagtagttgagttgtaaatgtttgtggattgaagtttaaagttagtttatatagatttatttatttgtttattttttgttgtggttttttgtgttttagttattattattgttttatggtgtatggttgatgtgttgttttgtaaagggttaggtgttattttttagtatgtattattttttattggttttgtttttggggtttatgatatatattatttggttatttttattttggagtattataggttaaattagttagtaatttgtggaattaatttatgagtggtgtttatttttggataatggtttagtggaggggttggtttgtagtttatatttattatggttttgttgaatggtgtttgttagattttgtataattgaatttagtttagttttatgaaggttttgtataagttagttttttttttttgttatttgatggaataatagatttataggagaatttatttgtaattttaagttttgagttaaagatgttttaagggatgaatgtgggtgatttgtggaatattgtgatgtatttatgagatagattgtatgtttattgtggtgtttaaagaaattagattgggttgtattagaggtggtgttgtaatttggttgttttttgggaaagaatgtaagtttttagtgtgtgaagtatgaggggttgtagaggaaattgttttggtggttttggttttgggagtaagtatttgttttttgtttatttaagtatattagtgagttttataaatatttaagtggtttatgagatgttttatttttaggttttgttttattttttttgttgttatatagaggttattagaaattatggttttttgggtttgatagttaggtagataggattaggttaggttgtagttgttaatttttgtgttggtaatttttagattttttgtataatgttattgtttagttatttttttttgggttgtttgtttttatggggtttttgtaattaaaaaaaataataatttatttttattttttttttttaatatgttttattaataattgtgtaaatttgtttattttttaggattttattatgatgtaaagtagataaaataattaatttgttttttttttttttggtatatgggtgttttgtagtttttattttttttaatttttgttttatgtttatgagtatgaagttgaattaatttatgttttgttgaagttggattgtgagattgtgtaggtagatgtggttttttttttgagtttgtaaagtagtagaatttatgataatgggttttgtagtaatagggattgattgtgttatgttgtttttgtttatttttatagtgtttaggagtttgtatgttattattgggattattttatagaaaatagaggtttttaggggtaatgtaatttgttttaggataggtagttataaggtagagaaaggagggttggatttgtatttgtgaaattatagttttggggtatggtttttgagatttatagttggggttgaagatttttaggggggttttgttgggtttattgttttttagagtggtttagtttggttgtagggtgttgtttttagtttggtgtattgtggttggaggaggtggaggatggaaagtaagatttaaagatagggagtgtaaggggatagtgatatttgaggattttgaggaggaagtaggagaattatttggaatggttagtttgggttgagtttgggttaatatttgggttgagtttagtttatagagtggtttttgggtttttgtatttgtaggaggttagagttgtttttatttttaaatgttagatgaggtgttagtatttggataggagatgttttgtagttagtttatagatatgagggtgttg

SEQ ID NO: 3846 - DNA, 2495 bp, Artificial Sequence
  chemically treated genomic DNA (Homo sapiens)
tgatatttttatgtttgtgagttgattgtaggatgttttttgtttaggtgttggtattttatttaatatttgaaggtaaaagtagttttggttttttgtaggtgtaaggatttgggagttgttttgtgggttgggtttaatttaggtgttggtttaggtttggtttaggttggttattttggatgatttttttattttttttttggagtttttaagtattattgtttttttgtattttttgtttttgaattttattttttattttttattttttttggttgtagtgtattaagttggaagtagtattttgtagttgggttggattattttggagagtagtgagtttagtagagtttttttagggatttttagttttagttatgagttttagaagttatgttttagggttgtggttttataggtgtaggtttaatttttttttttttgttttgtggttgtttgttttggggtaggttatgttgtttttgggagtttttgttttttgtaaaatggttttagtaatggtatgtaaatttttgagtgttgtaaggatggatagagatagtatggtgtagttagtttttgttattatggaatttattgttatgaattttgttgttttgtaggtttagaagaaaagttatgtttgtttatataattttataatttggttttagtaaagtatgagttaatttaattttatatttgtgaatgtgaagtgggggttggaaggaatgaaggttgtaggatatttatgtattaagaaaaagaaagataaattggttgttttatttattttatattatgatggagttttaaaaagtaaataaatttatatagttattaataagatatattaaaagaaaggagtgagaataagttgttgttttttttaattgtaggggttttatgaaggtaggtagtttagggaggaatgattggatggtgatattgtgtagggggtttggaagttgttagtgtaggggttagtagttgtagtttggtttggttttgtttgtttggttgttaaatttagaagattgtggtttttggtggtttttgtgtgatagtggaggaggtggggtgaggtttggaagtgaagtattttgtgagttatttaagtgtttatgaagtttgttaatgtgtttaaatgaatgagaagtaggtatttgtttttaggattagagttattaaagtaattttttttgtagttttttatattttgtatattggaagtttgtatttttttttagaggatagttggattatagtattgtttttaatgtaatttgatttggtttttttgagtgttgtggtgaatgtgtaatttattttataaatgtattgtagtgttttataaattatttatgtttattttttgagatgtttttaatttggggtttagagttgtaaatgaatttttttatggatttattattttattaaatagtggagagaggggattagtttgtgtagagtttttatagagttgggttaaatttgattatgtaaagtttaatgagtattatttagtaaaattatggtgggtgtgagttgtaggttagtttttttattgggttattatttaggggtaaatattatttgtgggttagttttatgagttattggttgatttgatttgtgatattttaaggtggaagtaattaaataatatgtattatgagttttaagaatgaagttagtggagagtggtatatgttagagggtaatgtttggttttttgtaggatagtatgttagttatgtgttatgggatgatggtggtggttgggatataggaggttatggtaggaaatgggtaggtgggtgggtttatgtaagttggttttagattttaatttataagtatttgtagtttaattatttagtgttttattttatttaatttttttagtaataaatattttttttatatgtagtaaggttaaggagtttatattatattttttattattattaataaagggatatattttttagggattttagggaattttttatttattttgtggttattttagggaaaggaaagtttttagggattgatgggagtttgggtatatgtgttattatttttttttttattttttttagtttggtttgttggtttttatttttttttgtgtattagaatttatgtataagttgtatatttaaatttttgtatgttgtattttagagttaattttagtgatttttgagagtgattttgataattttagttaaaattttagtaggttttttttttttatatgataagtggattttaaaatttataggaaaatgtaaatgatttagaagagttaaagtaattttggaaggagtaaagttgaatggttgatgttattagattttaagatttatttgaaatgtataggaattaagatagggtggtgttgatagaaggaaggtgttagagtagggtgataggaggtagggttatatatagatggttgattgatatttgataaaatt

SEQ ID NO: 3847 - DNA, 2500 bp, Artificial Sequence
  chemically treated genomic DNA (Homo sapiens)
ttgttgtgtttgtgatattttgtttggatagtggtagtaggttttttattggtttttagtttttattgatattgatttttattatagaagttagagtatgttttgaaattgtttaggtttttttttatagttttgtttagagtaatagtttttttagatttatagagttttattttattttttttatttttattttttattgtttgtttttttttaggttttttagttttattggtttttttgtaggtttttaagtataataggtttgagggttattgtgttgattgttttttttgtttggaattggtatggttggtttttttattttttttaagtatttgtttaatgttatttttttagtgaggtttattttgattattttatttgtaattgtaatttttttatttttataattttttattttttttatttttttttgtttttttatgttatttattattttttaatatatttattatggtgtatagtattaattgaataaaatttagtaggggagataggtaataaataagaaaataaaagtatgagtataggaaagtttattttagtagtgagtgttttgatggaaataatattttagggatgggatagagattgtagggtaggttgttttataatggttttagaggagattattgagtagagatttaaatttgtgtttagaggtgttttgaggagtggagttgtggttgggggtgggaaggaaggttattttaggttgtaggaattgtaagggtaaaggttttgaggtgggagttaggtttatgggtagatgtttgaggatatttttggtttttagggttttttagaagttttagttttttgggtttggttgtgtatttttgtgatttttattgtaggtttttttttttatttattagtgtagagtttgggggttgttggtgggttttaggttagggaagtagaaatgggtaatttttagaggtagaaattagttgattttggtggtttggtgggtggttaataaagtttggttggtttttgtgggttgtgtaggagtttattttagggaggtatttagagatatttttggtttggttttgttgggaaagtgggttgagtagggagagggggattagagaggaagagatggatagagttttttggatggtgggttgggtttgaggtttgtggattgtttgaggggggtttttgggtttgaggttgtttgtattgattagtgttgtggtttgggtagtttattgtttttttgggttttagttttttgttttggtagattttgaggtggttttggagattttgggtttggtgaatattgggtggggaggggtgttaattttagttttttgggtggggttttttggtttttgtggttatgttgtagtttaggtggaggtgtgggattttgagttgggattgtttttttgggttttggtgtgattggtggtgggaggtgagagtgggtttggtgggttttgggaggaggtggttttagggaaggtgtggttgtggggaagtggtggtgaatagttttgatgtgaggatggggaaattaaggtggtagttagggagattttgattgaggtgatttttgtttagggtgataattgggttggggttttttgtagtggttattggtttggtggttttgtatttttagtttgttttttttttaataaaagaatttaggaagatggtggggtgggtgggaggtttggtgtgtggtggtttggtttttttattggtggagaggagggagtgtttttttttagatgtgggggaggggaggggttatggttttatgggttgtttattttttttttgtgttttagtgttgggtttaggatttttagtgaggttatttttttggtaaatatttgtgattttttttttttttttgggttttttttattggaatggtgtttttttttatttaggggtttggtttgtttttttttataatttttagtattattggtttttatgttattttttattttattaattatttttttattaatttattagtatttattttgtttgtttatagtgtgtttttttttgtgggaatgtaggttttaggagggtgggagattttgatttgtttattgatgtatttttattaatttaatagattttttttgagggtttttttgagttttgtatggtgttgggtattggggtttttttgggaatttagttgagttttattttagatattttggggttgggaatagtgttgtaaatatatatgatattgttgtgggatgaaggaaataaattagaaatgggggggtttattggttaggtgattttaggttaggttattttggtggttagggttattttagatgatatggtgattatggaaggttttttagattaggtgattttagttaaagttaggaagtgttagaagggaaaagttaggaattatgagggtatgtgtagttttgatttggatttaggtagggagttggggtttgaagagtaaagg

SEQ ID NO: 3848 - DNA, 2500 bp, Artificial Sequence
  chemically treated genomic DNA (Homo sapiens)
tttttattttttagattttagttttttgtttgagtttaggttagagttatatatgtttttatggtttttagttttttttttttagtattttttggttttaattgaagttatttaatttgggaggttttttatgattattatattatttaaggtggttttgattattaaggtggtttgatttaaggttatttgattagtagatttttttatttttggtttgttttttttattttatgatgatgttatatgtgtttatagtattgtttttagttttagaatgtttagggtggggtttagttaagtttttaggagaattttaatatttagtattgtgtagggtttagagaggtttttaggagggatttgttgaattaatggggatatattagtggataaattgaagttttttgtttttttggagtttatatttttatagggggaaatatattgtaggtaaataaaataaatattaataaattaatgaaagaataattagtgaaataagagataatataaggattggtaatgttaagggttatggagaaaaataagttaggtttttggatggggagagatgttattttagtagggggggtttaggaagggggaagagattatagatgtttgttagaggagtggttttattgggggttttgggtttagtattggggtatagggagggggtgggtagtttgtggggttatgatttttttttttttttgtgtttggggaagggtgtttttttttttttattagtaggggggttaggttattgtatattgggttttttgtttgttttattgtttttttggatttttttgttggaggagaggtgggttgggggtgtgggattgttgggttagtggttattgtggggagttttaatttggttgttgttttaaatagaggttattttggttagggtttttttggttgttgttttggtttttttgtttttgtgttggggttgtttgttgttatttttttgtggttatattttttttggggttatttttttttggagtttgttgggtttatttttattttttgttgttgattgtattgaagtttaagagggtgattttagtttgagattttgtgtttttgtttgggttgtaatgtggttgtgggagttgggagattttgtttgggaggttggagttaatgtttttttttgtttagtatttgttaggtttgggatttttgaggttgttttgaggtttgttagggtgggaaattgaggtttgagagggtggtgaattgtttgagttatagtattggttggtgtgggtggttttgaatttagaggttttttttggatggtttgtgggttttggatttagtttattgtttggaaaattttgtttatttttttttttttggtttttttttttttgtttggtttatttttttggtagagttaaattagggatgtttttgggtatttttttagggtgggtttttatatagtttgtgagggttagttaagttttgttggttatttattgggttattggggttggttgatttttgtttttggaaattatttatttttgtttttttggtttgaaatttattggtagtttttaggttttgtattagtgggtggaggaggaggtttgtggtgaaggttgtaggaatgtataattaaatttaagagattggaatttttggaaggttttggaagttggaggtgtttttaaatatttgtttatgaatttggtttttgttttagagtttttgtttttgtagtttttgtagtttagaatggtttttttttttatttttaattgtagttttattttttaggatgtttttggatatagatttgagtttttgtttagtggttttttttgggattattgtaaagtaatttgttttgtagtttttgttttatttttggggtgttatttttattagagtatttattgttagagtaaatttttttatgtttatgtttttatttttttgtttattgtttgttttttttattaaattttatttagttaatattgtatattataataaatgtgttagaagataataagtggtatggaaaaatagaggagggtaagggagatgggaaattgtgggagtagggaggttgtaattgtaaatagagtggttagggtaggttttattgagaaagtaatattggataaatatttgaaggaaatgagggagttagttatgttaattttaggtagagggaatagttagtgtagtggtttttaggtttgttgtgtttgaggatttgtaagaaggttagtgaggttgggaggtttggggaggggtagatagtaggaggtgggggtagaaggggtgggatggggttttgtaaatttgggagggttgttattttagatagggttgtgaggagggatttgagtgattttaaggtatattttggtttttgtggtgagaattaatgttagtggaggttggagattagtgaggagtttgttgttattatttaggtgagatgttataaatgtggtaa

SEQ ID NO: 3849 - DNA, 2433 bp, Artificial Sequence
  chemically treated genomic DNA (Homo sapiens)
atttttagtttagaagggttttgattttagaattgggatgtaagggtggggagtttgagtttttattagtattttgtttttgtatattttttgtttgttttttagttgttataattttgttttgtagtaggtttttttattaatattggatttttgatggggaaggggttagtttggtggttttagaggttattgggttagaatatgtgttttggattttatgtgtgtggaaaatgaatttgtatttgtgatgtggttggtgggggtggatggtagtgagggttggatagtgaatttttattttgtggaggagttggggttggagtttgtatgtgggtttgtgatggttttgttttttgggggtgtttttttagggattttagttttggttggtgggttttgtaggtttgggtttgattgtgtttgttaggttgtttggaggttttggtgagtttggtggaggtggtggtttttttttgtttgatggttatgtttgtgtggattggttgttttttgatggtggggtggggtgggatgggttggggtagagtttgtggttaggtgaggtgttttgttttttggtggttttaggtgtggttgtgggattttggattgtggtggggttggggttagggttggggttggggttggggtgttatggttgagttttagttgaattgtttggatgaggtgtatgtgaatgagaaggtgattgaggtgtaggttgttttttattattgtgagtggtggtgggttgtgttggaggtgttgttgggtggtggtgagtaggtttattgtgagtggtttaaggaggagtagttgtgggattttttttttagtttggagtgttaggttttgtgggttgtttggagtttttatgaggatgttgtttttgttgttaatgtttggggtaagagtaaggttaaggttaaggtttttgtgttggtgttggttgagtttggtgagtttttggtttattggtttgattgttttgatattgaggtgttttttttggatttgggttggatggatattggtttttattgtggtgtgagttgggttatgttttttatttatttgtttaaggatgagaaggtgttgtattttaagtaggtggttaggtagatgatttaataggtttagaaggtaggtttttgtttttgtttttatattgttgggattttggttttagttttttggattgggttttattttttaggtagggtttggggtaggttgttttgagtattttttggaaaatgggttttaatttgtttttattttttggggttgtagtgaggtttgtagagtgaatggttgggaatgtgtttggtaaattataaggtgttggatagatgttagttgttggtattttagtgtttagaggtattggttttgttttgtatttttgaaatttttttgtttagtttttttttttagggaagattgggggttgaggttttgtggttaaaatgtattatttaaaggttttgatgataatttatgtgttgtttagaatatattttgagttgtttttttatgtgattgttaaaataattttagggagtgggtggtggtgatttttttggttttatttttgttatgttgttttttggattatttttttttttttatagttaaagttgagttggtgtttttatagttatagttttttttgggttgggtattaggttttagttgtttggaatgaatgggggatggggtatattgaggatttattgtgtgtttggttttgtgttgggtgttttggtatagtaggttatttgatttggtagtttaggaaagggtttttatttagtatatgtgttttgtttgagagttggaaggaggggttgtttttagggtggttggtgaggttagtttattgtggaataggtggaagattttaatttttatgtttttgggtgggagttttgggtagtttttagattaaatgtaggatgttttattatatttgaatttttaataaataatatataattttttagtattagtttattttaaatatgatatgagatgtattgatattgaaaaattttttgttgtgtatttgaaatttaaattgaatgggaatgttttgtatttttatttgttaattttggttgttttatattgagatttgttaagaaatagtagtagtttttggtgtttaatttagaataatataataggagtggtttgggtttattatttaaattttatttagtgagtgaggttggagttttggttttttttgaggttgaagaggtttgaggagggaaaatagagttagaaagattagtgtttaggtttatttttttggaaggggtgatttaggtagttggggtgatttagatagttggttatattggttattagaaggaagggttaattttttattgtgtatatttttattttttttttttataattt

SEQ ID NO: 3850 - DNA, 2433 bp, Artificial Sequence
  chemically treated genomic DNA (Homo sapiens)
gaattatagagagggagggtagaaatgtgtgtagtggaaagttaatttttttttttggtagttaatgtagttaattatttagattattttaattatttaaattattttttttaggaagatgagtttgagtattggtttttttagttttattttttttttttaggtttttttagttttgaggggaattaggattttaattttatttattgagtggaatttgagtggtgaatttaagttatttttgttgtattattttgaattgggtattaaaagttgttgttgttttttaataaattttagtgtagggtagttagagttagtaaataaaagtataaaatgtttttatttaatttgaattttagatatataatgaagaattttttagtattagtatgttttatgttatgtttgggataagttgatattaaaaagttatgtgttgtttattgaaagtttaaatgtagtggggtattttatatttgatttggaagttgtttaggatttttatttaaaggtataaagattaaagttttttatttgttttatagtggattggttttattagttattttggaaatagtttttttttttaatttttaagtaggatatatatgttaagtaggagtttttttttgagttgttgagttaggtgatttgttgtgttaaggtgtttagtatagggttaggtatatagtaggtttttaatatattttgttttttatttattttaggtagttggggtttagtatttggtttaggagaggttgtgattgtgagggtgttagtttagttttgattatgggaggagaggggtggtttaaggagtagtatggtagaggtgggattgggaaggttattgttatttattttttgaagttgttttgatgattatatgagaaagtggtttgggatatgttttgggtagtatgtaggttattattaagatttttgagtggtgtattttaattatagggttttggtttttagttttttttggggaggaaggttggatagggaagttttagaagtatagagtagagttagtgtttttgaatgttggaatattgatggttgatatttgtttagtattttgtaatttgttaaatatgtttttagttatttgttttataggttttattgtagttttaggaagtaggggtgggttggggtttattttttagagggtgtttagggtggtttgttttgggttttgtttgggaggtggggtttggtttaggggattggggttgaggttttagtggtgtgggggtgaaggtgggggtttattttttgggtttgttggattatttgtttgattatttgtttgaggtgtggtgtttttttgtttttgggtgggtgggtgaagagtgtgatttggtttatgttgtggtagaaattagtgtttgtttagtttaggtttagaggaggtattttggtgttggaatggttgggttagtaggttagggatttgttggatttagttggtgttggtgtgggggttttggttttggttttgtttttgttttgggtgttggtggtggggatggtgtttttgtaggggttttaggtggtttgtagggtttggtgttttgggttggagaggaagttttgtagttgtttttttttgagttgtttgtggtaggtttgtttgttgttgtttagtagtgtttttagtgtggtttgttgttgtttgtagtagtagaaggtggtttgtgttttggttatttttttgtttatgtgtgttttgtttaggtagtttagttgggatttggttatggtgttttggttttggttttggttttggttttggttttgttgtggtttgaggttttatagttgtatttggagttgttgaggggtggggtgttttatttggttgtgagttttgttttggtttgttttgttttgttttgttgttggggagtggttaatttgtgtgggtgtggttgttgggtggggaggggttgttgtttttgttgggtttgttgggatttttgggtggtttggtggatgtggttgggtttgggtttgtagggtttattagttggggttagagtttttgaggggatgtttttagggggtggggttgttgtagatttatgtgtgggttttggttttgatttttttgtggggtaaaggtttgttgtttggtttttgttgttatttgtttttgttggttgtgttgtgggtatgagtttattttttgtgtatgtggagtttggagtatgtgttttggtttagtggtttttggggttgttgagttgattttttttttgttgagggtttggtgttggtgggggggtttgttgtaggatgggattgtgatggttgaggagtgggtagggggtgtgtaaaagtgaaatgttaatgagagtttgagttttttatttttgtgttttagttttgagattagagtttttttgggttgggagt

SEQ ID NO: 3851 - DNA, 2339 bp, Artificial Sequence
  chemically treated genomic DNA (Homo sapiens)
ataggtgaataaaaaaattaaatagtgtggggaaaaaatagatttgtatataaatttttatagtagtgttatttataatttttaaagtataaatagtttaagtgtttgtatgttgatgaatggataagtaaattgtggaagttttatgtaatgtagtgttgtttagttatggggagatgtgaagttttgatatttgatatagttaatgtgttgtaaattattgtattaggtgtgggaagttaggtataagaggattggtatggtatgattttatttataggaaatgtttagaatgggtagttttatatatttaaagttaattagtgttgttaggggttgggggaagaggaaggaggagggattgttgatgggaatgggtgttttttggaggtgattgaaagattttaaaattgattgtgatgatggttatatagttttgagaatgtattaaaaattagtgaattgtgtgttttagatgggtgaatttttttgtgttaatgatattttagtaaggttggaaggatatagatttggttagtgaggagggtttgggttttgttaaagtgggtagagtttgtggggtttattggtttagttttagtttttttgtgtagttttggggtttggttttttttgttgtattttataagttgttttttttttttagttggggttttaggtttgtttttttttgggttgagtattatttttgttagaggaaggttaaagtatttggattttaatattttaaggatttttgtaggttttttttgggatttattttttagtgagtgttgttgtgtgtatttttgggtttgagggttgggtattttttaggtatgtaaggggttttttgtgtagggttgtgagtaatgtgggggtagttggttgtagtttttagttttggggtttgttggtatttttattagtttttagtttgggtattttatttaaggaatttggtttttagagtttggggtattgattaatatttatataggtagtagagagttgttgaattttgaatgtgaggtagggaagaaagttgaagtatttgttatttataaattaaaatgaatttattttttttttaaggatagttgttgtaataggttgtagttaataggttttatggtgtgatttttgtgtaggaagttattgtttatattgggtgtggaagtatttgtaatttttaggggatttgttgttttatagaatttgatggaaagtttgaggaaggttgagttttgggggttataggttggatgttggagttgttttatgggtggtgtttgagggagttttgggaggagttgttagtttaggtagtgggtggagatgggttttgttttttgtttttattagttttgtttagtttttgggttatttattatagttttgttagagtaggtagatgtgtagatgttaaggtagatgtgtagatgttaagttgtatttgtttattaaatttatgtttttgttataatgtagttgttgagtaaatgttttttatggattaaaaatataagtagagatggttgggtgtggtggtttatgtttgtaattttagtattttgggaggttgaggtgggtgggttatgaggttaggagattgagattattttggttaatatggtgaaattttgtttttattaaaaatattaaaaaattagttaggtgtggtgggggtgtttgtagttttagttatttgggaggttgaggtaggagaatggtgtgaatttgggaggtggaggttgtagtgagttaagattatattattgtattttagtttgggtgatggagtgagattttgttttaaaaaaaaaaaaaaaaaaaaaaaaatatatatatatatatatatatatatatgtagagatatgaatgttgatttttatgatgtttatttatttatgaaattaatggtttatttgttagaaatttagtttttgggttgatattaaatttaattgttggttttttttgttgaatggaggggttgggagaagttgtttttagttggtagttttagatttgtgtttatttggtaggtttttatttaggtggggataggttattaggtgggagttattggggtattgttggggtttaggatatttgtaggatgagtgaaggaggaggagagggaggaagatagagaggattattttggttattttgattttgttttttggttatgtttgggtttttagaggtaggagttggggggttgtagggttgggggttataatgattttttagttgttgttattttttttggtaatgaattttaaagtttttatttttttattgtgggtgttagatataggtttggtgtaggt

SEQ ID NO: 3852 - DNA, 2339 bp, Artificial Sequence
  chemically treated genomic DNA (Homo sapiens)
atttgtattaggtttgtgtttggtatttgtggtggggaggtgggggttttggggtttattgttagggagggtgatagtagttggagagttgttgtggtttttagttttgtagttttttagtttttgtttttgagaatttaggtatggttaggaggtaaggttagagtggttgaggtggttttttttgttttttttttttttttttttttttatttattttgtaagtgttttgagttttagtagtgttttagtgatttttgtttggtggtttgtttttatttgggtgggggtttgttaggtagatataggtttgaggttgttagttggaggtggttttttttagtttttttatttagtaggaaaagttaatagttgggtttggtgttaatttagggattgaatttttggtaggtaagttattggttttatgaataaataagtattataagaattggtatttatgtttttatatatatatatatatatatatatatatatttttttttttttttttttttttttgaggtggagttttgttttgttgtttaggttggagtgtagtggtgtgattttggtttattgtaatttttgttttttgggtttatgttatttttttgttttagttttttgagtagttgggattataggtgtttttattatgtttggttaattttttggtatttttagtagagatggggttttattgtgttagttaggatggttttgattttttgattttgtgatttgtttgttttggttttttaaagtgttgggattataggtgtgagttattgtgtttggttatttttgtttatatttttaatttatggagagtatttatttgataattatgttgtagtgaggatgtgagtttagtgagtaagtgtggtttggtatttgtatgtttgttttggtatttgtatgtttgtttgttttggtggggttgtggtgggtgatttgggagttgggtggagttggtgaaggtagaaggtagagtttgtttttatttattgtttgggttgatggttttttttagggtttttttgggtattatttatggagtagttttggtatttggtttgtgatttttgaagtttggttttttttgagttttttgttgggttttgtggagtagtaggttttttgggggttataaatgtttttatatttggtgtgagtagtggttttttgtgtagaaattatattatgggatttgttggttgtggtttattatagtggttgtttttagaggaagagtaaatttattttgatttatagatagtagatgttttaatttttttttttgttttgtgtttagggtttagtagttttttgttgtttgtgtgaatattaattagtgttttggattttgggagttgggttttttgggtggggtgtttaggttgggggttggtggggatgttagtaggttttggggttggagattgtggttggttgtttttatgttgtttatagttttgtatggagagttttttgtatatttgggagatgtttagtttttaggtttaggggtgtgtatggtagtgtttattgagaagtggattttggaagaggtttgtaagggtttttggggtgttggggtttaggtgttttgatttttttttggtaaaggtgatgtttagtttagagaggagtaggtttggggttttggttggggagagggggtagtttgtggggtgtggtagaagaagttaggttttagggttgtatagagaggttggggttgagttaatggattttatagattttgtttattttagtaaggtttaggttttttttgttgattaggtttgtgtttttttagttttattgagatattattggtatgagaaaatttatttatttaaggtatataatttattggtttttagtatatttttagagttgtgtaattattattatagttaattttggaattttttaattatttttaaaggatatttgtttttattagtagtttttttttttttttttttttttagtttttggtaatattgattggttttgagtgtgtggagttgtttgttttggatattttttgtgagtggaattatattgtattggtttttttgtatttgattttttatatttggtgtaatggtttatagtgtgttggttgtattaggtgttagagttttatgtttttttgtggttgaatgatattgtgttgtatggggtttttatagtttgtttgtttatttattagtgtatgagtatttgggttgtttatattttggggattgtgaatagtgttgttgtgaagatttatgtataagtttgttttttttttatattgtttaatttttttatttatttgt

SEQ ID NO: 3853 - DNA, 2444 bp, Artificial Sequence
  chemically treated genomic DNA (Homo sapiens)
atttttatttgaaaaagttttgattagtttatttttttgaattaattagaagatataaagtagagtttatttttttggaaatgggttttttatttttttttttttttttttttttttagtttggaaattttttttttttatttttgtttgttttaggttttattggttatgattgttttttattgttgggttttagtttttttttttttttataaattttttttttttttagatgaaaagattaatattgaaaaggtaagttgatgtgttttggtttgtatagagttttggaagtagagttgggatttgaattttgggtttttgattttttgtttagggttttttattttggtagagtaggagattaattttttttttttttttttttttaaatgaagtttttatatatagttatttatatatgtataagtagtttttaaggttagagaagttaattttaaattttagagttgtggaggttttatagattatatggagttttagttagtgattaaatttgaggtaatagtatttggaggtttagttttagtattgaggggagttggagggaaaaattaagttaagagtaaaatttttttgttttgaaaataatagtggtataatataatatttttggattgtgggaaataaaatggagagggatatgattagaaggaaatttttagaattttattaattttatgttttttaaattggtataattggtgataattttagagttatttgttattgtattaaagtttgatagagaaggatgatttataggagtagttttgttgtgtttgaggattgtttgatatttgaaatgagttttggattagtttttggttgaagtttatttaggttttttttgtgaaggttaagttattagagttaattattatttttgttttattttgtttaaatattgttgttggggttgataattgtatttagtgaatatttgtattggaatttggagtatttatttttttttatttgtagtttgaggaattttgattttttggtgatttttagaagtttttggatgtagttgtttgtgaggtggatttgtttgttgttggttttggggttggatgatatgtttggagttttagggaggttgtgaggagtttgttttttggttaggaagtgattgttgtttgtgttgtggtttttaaggataatttttgggtggtaattatttttttttatttaggagattaatttttttgttgaggttttatttaaggttgtagtatttatttattgaggtttttaagaaatttgtttgttttaggaaattttttattgagatttgttttgtattgttatttggtggtaagatataaaaatatattttttatggtgggattagattgtgtgtttgttttgtttttattttgttttttttttggtggtggggtagagggatggtggaaagggaattaagagttagtttttagaagtgtaggtatttgggattgagattggagtggggttatatttttttttttgtttttagtattagttatagttttgttattgtgtttttagttttttttttttttgtagatattggttatttgtgaaattaattgtattttttttttgtattgttttttaggatatttggaattagtgtatagtttattgttagtaattggatagaattgtatggtaggaatttagaagaggagtttaatttttgagtttatatttttttttttgggttttatttttttattttattttatatttagttttttgatgatgtttaggatatttttttagttattttaatttttttttttgtaagggataggagggataaagtaaggttatatatttagaaagagtttgtttattttttgtaagttttagtttttttttttataaagtgggtataagaatttttgttttggagggttttgtgtgtgttttaggagatgttggattaatattagtgtttattttattttttatttttttattttttaggttttttgttagttatgtgatgtaggttaggatgtaaaggagattaatagtatagattattttttttttagtgttatttgtgttttgtaggtttagtgggtgtttttattagagttttgtattttgagtttagtttttatttgttttttggaagatgttggttttagaattttttgttttttttttgtaggtattgtggtatttatagttgatttgtagagagtttagatgtattttataaataaggaatgtattgttttgtaggatggttgtggtgtggttgtgtgggggtgggtaggttggagtagataggaattatgagaggtagggaggattgtataggggttgttgattaggtggaagatgatgggagttttagaaggtgttgtgggatagggttagggagagggttttatgtggttaggatttggatgtagattgtt

SEQ ID NO: 3854 - DNA, 2444 bp, Artificial Sequence
  chemically treated genomic DNA (Homo sapiens)
aataatttgtatttagattttggttgtatagagttttttttttgattttgttttatgatattttttgaggtttttattattttttatttggttagtaatttttgtatagttttttttgttttttgtggtttttgtttattttagtttgtttatttttatatagttatgttatagttgttttgtagaatagtatattttttatttatgagatgtatttgggttttttgtaaattagttgtgaatgttataatgtttgtaggagggaggtagagaattttggagttaatattttttagaaggtaggtagggattgggtttagggtataaggttttagtaggggtatttattgggtttgtagagtataaatggtattggggaaaaagtgatttgtgttgttgattttttttgtattttagtttgtattatataattggtagagagtttggaggatggggaggtgggaaatagggtggatattaatattaatttagtattttttgaaatatatataaaattttttaaggtagggatttttgtgtttattttataggggaggaaattgagatttgtagaaggtaggtaagttttttttgaatgtataattttgttttgttttttttgttttttataaagaggagagttaaggtggttggaaggatgttttgaatattattagaaaattaaatataaaataaggtaggaaaatgaggtttaggggaaggaatgtggatttagagattaagttttttttttaaatttttgttatgtgattttatttagttgttaatagtgaattgtatgttggttttaggtgttttggaagataatgtaaagagggaatataattagttttataagtggttaatgtttgtaaagaggaaagaaattagaggtatagtgatagagttatggttggtattgaaaatagagaaggaggtgtagttttattttaattttaattttagatatttatatttttgggaattagtttttggttttttttttattatttttttattttattattggggagagggtggggtgggggtggagtaggtgtgtaatttgattttattgtggagggtgtgtttttatattttattattaggtggtagtgtggggtaggttttagtaggaggttttttaggataggtaggttttttaggaattttagtgagtgagtgttatagttttaggtggaattttaataaagaaattgattttttgggtggaggaagatggttgttgtttaggggttgtttttaagggttgtgatgtagatagtggttattttttggttgaggggtaggttttttgtggtttttttgggattttgggtgtgttgtttagttttgaggttggtgatgggtagatttgttttatggatagttgtgtttagaggtttttggaaattattaaaggattagaattttttaggttgtaggtggagggaggtagatgttttggattttagtatagatgtttattggatatagttattaattttgatgatggtatttgaatagggtggggtaagagtggtggttgattttgatagtttagtttttgtgaaaggggtttaggtggattttagttaagaattgatttgaagtttattttaagtgttaaataatttttaagtatagtaaggttgtttttgtgggttatttttttttgttaaattttgatgtgatgataggtgattttgagattgttattagttgtattaatttgaggaatgtggaattagtagaattttagaagtttttttttaattatgtttttttttattttattttttatagtttaggagtattgtgttatgttattattatttttagaatgggaagattttatttttggtttaatttttttttttaattttttttagtgttaaggttgagtttttagatgttgttattttagatttaattattagttgaaattttatataatttgtagagtttttatagttttaaaatttggaattaatttttttggttttaagagttgtttgtatatatgtggatagttatgtataaaagttttatttaaaaaaaaagaaagagaagaaattgattttttgttttgttagaatgaagagttttggatagagaattaggagtttagaatttaaattttagttttgtttttagggttttgtgtaaattggagtatattaatttgtttttttagtgttggtttttttatttgagaaagggggagatttatggagggaggaggagattgagatttagtaatggaggatgattatggttaatgaagtttgggataggtagaagtggagagaaagaatttttaaattagaggagaaaaaaaaaaagagggggtaaagggtttatttttaggaaggtgagttttgttttgtgttttttggttggtttgggggagtaaattagttaggatttttttaaatggaaat

SEQ ID NO: 3855 - DNA, 2414 bp, Artificial Sequence
  chemically treated genomic DNA (Homo sapiens)
ttagttttattttggttatttgtaggattttgagttgtagaggattaatttagttggtgtgtagggggtgtggtttgtgttttattgtaggtattttttttgttttttttgtagtattgatgataggttggttgtgttgggtattgagaatgtattggttttgtttttgtagggtttatagattagggagggaggaagattataaataaatgaagtgagtaaggtattgtgtatgtattttattagtgtttatagagtttatgttttgagttaggtattagtttagtaaataaatattgttaatgtgttttagatatttgttttattttttagttttaatttttgttatttatgaagttttataataggtttagggggtggtttttttgtaattttattttataggagaggaaatagaggtttagagaggttaagttttttgttatgttgttaggtagtgatggagtttgtatttataattggtatgttgttttttgttggatgttaggggggtttttaggggttgaagtttatgtggtttttgttttttggagtttaggttagtggggtttggaagaagaggggtagggtttttttatttgttatagtgaattttaggtgggtgagattagggaaggttttttggaggaggtgatgtttgagttgggatttgaaggttaggaaggaattaattaggtttagagggagagagaatttattttttttatttatgttatttattttttgatattttttttaggaagttttttttgtttttttttagatggagtttttatattatagttgtattatttttgtttgtgtttgagtttttattagattgtggaatttttaaaaggtagtgtagggggttggtttttttgtgtttttagtattatttagttttgggtatgggaattagaggttgagggatggtaggttgtgtgggttgaggtgggagggtggtatagttgaggggtttgtttgttatattggttttaggtgtatagggtgagatatttaggaattttgttgtttaggagaattttaggttaatgatttgttggtttttgattagtttttgatgttgttttgtgttaggtagtgtgttaggtagatgattttttttttgattttaggagaggttggagtaagtgtgtttttagttaggatgtgtaaatggtatgtagtggaggaagttagggagtatgaattgttgggatttagttgtttgttttggaagagggtattttttttttttgtttatgttaattttatttttagtttgtatttagaattttattgttgtttattggttgggtagatagaggttgttttgtttggttgttaatatgaaatggtattttgtttgaggtgtttttttttttttgtttttttttgtttttaaatttagagtaaaggtagtatgagttatgatttattgatatggtgagggataagtatgttttgttagggaggggttttgtgtggtttgaattggggattgtagtaaatgattgtgtagtggggatttaagtttttgatggtgttagaaaaatataataataatagaaataaatattaaatttataaaagtttagtgtagaaggtttagagtttaagagtgtttatgtatgtaggttggttagttgggggattttgggtaagatatttttgaggataaagatatttttttttaattttagtttttttatttgtaaaatggataggataatatttatatttattttataggattattgtgttgataaataagtgagtattatatgtttagtatttattaaggtttagatgtaataaatggtaagttgtattgttattatttagatgtttatgaaagtttttgtgtttgttattagttaattatggtgatttgaaatgagttttggaaatttaggatggtaaggaatgggtttagtttgtgttttggtgtattattaagatttttataaatggtatgggaaaattatttttgaagatttatgattataagttagtttttaaataagtttatagggataattgatatttttagttttgtgtgtaaaaattttaggttgagaatttagatgaaaatggttttttttagattttttataaataaatgtaaatttttttggagtaattaaggtgatattttaattataggagtattttatagttgagagttattaaatatatgaggaaatagggtattatgagtaagaattagtataaattttatttagttgaattagatttatagagtttttagatagtagaattattagatgaggaatgtaaaataagtttgtttattataattaaagatataaaaaagaggagagtttaaaatatgagttgggaataagagattttaaaaatggattaggtatggtggtttatgttagtaa

SEQ ID NO: 3856 - DNA, 2414 bp, Artificial Sequence
  chemically treated genomic DNA (Homo sapiens)
ttattggtgtgagttattatgtttggtttatttttagaattttttgtttttaatttatattttgaattttttttttttttgtgtttttaattgtagtaaatagatttattttatattttttatttgataattttgttatttggggattttgtggatttgatttagttaggtgaggtttgtgttggtttttatttatggtgttttgtttttttgtgtgtttagtgatttttagttgtaagatgtttttgtggttggaatgttattttaattgttttagggggatttgtatttgtttgtgagaagtttagagaaagttatttttatttaaatttttagtttgaggtttttgtatatagaattggaagtgttaattgtttttatgaatttgtttgagggttggtttgtggttataaatttttaggggtaatttttttatgttatttatgaaagttttggtaatatattagggtataaattagatttattttttgttattttaggtttttaaggtttattttaggttattatggttagttggtgatagatatagaggtttttatgagtatttgaatgatggtagtatggtttattatttattgtatttgaattttagtgggtgttgggtatatgatatttatttatttgttagtataataattttatgaagtaggtataagtattattttgtttattttatagatgaagaaattgaagttaaaaagggatatttttatttttaaggatattttgtttaagattttttagttggttggtttgtgtatatgggtgtttttggattttgggttttttgtattgagtttttgtgggtttggtgtttatttttgttattgttatatttttttggtattattaggggtttgagtttttgttgtgtgattgtttgttgtagtttttggtttagattgtataaagtttttttttggtggagtatgtttgttttttattgtgttgatgagttgtgatttatgttatttttgttttgaatttagaggtagggaaaggtgagggaggaggaatattttgagtaaaatgttattttgtgttggtagttaggtaaggtagtttttgtttgtttaattgatagatagtggtggagttttgggtataagttaaggataaagttaatatgggtaggggggaaaaatgtttttttttagaatagatagttgggttttagtaatttatgttttttggttttttttattgtatgttatttgtatgttttggttggagatatgtttattttagttttttttggggttaaagagggggttatttgtttggtgtgttgtttgatatagagtaatattaggggttaattaggggttggtaggttattggtttaaaatttttttgagtagtagggtttttgagtgttttattttgtgtatttggagttagtgtgataaatgggttttttggttatgttgtttttttattttagtttatatagtttgttgttttttagtttttgatttttgtgtttggggttgggtggtgttggggatatagaggagttagttttttgtattgttttttgggagttttatagtttggtgggaatttgggtatagatagagatagtgtagttgtagtgtgggagttttgtttggaagagggtaaggagggttttttggagggggtgttaaagaataggtagtatgagtagaaggagtagattttttttttttttgaatttggttaatttttttttgatttttagattttggtttaaatattattttttttaggaagttttttttgattttatttatttggaatttattgtaatagatggaagggttttgtttttttttttttaggttttattagtttgagttttaggaggtagggattatatgagttttagtttttggagatttttttagtatttagtaggaggtagtatattgattatgggtgtaggttttgttattgtttaatagtatggtaaggagtttagtttttttgggtttttgtttttttttttgtaagatggggttataagagggttattttttaggtttattgtgagattttatgggtaatagaggttgaggttggaggataaggtaagtgtttgaaatatgttagtgatgtttatttattagattagtgtttggtttagagtatgggttttgtagatattggtagaatatatgtatggtgttttgtttattttatttatttatgatttttttttttttttggtttgtgggttttgtgagagtagggttggtgtatttttggtgtttagtatagttggtttgttattagtgttgtgggagggataggaggggtatttgtagtgaggtataggttatgttttttgtatgttgattgggttaattttttatggtttagggttttgtaggtgattaaggtggagttgg

SEQ ID NO: 3857 - DNA, 3544 bp, Artificial Sequence
  chemically treated genomic DNA (Homo sapiens)
tttagtaattttttttatatgtttttttattaggtttaagatgaaagtttttgttttagtgttttttttttttttttttttattttttttttttttatttatgaagattttagggttttgtgagggttggagttttttatgtatttttatattaagatagttgttaggatttgtttaataggaagtttttttttattagagtttagttttattttagggaatttattttttttttggaaaaaggaaaattgaagttagatgttttttgggattgttatttgaggtgggtgtggttattaggatgtttagagagtttagtgtggtgaggaaagtgatgaatttaggagttttggtttgggtttagttattttttattatttatttgatttttattaagttttttgatttttttaggttttagttttgatattaataagatgaattaatagttgggtatggtttgtgtttgtaattttagtattttgggaggttgatgtgggtgtatttgtttgagtttaggagttttagattagtttgggtaatatggtaaaattttattttgttaggtgtggtggtttatgtttgtaattttagtattttgggatgttaaggtgggtggattatttgaggttgtgagtttgaaattagtttggttaatatggtgaaattttattttttttaaaaatataaaaattagttgagtgtggtggtgtatatttgtaattttagttatttgggaggttgaggtaggagaattatttgaatttgggaggtggaggttataatgtgttaagattatgttattttattttagtttgggtaatatagaatgttttaaaaataataaataaataaatataagaattatttgttttgggaagtgtagttttttttagtttatttaggttaggagtaaagttagtttattaatttttgttagtgtttttttttttagaaattttttttttaataaaagatgagattttttttttttttttaaaaggatgatttgtgttttgtgttttgtttgtttgttttgtttataaaattgatgaaagttttattgtaaggtaaagttaatgttttttttttattttttaagaatttagaaatggaaatataattttgtatttagagagttaaaatagaaaataagtaatagatttaagtggagatatgtagattatataagagattggattttttaggatttagttttgttgttaaatttattaagggtattaatatatttaaggaaaaggttgggtatggtggtttgtaatttttgggaggttgaggtgggtggattatttgaggttaggagtgtaagattagtttagttaatatggtaaaattttgtttttattaataatataaaaattagttgggtgtggtggtgtatgtttgtaattttagttattttagaggttgaggtaggaggtttttttgaatttaggaggtggaggttgtagtaaattaagatggtgttattgtattttagtttgggtaataagagtgaaattttgttttaaaaaaaaaaaaaatatatttaaggaaaaaggtgggttagtttaggatgttaagtaaagggagagttgagatttataaattggaataatttgaataatgagtggattagttgaggttaggagtttaagattaatttggttaatatggtgaaattttatttattgaaaatataaaaaattagttaggtatggtggtgtgtatttgtagttttagttatttgggaggttgaggtatgagaattgtttgaatttgggaggtggaggttgtagtgaggtaagattatattattatattttagtttgggtgatagaaattttgttaaaaaaaaaaaagaagaagaagaaagaaaagaaaagaggagaattttttgatgaagtataagtgtttggtttgaatgataatagtattttgatttttttgtttatatatttattttttatgaatttgtttagtgtgtattgattttgtggagttttattatttttgggtttataaatagtaaattttggagtgtataaaagtttatagaatatgttaataaaattaaaatattgttattatgtgggtttttttataagtttaattgttagtttttaaggtatttgtgtatttgattaatatgtaaatgaatgagtagatttttttggatataatgtggagaagattttattaaaggttattttttttaagttattgataatttttaattagtttaaatttgtttgagtttattatataaaatatttaaggattttgtttatttttataatattttattttttttagtttaataaaaatatttttaggaaagttttttttaataaatttattgaaataaaattttagtagtatttgagtatttagggttgttttttttgaaagattttttttttattaatatggagtttggtgttagtttattttagagtatttaattttagttattttttgtttttggttaaaatgtaagatttaaaaattagatttttttgatgatgttttttttttttggattttttttatttttttttattttattttttttaaatttttttttttaaaattaaatttttttttttttttttttttttttttttttttttttttgagatggagttttgttttgttatttaggttgaagagtaatggtggtatttttgtttattgtaagtttttttttttgggtttaagtgatttttttgttttagttttttgagtagttgattataggtgtgtattattatgttagttaattttttttttttttgagatagttttattttgttatttaggttagagtgtaatgatataatttttgtttattgtaatttttattttttaggtttaagtaatttttttgttttagttttttaagtagttagaagtataggtatgtgttattgtgtttagttaatttttgtatttttagtagagatagggttttattatgttggttaggatggttttgattttgattttgtgatttgtttgttttagttttttgagtgttgagattataggtatgagttattttgtttggttaatagttaatttttgtatttttagtagagatggaattttgttatgttgattaggttggttttaaatttttggttttaagtgatttattagttttagttttttaaagtgttgggattataggtatgagttaatgtatttggttttttttttttttttaatttttttatattttttttttttgtgtgtaaaataagtttttttattttaaaaagaaatttgtggtttttgtggttttttttagttattttgatgtttttttttttaaattatatttagagtttttaattagttaaatttggttttaatttattatttgtattttatttttttttttttttttttttttttttttttttttttgtgtgtgtgtgttttttgagataatatttaattttgttatttaggttggagtgtagtggtgtgattttggtttagtgtaatttttgttttttaggtttaagtgtttttttgt

SEQ ID NO: 3858 - DNA, 3544 bp, Artificial Sequence
  chemically treated genomic DNA (Homo sapiens)
gtaggagaatatttgaatttgggaagtagagattgtattgagttaagattgtattattgtattttagtttgggtgatagagttagatgttgttttaaaaaatatatatatataaaaaaaaaaagaaagaaaggaaaagagaaagaaaaatgaaatataggtgatgaattggagttaggtttggttgattaaaggttttgagtgtgatttgagaaaaagaatattgagatagttggagggaattataggggttataggtttttttttaggatggagagatttgttttgtatatagaaggaagaagtgtggagaggttaaaaagagaggggaggttaggtgtattggtttatgtttataattttagtattttgggaggttaaggttggtggattatttgaggttaggagtttgaaattagtttggttaatatggtgaaattttatttttattaaaaatataaaaattagttgttggttgggtgaggtggtttatgtttgtaattttagtatttgggaggttgaggtaggtggattatgaggttgagattgagattattttggttaatatggtgaaattttgtttttattaaaaatataaaaattagttgggtgtgatggtgtatgtttgtatttttagttatttgggaggttgaggtaggagaattgtttgaatttgggaggtggaggttgtagtgagtagagattgtgttattgtattttagtttgagtgatagagtgagattgttttaaaaaaaaaaaaaattagttggtatggtggtgtgtatttgtaattagttatttgggaggttgaggtgggagaattatttgaatttagggggaggagtttgtagtgagtagagatattgttattgttttttagtttggatgatagagtgagattttgttttaaaaaaaaaaaaaaaaaaaaaagaaaaaagaaaaaaaaatttgattttaaggaaggaagtttggagagagtgaaatggaaaggagtagaaagagtttaaaagaagggagtattattaaaaaaatttgatttttgggttttgtattttggttagaagtaaaggataattgaggttaggtattttgagatggattgatattaggttttgtgttggtaggggagggattttttgaggagagtagttttaggtgtttaaatattgttagagttttattttagtgagtttattggagagaatttttttgaggatgtttttgttgggttgagggagatggggtattgtgggagtgggtaggatttttgggtgttttatgtggtgagtttagatgggtttgagttggttaaaggttattagtggtttggggaaagtgatttttggtagagttttttttatattgtatttaagagagtttgtttgtttatttatatattgattggatatataaatgttttggggattgatagttaagtttgtggaaaggtttatatggtggtagtattttagttttgttagtatattttgtaggtttttatatgttttgaagtttattgtttgtagatttagaagtgataggattttgtaggattaatatatattgaataaatttataagggatagatgtgtaaataagaaagttagaatgttgttattatttggattagatatttatgttttattaggaaatttttttttttttttttttttttttttttttttttttttttttgatagaatttttgttgtttaggttggagtgtagtggtatgattttgttttattgtaatttttattttttaggtttaagtgatttttgtgttttagttttttgagtagttgggattatagatgtatattattatgtttggttaattttttgtatttttagtaaatggggttttattatgttggttaggttagttttgaatttttgattttagttgatttatttgttatttaagttattttagtttgtgggttttaattttttttttgtttggtattttggattgatttatttttttttttagatatgttttttttttttttgaggtagagttttgtttttgttgtttaggttggagtgtaatggtattattttggtttattgtaatttttgttttttgggtttaagggaattttttgttttagtttttggaatagttgggattataggtgtgtattattatatttagttaatttttgtattattagtagagatagggttttattatgttggttaggttggttttgtatttttgattttaggtgatttatttattttggttttttaaagattatgagttattatgtttggttttttttttagatatgttaatatttttggtgagtttagtggtaaggttggattttggagagtttgattttttgtgtgatttgtatgtttttatttggatttgttgtttgttttttattttaattttttgagtgtagagttatatttttatttttgagtttttgagaagtgggaggggaatattaattttgttttgtagtggagtttttattagttttgtggatagagtagatagataagatataggatataaattatttttttaaaagaaaagagagggttttattttttattgagaaaagaatttttgaaaagggaggtgttggtaaaaattgatgagttgattttgtttttggtttaggtaggttggaagaaattgtattttttagagtaggtgatttttgtgtttgtttgtttgttgtttttgagatattttgtgttgtttaggttggagtaaagtggtgtgattttggtgtattgtaatttttgttttttggatttaagtgatttttttgttttagttttttgagtagttgggattataggtgtatattattgtatttagttaatttttgtatttttagaagagatgagattttattatattggttaggttggttttgaatttatgattttaagtgatttatttattttggtattttaaagtgttgggattataggtgtgagttattgtgtttggtgagatggggttttattatattgtttaggttggtttggaatttttgagtttaggtaaatatatttatgttggttttttaaagtattaggattatagatgtgagttatgtttagttattaatttattttattgatgttgaaattaaagtttggaaaggttaaagagtttgatgaaggttaaataggtagtaaggggtggttggatttagattagggtttttaagtttgttgttttttttattgtgttgggttttttgagtgttttaatagttatgtttattttaaatggtgattttagagagtatttggttttaatttttttttttttggaggggagatggattttttggaatggaattgggttttggtaggggagaattttttgttgggtaaattttgataattgttttggtgtgggagtgtatagggaattttgatttttgtagaattttgggatttttgtgggtggaggggaagaggatagaggaggggagggaggagatgttgagatagaggtttttattttgagtttggtggggaggtatgtgggagaagttgttgag

SEQ ID NO: 3859 - DNA, 2382 bp, Artificial Sequence
  chemically treated genomic DNA (Homo sapiens)
ggatttatttattgtttgtaattttttgggttgaagagattattttttgggagttaattaatttattttttggagtgtgtgtttttttttgtttttaggagttggttttttaaaattttttgaggtttgtgtatgttttttttgattttttgtgtttttattttttatagaaatttatgtatttatgtttttttttttttttgagtttgtagaggattttgttttgttttttttatatttagggttgttttttttgttgttaatataaatttgttgataggttatgtttgggaagtgggtggggtgttttggagtggtgttgaggtgttgtaggtttggtttttggttgtgggggagttgtattttgaagttttgttggaatttgtgtttggggttagtagggggtattagagttaatagggattgtatgtaaaatttatttttttttaggttttttagggggatggttaggtttttgtagagatggggaggatttttttttggtaaggggagagggatgggttaggagttaagtggaaggattttgtgtttaaggttttttaagggatgggataggtgaggaatttttttgagttttttgaattgttttattagttaggtttgggaagtattttgtttttataaattttgtttttttgaaaggggttgggggggggattttaatattttttgttataggttatgatgggtatggtggttaagagtaataggttgtgtggtgaggttggttttttgtggttttgttttgttattttttgaggtatttttatgttagtgaatagagttgtgggtttttagttgtatagatgaatgtatgaataaaatataggtttatataaaggaagttattgtattgatttagatttgatttgggattgttgtataaaatagggttgataaaaattgttgtgtttttattttggaaatagagatttagtttttttttttttgtttgaggtatttagtaaaggtttgtttttgagtggttgtggatgtttaaggatttatgatttttgattttataaagtttagggtgaaaataaaaaataaaataaggagattattgttttaaagtggttgttgtagttaattattttaagaaagtaaataggttggtattgaaagttatataggtgggtggttttttgggagggttgtttagttttttttttttgagatttgagtagggagtagttagaggagtttgaagggatggtgtttagggtatgggaataggttgtatatatttttatggagtatggtgtttgtttagtttgagaagggaaagaaatgggagtagagggttgatgagaaggtagtagatggatagtgtgggattgaaaaggggatttatttgaagattggttattattatttatttttattatttgattgttgttgttttattgagattgatgtgtggagaataagttggggagtggaataaatggtagggaggggagagaagtgagtgaatatgattttggtttagttttataggatagagtgtggttatgaagtttatagaggaggataggtagggaggaattatggtatggttaggttgtagggtaagaggtagagaggagagaggattgtggaggatgtttgtggagtgttgattgttagttgaggttggttttttatttatttattttttttttttgagatggagttttgtttttgtttaggttggagtgtagtggtgtgattttggtttattgtaagttttgttttttgggtttatgttatttttttgttttagttttttaagtattgggattataggtgtttgttattatgtttggttaatttttttgtttttaatagagatagggttttatgtgttagttaggatggttttgattttttgaatttatgatttgtttattttggttttttaaagtgttgggattgtaggtattagttattgtgtttggttaaggttggtttttttttttatggtgatgggtgtttgaaagttgtatatattaaaataaatttattatttgttgatttaaagtaaaattttgagggtatgaaagggaagggtttatgtttatatggttgagataaaagttgttttaggaagttgggtgtggtggtttatttttgtaattttagtattttgggaggttaaggttggaggattttttgaggttaggaattgaagattagtttgagtgatatagtaagattttatttatatttttaaaaagggttggttgttttgggattttttgaaatagttttgtaagatatttttgttttggaattataataatttagataagatgtttttgaaagaatatttgtttaggtatagtgtttttattaatgaattgatgttaattgtggttt

SEQ ID NO: 3860 - DNA, 2382 bp, Artificial Sequence
  chemically treated genomic DNA (Homo sapiens)
aaattatagttggtattagtttattggtggagatgttgtgtttaggtaggtgtttttttaaaagtattttatttaaattgttgtgattttaaaataggaatgttttgtagggttattttgaaaagttttgagatagttaattttttttaaaaatatagatggggttttgttatattatttaggttagtttttaatttttggttttaggggattttttaattttggttttttaaagtgttgggattataggggtgagttattatatttagttttttgagatagtttttattttagttatgtaagtatgagttttttttttttatatttttagggttttattttgggttaataaatagtgagtttattttggtatgtgtaatttttaaatatttattgttataaaagaaaggattagttttggttaggtatagtggttgatgtttgtaattttagtattttgggaggttgaggtgggtggattatgagtttaggagattaagattattttggttaatatgtgaaattttgtttttattaaaaataaaaaaattagttaggtatggtagtgggtatttgtagttttagtatttgggaggttgaggtgagagaatggtatgaatttgggaggtggagtttgtagtgagttgagattgtgttattgtattttagtttgggtaagagtgagattttgttttaaaaaaaaaaaataaataaataaaggattagttttgattgatagttggtattttgtaggtattttttataatttttttttttttttgttttttgttttataatttggttatgttatgatttttttttatttgtttttttttgtggattttatgattatgttttgttttatgaggttggattagggttatgtttatttattttttttttttttttgttatttgttttattttttaatttgttttttatgtattgattttaatggagtaatagtaattagatgatgaaaataaataatggtggttagtttttaaatggattttttttttaattttgtattatttatttgttgtttttttattagttttttgtttttgtttttttttttttttaaattggataagtattgtattttgtgaagatgtgtgtagtttgtttttatgttttgaatattatttttttaagtttttttggttgttttttgtttaggttttagaaaaggagagttgggtaatttttttagggagttgtttgtttgtgtaatttttagtattagtttgtttgtttttttgagataattagttataatggttattttaaaataatggtttttttattttgttttttgtttttattttaaattttataaagttagaaattgtaagtttttgagtatttatagttatttaaggataaatttttgttgaatgttttaagtaaagagggggaggttgagtttttgtttttagggtgaaaatatgatggtttttattagttttgttttatgtgataattttaggttgaatttggattaatgtaatgattttttttgtatggatttatgttttgtttgtgtatttatttgtgtagttgggaatttgtagttttgtttattggtatggggatgttttggggaatggtagggtagagttataaaaagttagttttattatgtggtttgttgtttttagttattatgtttattatagtttgtggtaggagatgttggggttttttttttgattttttttaggaaaatagagtttgtggaggtggagtattttttaggtttgattgataaaataatttaaaagatttaaagagattttttgtttgttttgttttttgaagggttttgaatatggggtttttttgtttggtttttagtttgtttttttttttttattaggaaaggattttttttatttttgtagaagtttgattatttttttagagggtttgggaggaagtgggttttgtatatagtttttgttgattttagtgttttttgttggttttagatgtgagttttggtgaggttttagggtatagtttttttgtagttagaagttgggtttgtagtgttttagtattgttttgggatattttatttgttttttaggtgtgatttgttaataggtttgtattggtgataaaaggagtagttttgaatgtagggaaagtagggtggagttttttgtaggtttgggggaggggaggggtgtgaatgtgtggatttttgtggagagtggaaatatggggagttgaggggagtatgtgtgggttttagaaagttttgggaaattgatttttgggagtagggaggaatgtgtgttttagagagtaagttaattgatttttggggggtggtttttttagtttggggggttatagatagtaggtaaattt

SEQ ID NO: 3861 - DNA, 2303 bp, Artificial Sequence
  chemically treated genomic DNA (Homo sapiens)
tataatttattttttgtggattgggagatttagtattataaagttgttgattttttttaaattgttttatagatttaatgtaaatttagtaaaaaatttaataagaggttgggtgtggtggtttaagtttgtaattttagtattttgggaggttgaggtaggtagattataaggttaggagattgagattattttggttaatatggtgaaattttgtttttattaaaaaaaaaaaaaaaaaaaaaaatgagttaggtgtggtggtgggtgtttgtagttttagttatttaggaggttgaggtagggaatggtgttaatttaggaggtagagtttgtagtgagttgagattgagatattgtattttagtttgggtgatagagtgagattttgttttaaaaaaaaaaaaaaatttagtaaggggtgtgtgtgtgtgtttgtgtgtgtgtgtgtgtgtgtgtgtatgtaagttatagatagaatattttttttttttttttgagatagagttttattttgttgtttaggttggagtgtagtggtttgattttggtttattgtaatttttgttttttaggtttaagtgatttttttgtttttgttttttgtgtagttgggattataggtgtgtattattatatttggttaatttttgtatttttagtagatatagggttttattatgttggttaggttagtttttaatttttggttgtaagtaatttgtttattttagttttttaaagtgttgggattataggtgtgagttattgagtttagttagtatatagaatattattttttatttaagtatattaatttagaagagttttttttaaaatatagtatattatttttatttataatatttaaagataattaaagttaaattatgttgttttaagatattatatatttagaaaaatatttataaaaagtaagagaaatatataaattaggtttatttggagagaagggagtgaagtattgtgttgatatggggataaatatgttggttgggtagataggtagtttttatgtttttggttgatgtagatgttatgtattattttatgtgttattatattttttagtaaatatgtaatataagagaataattaattattattaagtgtttttattttgagataggaagatgtagaggaaagattttgatgtgtgtgttagttataaggatgtatattagtgattgatatgatttggtgtaaattttgggtagagatttatatttaagttttttatttttatttgttgaggtgtaagggtttagagggggttttatggggtgggtgggagtggtaagggttgaggtgtagttatagtttggttttgtgtatattttttttttttttttggttttatgtgtatattttttttttgttttttgttttttgtgtatattttttgtatttttttttttgttttagtttgtgtttgtagtgttatagggtggttgtagtttttgttttttatagttttttaaggttagagggttgggaatttttgggatgtggttgggatgaggattttgtttttttttaggtatttttaggtaaggggtatagagatatagttagtttagtagttgagttttttttattaggttaggtgggaaattgaagtatgaatataattttagattggaaataaaaagttgttatgtattgtgtgtttattgaatgttaagttttatgttttattttttaatgttatttttaatgagatgtttttatttagtttattatatgatagtagataggtatttatgatgtgtttattgtatgttgggtatttttttgggttatgaggatttagggaggtttttgttttggtagaagttaaatttgataggagatagagattaggggtttatatattaggaggaagaatttagtgtagagagtgttagtaggaagttataggggtagggaaggtgtttttgggagggtgggtggttgtgttttgaggttgagtagggggagttggttttgggataggatgtgtgtaggtgtggagtaggaagtttttggaatgatgggtaagagggagtaggttattgggggtaggtttaaatattgggggttgtattgggatagtagaggttttggataggtttgtttagtatgtagatttttttttttggttttttttttaggatgatagtggaggtttatttttaggtggtggtgagggtaattttgatatagagattttagtttagttggtaggggaaggggagtttttaaggatttttgtatgttggggtgtgttttgttaggtggtt

SEQ ID NO: 3862 - DNA, 2303 bp, Artificial Sequence
  chemically treated genomic DNA (Homo sapiens)
ggttgtttggtgggatatgttttaatatataggggtttttgggggtttttttttttttgttagttgggttggggtttttgtgttaggattgtttttattattatttggggatggatttttattgttattttagggaaggggttagggaggggagtttatatgttgagtgggtttgtttgaggtttttgttattttaatgtagtttttagtatttagatttgtttttagtgatttgtttttttttgtttattattttaggaattttttgttttatgtttgtgtatattttgttttgaggttagttttttttgtttagttttaggatgtagttatttatttttttaggagtgttttttttgtttttgtggttttttgttggtattttttgtattgggtttttttttttggtgtgtgggtttttagtttttgttttttgttgggtttgatttttattagagtagggatttttttgagtttttatggtttagaaaagtgtttagtatgtagtaggtgtattataaatatttgtttattattatgtggtgaattgagtgaagatattttattaaagatgatattaaagaatagggtatagggtttggtatttagtaggtatatagtatatgatggttttttatttttagtttggggttgtgtttatgttttagttttttatttggtttgataggaggggtttagttgttgggttggttgtgtttttgtgttttttgtttggaaatgtttgaggaggggtagggtttttattttagttatattttaggggtttttagttttttgattttgaggagttgtgggaggtaaaggttgtagttattttgtagtattgtaaatataggttggggtgggaaggggggtatagagggtgtgtataaggggtagggggtagggagagggtgtgtatatgggattagggggagggagggggtgtgtatagagttaggttgtggttgtattttgatttttattatttttgtttattttatggaattttttttgagtttttatgttttggtaggtgggggtgaggagtttaagtataggtttttatttaagatttgtattaagttatgttagttattggtgtatatttttgtaattgatatatatattaaggttttttttttatatttttttgttttaagatgagaatgtttgatagtggttaattatttttttatgttatgtgtttattggagagtgtgataatatatgaaatagtatgtaatatttatgttagttaaaagtataaggattgtttgtttatttaattagtatatttatttttgtattagtgtaatgttttatttttttttttttagatgggtttgatttgtatgttttttttgttttttatagatgtttttttaagtatatggtattttgaaatagtataatttggttttgattgtttttaagtgttatagataaaaatggtatattgtattttaaaaaaaatttttttagattaatatatttaagtaaaaaatggtattttgtgtattagttgggtttggtggtttatgtttataattttaatattttgggaggttgaagtgggtagattatttgtggttaggagttggagattagtttggttaatatggtgagattttgtgtttattaaaaatataaaaattagttagatgtggtggtgtatatttgtaattttagttatataggaggtagggataggagaattatttgaatttgggaggtggaggttgtagtgagttaagattgagttattgtattttagtttgggtgatagagtgagattttgttttaaaaagaaaaaaaaagtattttgtttatggtttgtatatatatatatatatatatatatataggtatatatatatattttttgttgaatttttttttttttttgagatagagttttgttttgttgtttaggttggagtgtagtgttttgattttggtttattgtaagttttgttttttgggttgatattattttttgttttagttttttgagtagttgggattataggtatttgttattatgtttggtttatttttttttttttttttttttttagtagagatgggattttattatgttagttaggatggttttgattttttgattttgtgatttgtttgttttagttttttaaagtgttgggattataggtttgagttattgtgtttagttttttgttgaattttttattggatttgtattaaatttgtagaataatttggggagaattgataattttataatattgaattttttaatttataaagagtagattatg

SEQ ID NO: 3863 - DNA, 2496 bp, Artificial Sequence
  chemically treated genomic DNA (Homo sapiens)
agtttattgtagttttgattttttgggtttaagtaattttgggattataggtatgttttattaggttgagttaatttttttttttttttttttggtagagatggggttttattatgatgtttaggatggtttttagtttttggttttaagggatttttttattttgattttttaaagtgttgggattataggtatgagtttttttgttttttttttgttgttttttttttatttttgttgatttatttttattttttaaatgtaaaattgatttaaggtgtatttagagatgtgtatagatttttgtgatggagggaattgtatagttatggtgaggagtttattataatttttaaatgtttttttaagaagtaggtattaatattttgttttatttttttggaggtagttttgggttgagtattggatttttgggttttattaattttagtgtttttaggagattaagtgtggttgggggtgagtttttgtttttgtgttttttattatgttttaatatttattttttgttttattttttagttttttgggttttggtttgtatttgtgaattgaaggggttatattaggtgttatattagggtttttggatagtttttaggtttggattttgttttttaggatattatttttattggttaatttattttgttttgtgagtgtttagtgagtgtttggtatgtaatagagtttttataaatagttgtagaaattagtgttattttatagtatggaaattgaggttttaagtgggagtggtttgtttttaaggttttattggtgagagatgttgtggaagggttgttttggtttgggtatatagtaggtgttttgatgtgggttggagaaggttttgtttggtgggattgtgttttggggtattgtgtatgggttggggaagtttggggtagggttgtatgtaaatagtgtgtgaggaggttgtggattggttagtttaggtgggggtggggtgtgttgagggtttagagttggtaggtgttttggtagggataggtttggtgtttgtgtttgtttgttggattgtttgttttgtgttttggtggttttttttgggtgatgtttttgttttgggttttgttggtttttggttgtttgtggtttggtttgggtaggtggtgaagggtaggagggggttgagtttagaaagagtgggtagttttgttttggggtgtttgttgtttggattttgatttttggtgttggggatttagatattattgttatgaataatagtgatagttaatgtttatgggttttttttgttgggaatttgagggtttatagatggttgtagttttgtgatgtgtgttgtaagagattaatatgtaggggggttgtggtaggatagagaagggattagttttagttttatggtgatgtttggatgggggtagatagagagatattttggttgaggaagtagtatgggtaagtttatggaggggagataatattgggttgttttgggaattgttagtttatgggattagttggagtttggggtgaggggagtttgtgggggaaggggtgaggttggagattgaataaagtaaagtttagaattttaggattttattgtttttttagagaggttggattttgttagggggtgttgggggattatgggagggttatagttagagaatgaggtagttagatttgtatgtggggggagggtttaggtgaggaaggtgggatggaggagggttgggttgatggtatggagagatgtttaggaggggtagtggagtttttggtaattgagtgtttgtagtagggagagaaggtagtagtttggtttgattgttttatttttgagtaggatgattgggtagggggtagtgtttgagatagtttatgtggtggtttagggggagggtgaagtttagggtttggtatataatatgtgtttagtaattgtaagtagagtgggtgtggatagttttgttggaggttagtttttatttttattgttttttttagttgtgaatttgtagttttaattggttagtgtgatttttgttattaataattttatatttattattgtggttttggaaaagtttttttgtatgtttgatagtaaagaggtttttattggtatttatgaggtttatttgtatgttttggttgatttaggtaagggttttgtttttttttggttattttaaaaggggttttgatttgtttgtagggaggagggaaggaggtagatagaggaattttttatgtttgtagttgttttattaaataggtattgtagttatagatttgtttttgttttgtagggatatttagttagtgagggaagtaataatattattagttattgaatatttatattatattaggtattttgtatattatagagttagtatttataattagtttgtaaggtagttattattaatttttattatagagtagggaagtaaggtttagagaggtggaata

SEQ ID NO: 3864 - DNA, 2496 bp, Artificial Sequence
  chemically treated genomic DNA (Homo sapiens)
tattttatttttttgagttttgtttttttgttttgtaatggggattggtaatagttattttataagttggttgtagatattagttttatggtgtgtaaagtgtttggtatggtgtaggtgtttagtgattggtggtgttattattttttttattaattggatgtttttgtaaggtaaggataggtttgtggttgtagtatttgtttaatgagatgattataggtatggagggtttttttatttgttttttttttttttttttgtagataggttagagttttttttggagtagttagagggaagtaggatttttatttgagttgattaggatatataggtagattttgtgggtgttagtgagggtttttttgttgttaaatatgtagagaggtttttttaaggttatagtggtaagtgtggggttgttggtggtgaaagttatattggttagttggggttgtaggtttatagttggaggaggtagtgaggatgggaattgatttttggtagaattgtttatatttattttgtttgtagttattgagtatgtgttgtgtgttaggttttgggttttattttttttttgggttattgtataagttgttttagatattgttttttgtttagttattttgtttagaaatggagtggttgggttaaattgttgttttttttttttgttgtagatatttagttgttaagaattttattgttttttttaagtatttttttatgttattggtttagtttttttttgttttattttttttatttgggttttttttttatatgtaagtttgattgttttattttttggttatggtttttttatggttttttagtgttttttgatgaagtttagtttttttggaaaggtagtgaggttttgaagttttgggttttgttttgtttggtttttagttttatttttttttttataggttttttttattttaggttttagttggttttatggattggtagtttttaggatagtttaatattgttttttttttatgaatttgtttatgttgtttttttggttgaaatatttttttatttgtttttgtttaggtgttattatggggttggggttagttttttttttgttttattgtagtttttttgtatgttggttttttgtaatatatattgtagggttgtagttatttgtgagtttttggatttttaatagaggaggtttgtaaatgttggttattattattatttataatagtaatatttgggtttttagtgttaggaattagggtttaggtggtgggtgttttagggtagagttgtttgttttttttgggtttagtttttttttgttttttattgtttatttgagttgaattgtaggtagttgagggttagtagggtttagagtggaggtattgtttgggaggagttgttagagtgtggggtgggtggtttagtgagtaggtgtgggtattagatttgtttttgttagggtatttgttagttttgggtttttggtgtgttttgtttttgtttgggttggttaatttgtggtttttttgtgtgttatttgtatatggttttgttttgggtttttttgatttgtgtgtggtgttttagggtgtaattttattgggtaggattttttttagtttgtattaaagtgtttattgtgtgtttaggttagggtagtttttttatagtgttttttattaatgggattttgagggtaagttatttttatttggagttttagtttttatattgtaaaatgatgttaatttttataattatttatggaggttttattatgtgttaaatatttattgggtatttgtgaaataaaatgggttgattagtaaaggtgatattttggaaaatgaagtttaggtttgggagttatttagagattttagtatgatgtttagtatgatttttttggtttataggtataagttaaggtttgggaggttggggggtggggtagggggtaagtattggagtgtggtggggggtgtggggatagggatttatttttggttgtgtttggttttttggagatattgaggttggtggaatttaggagtttagtgtttagtttagggttgtttttaaagggatggagtagggtgttaatgtttattttttaaaggggtgtttgaaaattatgatggattttttattatgattgtgtggttttttttattataagaatttgtgtatatttttggatgtattttaaattaattttatatttaagaaataaaagtaagttaataaggataggaaaaaaataatagaagaggggtaaggaggtttatgtttgtaattttaatattttgggaggttaagataggaggattttttgaggttaggagttagagattattttgggtattatagtgagattttatttttattaaaaaaaaaaaaaaaaaaattagtttagtttagtggggtatgtttgtagttttaggattgtttgagtttaggaggttgaggttatagtgaatt

SEQ ID NO: 3865 - DNA, 2499 bp, Artificial Sequence
  chemically treated genomic DNA (Homo sapiens)
attgtatttagttttttttttaatttttttttttttttttttttttttttttgggatagtagggttttgttttattattaaggttggaatgtagtggtgtgatttttgtttattgtagttttggttttttaggtttaaatgatttatttattttatttttttgagtagttgggaatataagtgtgtaatatttatatttggttattttttgtattttttttgtagagatagagttttattatgttggttaggttggtttggaattttttattttaggtgatttgtttattttggttttttaaagggttgggattataggtatgatttattatatttggtttttttttttttttaaaattgtggtaattattttttttttgttgaatttattaatgagaaaaagttaatggggttaggtatggtggtttatatttgtaattttagtattttgagaggttgaggtaggtaaattgtttgagtttaggagttttagattagtttggataatgtggtaaaattttatttttataaaaaattttaaaaattagttaggtttggtggtgtatgtttgtagttttaattatttaggtagttaaggttgtagtgaattatgattgtattattgtattttagtttaggtggtagagtgagatgttgttttaatttaaaaaaaaaaaaaaaaaaaaaaaggttgggtatagtggtttatatttgtaattttaatattttgggaggttgaggttagtggattataaggttaggagattgagattattttggttaatatggtgaaattttgtttttattaaaaaaaaaatatagaaaattagttgggtatggtggtaggtgtttgtagttttagttatttgggaggttgaggtaggagaatggtgtgaatttgggaggtggagtttgtagtgagttgaggttgtgttattgtattttagtttggtttatagagtaagattttattttagaaaaaaaaaaaaaaatgtaattaattgtaaggtttggggtgatagttttttggttattttttttagtttttttgtgtttttatagttagagatgattaaagtttatttttaagaaaatagtaagttatgtataattgaagtttatgggggtaggatgttgttttttttattggggtaatttaagtatttgagtgtttgatattatttattatttaggggatttgagttgaattttaaagattggaattaaagatgatagagtgtgtggttggagagagggggaagtttatagagtttaggtaaatttttgaattatatttttattatgtttataatgtattgtattgaagtatattggaagttaaagattaaaaaggaattagatttttagttttgttatttaaagtagaaattgagggttttatttattgtatagattttagtttaagtgttatgtttttagttttatagttttattagtagtttaagtaaaatggtttggatattaaagatggtttttgggttagagtattatttattttttttgtttataaattattttgattttttttgattttttttgttttttatttttttatttagtttttttttttttttttttttttttgagatagagttttgttttgttatttaggttggagtgttggagtgtagtggtgtgattttagtttattgtaattttggttttttgagtgtaggtaatttttttattttagtttttagagtagttgggattataggtatatattattatgtttagttaatttttgtattttttgtagagatggggtttagttatgttgtttagtttgtttttaaattattgggtttaagtaatttgtttattttaattttttaaagtgttggtattataggtatgagttattgtgtttggtttatttggttttattaaatattttattttttgtaaatgtagatgtttttttagttttgattattttttttaaagtaatgattttttatttggttagatgaatgtttttagtaaaggaaaagattagaatgtgaaaattgtattgtaatagaatataaagtttgtttaattttattttttattagatttggggtggtggtagtagtaggtgttagggtttttaggtttgtttattagttatttttaaggtttgttagtatatgggttaggaggagtatatattttggaattagaaagtttaggattgaatttagttttgtttttagttaaggttttgttatttattattatttttttgatttaggattttataaaattttgttatttgtaaaattggggatgataagttttattttgaatgttgttgtgaggaataaatgaggtaatgtttatgtagtatttagtatagatttttgtagataaatatttaataaatgttaattattatttattatttagttattagaaaagtataatgatttggtatttttaagtttttttgtttttaaaaaaaaaaaagaaaagaaaaaagaaaaagatgtgtgg

SEQ ID NO: 3866 - DNA, 2499 bp, Artificial Sequence
  chemically treated genomic DNA (Homo sapiens)
ttatatattttttttttttttttttttttttttttttttggaagtggaaggatttaaagatattagattattgtgtttttttgatgattaggtagtggatgatagttaatatttattgagtgtttatttgtaggaatttgtgttaggtgttgtatagatattattttatttattttttataataatatttaaggtagaatttattatttttagttttatggatgataaggttttgtgaggttttaggttaagggagtgatagtgagtgataaagttttgattgaaagtagggttgggtttaattttgggttttttgattttagagtgtgtgttttttttaatttgtgtgttaatgggttttagggatgattaatgggtaggtttgagagttttgatgtttgttgttgttattattttaggtttgatgggaggtggggttggatgggttttatgttttattgtagtataatttttatattttggtttttttttttgttagaagtatttatttagttaggtggggggttattattttagaaaaaataattagagttgagaaaatgtttgtatttgtagagaatgaagtatttaataagattagatgggttgggtgtagtggtttatgtttgtaatattaatattttgggaggttgaggtgggtagattgtttgagtttagtagtttgagagtagattgggtaatatagttaaattttatttttataaaaagtataaaaattagttgggtgtggtggtgtgtatttgtggttttagttattttggaggttgaggtgggaggattgtttgtgtttaggaggttgaggttgtagtgagttgagattatattattgtattttagtattttagtttgggtgatagagtaagattttgttttaaaaaaaaaaaaaaaaaaaaaaagattagatggggagatgagggatagagagaattaaagagaattaaagtggtttgtggatagaggaaatgagtgatattttgatttagaggttatttttagtgtttaggttattttgtttgagttgttggtgaaattgtgaaattggaggtatggtatttgggttaaagtttgtgtggtgaataaggtttttagtttttgttttaggtggtagagttgaaaatttgatttttttttggtttttagtttttggtgtattttaatgtagtatattgtgggtgtggtggggatgtggtttagaaatttatttaaattttgtggatttttttttttttttagttatgtattttgttatttttggttttagtttttagaatttagtttggattttttgggtgatgggtggtgttagatatttaggtgtttggattgttttggtggagagaatagtattttgtttttatgggttttagttgtatgtgatttgttgtttttttggaggtgggttttagttatttttagttataaagatataaaaaaattgggaagaatgattaggaaattgttattttaagttttgtagttgattgtatttttttttttttttttgagatggagttttgttttgtgggttaggttggagtgtagtggtatgattttggtttattgtaagttttgttttttgggtttatattatttttttgttttagttttttgagtagttgggattataggtatttgttattatgtttggttaattttttgtattttttttttagtagagataaggttttattgtgttagttaggatggttttgattttttgattttgtgatttattggttttggttttttaaagtgttgggattataggtgtgagttattgtgtttagtttttttttttttttttttttttttaaattgagatagtattttattttgttatttaggttggagtgtagtggtgtgattatggtttattgtaattttgattgtttgagtagttgagattataggtgtgtattattaagtttggttaatttttaaaattttttgtagagatggggttttgttatattgtttaggttggtttagagtttttgggtttgaataatttgtttgttttagttttttaaagtgttgggattataggtgtgagttattatgtttggttttattgatttttttttattggtgagtttaatagaggagagatgattgttgtagttttaaaaaagaaaagaggttaggtgtggtgggttatgtttgtaattttagttttttgagaggttgaggtgggtagattatttgaggtgaggagttttagattagtttggttaatatggtgaaattttgtttttataaaaaaaatataaaaaatagttaggtgtgggtgttgtatatttgtatttttagttatttaggaggatgaggtaggtggattatttgagtttgggaggttaaggttgtagtgagtggagattgtattattgtattttagttttggtgatagagtaagattttattgttttaaaaaaaaaaaaaaaaaaaaaaaaaaaaattaaagaaaaggttgggtgtaat

SEQ ID NO: 3867 - DNA, 2499 bp, Artificial Sequence
  chemically treated genomic DNA (Homo sapiens)
ttatatggatataggaaggggaatattatattttggggattgtggtggggttgggggaggggggagggatagtattgggagatatatttaatgttagatgatatattagtgggtgtagtgtattagtatggtatatgtatatatatgtaattaatttgtataatgtgtatatgtattttaaaatttagagtataataaaaaaaaaaaaaaaaaagaaaattggatatttgaatataataatgtagtaattttggagatgagattttttttttttttagggtttgttgttttggggttttgttatgttttatattgttgtaggttgtttttatgttgaggattaatttgagttgtaagtttgaggtttttttaggtttgaagttgtttttttttttgggtatatatttttttttttaaggatgtgtggtaattttaattttttttgtgtatgttattgtttttgagtgttttagtttttaatgtttggtttttaaaaaaggaaaagagaataatgaaggggaagggaaatggggttttggttttttttattttttagaagttgttttagtttggtaagggtttgtagtagtggagtggggagttgtgagtaataatggttgttggtttttgtgtttgtttttttataattaaaagtagtaattaataattagaatgtagatgttaatatttggaggatagagtgtttattgtttatgattgtttttataagttttagtttaagaagttagaagtggtgtttaagtttgtttgtttgatagaaattgtgaatttatattggtttgtttattttgaggttgtgttgttagagtttttttagtataataaagagaggtgtatataaaggaataggaatagtaggaggtgggggtaaaaatattaggtgtgatttatatgttaagttgatttgtattgtgttttataggaagtttagaagatgtttttgtaagaaattaaggatttgtttgttggggagggttgttggtatgtttgaaaagtattgtgatggttgaattttgtgggtttggggagattgtagattttttgattttaaggggaatgatgtgattttagagttgtaaagaataagtgatagtggaggtgtttatgttttgtgattgtattagagataaggaagatataattagaataatggggagtaggaatggagtggttaatagaatatgtgattgttagggatttttgatgaaggttgatttttagggagtgaattagattagtgattaattatttgtttttatataattgggtaatgtggatggattttaataaagggattatttatagtatagtaggaaagttataaagaaattagatagaagagtgtaagtagtaaggggttaagtagttatttgattagagatagtgttagtttgttaagaaggtattagatagaagttgtgatttttagtaaagggatatagtttgtttgtgttgattttgtaggggtagaggtgggggatatatatattttttttttatttattttttgttattttttttattagttgaattttaataaaagtatgagggtaagggagatttttgaagtatttaatttaggtgagttttttaaggaataaagtagaatgtagaaaaattaagagtgggtttagggaataaaatagagatatgtattagagtatgatgatgtgtttgggaaagaatatataaatatttttaaaattattagataataaatttgagatgatattaatataggtaaattttatttaatggtaatatattttaagaaatgtattattaggtgattttgtggttgtgtagatattaaagagtgtattttatataaatttagatagtgtagtttattatatatttaggttatattgtatagtttattgtttttgggttatatatttgtgtagtatgttattgtgttgaatatagtaggttaatggtttttaatatttaagttatggattagtattggtttgtgttttgttaggaattgggtataaagtaggagatgagtggttggttagttgagtattattgtttgagttttgttttttgttagattagtagtagtattagatttttataggagtataaattttattgtgaattgtttatataagggatttaggttatgttttttttatgagaatttaattaggttgggtgttgtggtttatgtttgtaattttaatattttgggaggttgaggtaggtggattataaggttaagataattttggttaatatggaaattttgtttttattaaaaatataaaaattagttgggtgtggtggtgtatgtttgtagttttagttatttgggggattgagataggagaattatttgaatttgggaggtagaggttgtagtgagttgagattgtgttattgtattttagtttggtaatagtgggagatttagtttaaaaaagaaaaaaaaaagaaaaaaaagaatttaattaatgtttgatgatttga

SEQ ID NO: 3868 - DNA, 2499 bp, Artificial Sequence
  chemically treated genomic DNA (Homo sapiens)
ttagattattaggtattagttagatttttttttttttttttttttttttttttagattgagttttttattgttgttaggttggagtgtagtggtataattttggtttattgtaatttttgttttttgggtttaagtgatttttttgttttagttttttgagtagttgggattataggtatgtgttattatatttagttaatttttgtatttttagtagagatggggtttttatgttggttaggattgttttgattttgtgatttatttgttttgattttttagagtgttgggattataggtgtgagttatagtatttagtttagttagatttttataaggagaatataatttagattttttgtatgggtagtttataatagggtttgtgtttttgtgaaggtttaatgttgttgttgatttgataggaggtggagtttaggtagtaatgtttggttggttagttatttattttttgttttgtgtttagtttttaataggatatgaattggtgttggtttatggtttgggtgttggggattattggtttattgtatttagtatagtgatatgttgtataggtgtgtagtttaggagtaataggttgtatgatatagtttaggtatgtagtaggttatgttgtttaggtttgtataaagtatattttttggtgtttgtatagttataaaattatttaatgatgtattttttggaatatattattattaaatgagatttatttgtattagtgttattttaggtttattgtttagtaattttaaaagtatttgtatatttttttttagatatattattatattttggtgtatatttttattttattttttagatttatttttaatttttttgtattttgttttgttttttaggaggtttatttgaattggatattttagagattttttttatttttatgtttttattggggtttagttaatggagggggtggtagaagataggtgagagaagagtgtgtgtattttttatttttgtttttgtagggttagtataggtagattgtgtttttttgttgaagattatagtttttgtttggtgtttttttggtaagttggtattgtttttagttaggtgattgtttggttttttattatttatatttttttgtttggtttttttgtgatttttttgttgtgttgtaagtagtttttttattagaatttatttatattatttagttatataaagataaatagttggttattgatttagtttattttttgagaattagtttttattaaagatttttaatagttatatattttgttggttgttttatttttgttttttattattttagttgtgttttttttgtttttagtgtagttataaagtataagtgtttttattgttatttgttttttgtaattttaggattatattattttttttgaaattagagaatttgtaatttttttaagtttataaaatttagttgttatagtattttttaagtatgttagtagttttttttaataaatgaatttttaattttttatagaaatattttttgggttttttgtgggatatagtgtgggttggtttggtatgtggattatatttgatatttttatttttattttttattatttttatttttttgtatgtatttttttttattatgttaggaaagttttggtaatataattttaaaataagtaggttagtgtggatttatagtttttgttagataaataaatttgagtattatttttaattttttgggttaagatttgtgggaataattatgggtgataagtattttgttttttaagtgttagtatttgtgttttggttgttgattgttatttttgattatggaagggtaaatatagaggttggtagttattattgtttataattttttattttattgttgtaagtttttattagattgaagtaatttttaggagatagaaaaggttagaattttatttttttttttttttgttgtttttttttttttttttgggagttaaatattaaagattaggatatttaaaagtaatggtatatatagaggaaattaaagttattatatatttttggagagaggagtgtgtgtttagggaaaggagtagttttagatttgagaagattttaagtttataatttaggttgatttttagtatggagataatttataataatgtaaaatataataaaattttaaaatagtaaattttgaggaagaggagagttttatttttagagttattgtattattatatttaagtgtttagtttttttttttttttttttttttattatattttaagttttagggtatatgtgtatattgtgtaggttagttatatatgtatatatgtgttatgttggtgtgttgtatttattaatgtgttatttagtattaggtatattttttaatgttatttttttttttttttttgattttattatagtttttagagtgtgatatttttttttttgtgtttatgtga

SEQ ID NO: 3869 - DNA, 2279 bp, Artificial Sequence
  chemically treated genomic DNA (Homo sapiens)
taattttagtattttgggaggttgaggtaggagggttgtttgaggttagagtttaagattagtttggataatatagtaagatttttttttaaaaaatgtttttaaaaattagttgggtaggttaggtatggtggtttatgtttgtaattttagtattttgggaggttaaggtgggtggattataaggttaggagatggagattattttggttaatatggtgaaattttgtttttattaaaaatataaaaaaaaattagttaggtgtggtggtgtatgtttgtagttttagttattttggaggttgaggtaggagaatggtgtgaatttggaaggtggagtttatagtgagttgaaattgtgttattgtattttagtttggatgatagagtaagattttgttttaaaaaaaaaaaaaaaaaaattagttgggtatagtggtatgtatttgtagttttagttatttagaaggattttttgagtttaggagtttatagttgtagtgagttgtgattattttattgtattttagtttgggtgatagaaagattatgttgttgaaaataaaattatgggtggggggtggtgttttgtgtatttaggggagtttaggtgtgaaaaattgtgttttgaaaaagtaggtttttgtgtgttggttagaatggggggatgaggaaattgaggggtagttttttttatattattatttgttttggagtagattggaagagttagtagaatgaggggtaataagtatggattggagtgatttgggtgagttgaggtaggggttgaagtttttatatggaatgtggtagggatgagtaggttatttggaatttagatttaaaagtattagttatttagatattgatttgagatttttgtagagggggaaatggttggggttttagttatttggagtgttttaattttttagtagagtttggttgtgagatttagtttttttgttttatttggtggggtgatgtgtttattttaaagttttattggatataggtaggtaaatttttattgggtatttgatttttgtattaggttttagtgtggatgttgttaagttagtatgtggttttgtatatgtggagttttatagttattttgaagtaagttttgggattttgaatttgattttgaagtttttgttgggttgattttttatttggtgttgatttgattttatatgggagttagtgtagttatgggtttggaaagtatttagataaaaggtgttttatttagtgatgaagaatgtgttgatgttttaagattgtttttagataaatagtaaaattgttggttaaaagttggtttaatttattttattttgttgttgtttgttttgttttagatgttttgtagtttgaagttgtggttttagtttttttttttagtgataagtggaaaagagggatgaggaaggggttttgttggtttgattaaaaataaaattaagaatttatgagtgtatttttttttttgggtatttggatatttttgttagaatatttagtagatgttgataattttaagttaatgtaaaagttaagtttggagggttatggggtgggagattagggtgaggaagttgttaaaggaggttaaggggatggtatggtttttatttaatagtgatagtagtattttagagttagagggtttttatttattgtttagtttatatgtatgattttaaaaaaggaagttgaggtaggaggattgtttgagtttaggagttggagattagtttaggtattttagtgagttaatgtttttgttaaaattaataaatgaagttaagaaaggtgaggtatgggtggttttagtgatttggattaatttatagagaggtagtaatggggagggttagagttttgtttttgagggattatattatagtttattttttttatttaaaggttaaaggaattgagtgttaataattaatatagtgattttggtatttggagtttttttgatgttttatggattaaggagattagatttttttatatagtttgttgagggatttggtgggtgttttttgtttttggggtttttttattttggttgttatgtttaatttagatttagtttttttttggaattttttttttaatatgtatagagatagaatttggtttggattttgtagttagtagttgtgtgtaattatttgggatagtgttgtaggttagtagttggtaatgttagatattgggttggggttgtttagtaggtttaagttttggttgttagt

SEQ ID NO: 3870 - DNA, 2279 bp, Artificial Sequence
  chemically treated genomic DNA (Homo sapiens)
gttggtagttagggtttagatttgttgagtgattttaatttggtgtttagtattgttggttgttgatttgtagtattgttttaggtgattgtatataattattggttgtaaagtttgggttgggttttgtttttgtgtgtgttgaaaggagaattttaggaagaggttgggtttgggttgagtatagtagttaaagtaggaagattttaagagtaaggggtatttattaagttttttaataagttgtatggaggaatttggtttttttaatttatgggatattgagggggttttaggtattaagattgttatgttggttattaatgtttagtttttttggtttttgggtgggggaagtgagttgtggtgtaattttttagaagtgaggttttggttttttttattgttatttttttgtgagttagtttaggttattgaggttgtttatgttttattttttttgattttatttattaattttaatagagatgttgatttgttaaggtgtttaggttagtttttaatttttgggtttaagtaatttttttgttttagtttttttttttaaaattatgtatgtgaattagataatggataaagattttttagttttaaaatgttattgttattattagatgaaggttgtgttatttttttggttttttttaataatttttttattttagttttttattttatgattttttagatttggtttttatattagtttggaattgttagtgtttattaaatgttttagtagaggtgtttaagtgtttaagggagagaatatatttatgggtttttagttttgtttttggttgggttagtaaagttttttttttattttttttttttatttattattagagaaagagattaaaattatagttttaggttgtgaaatgtttaaaataaaataaataataataaaataaggtgggttagattagtttttaattaatggttttgttgtttatttgaagatgattttaagatattaatatattttttattattgggtggagtattttttatttgagtgttttttgagtttatgattatattgatttttgtgtaaggttaagttaatattgagtagggagttagtttagtaagaattttggggttagatttggggttttagggtttgttttagagtaattgtaagattttatatgtgtgaagttatatgttggtttagtaatgtttatgttaaaatttggtgtaagaattaagtgtttggtgagggtttgtttgtttgtgtttagtgagattttgaagtggatatattattttgttaggtgagatagagagattaggttttatggttagattttgttggggaattaggatattttaagtggttgaaattttagttgtttttttttttgtagagattttaaattaatgtttgggtgattgatgtttttaagtttggattttagatggtttgtttatttttgttatgttttatatgagggttttagtttttgttttagtttatttagattattttaatttatatttgttgttttttattttgttgatttttttagtttgttttaaggtaaatgatggtgtggggaggattgttttttaatttttttatttttttattttaattagtatataggaatttgtttttttaaaatgtagttttttatatttgagtttttttaagtatataaagtattattttttatttgtgattttatttttagtgatatgatttttttgttatttaggttgaagtgtagtggagtgattatagtttattgtagttgtgaatttttgggtttaagggatttttttaagtagttgggattataggtgtatgttattatgtttagttaatttttttttttttttttttgagatagagttttgttttgttgtttaggttggagtgtagtggtgtgattttggtttattgtaagttttattttttgggtttatgttatttttttgttttagtttttggagtagttgggattataggtgtgtgttattatgtttggttaatttttttttgtatttttagtagagatggagttttattatgttagttaggatggtttttattttttgattttgtgatttatttattttggttttttaaagtgttgggattataggtgtgagttattgtgtttggtttgtttagttaatttttaaaaatattttttgagaaaaagttttgttatgttgtttaggttgattttaaattttggttttaagtaatttttttgttttggttttttaaagtgttgggatta

SEQ ID NO: 3871 - DNA, 2443 bp, Artificial Sequence
  chemically treated genomic DNA (Homo sapiens)
tgaatttttgaatttaaggaatttatttgttttagttttttaaagtgttgggattataggtgtgagttattatgttttgttatttttagttttttgatttgaaatgtttttttgtaaataagtattaattattttattgtaggtttgaggagaaaaaggtgaatgagtttttttttagttttgaagttaattagtttaatgaattggtaatgataatatatttttatttttttgggttatttttattagttttatatattgttgagagagttgaaagtgttgagttaagttagggaaggtaagagtaggtaggtgattgttaagatatttttgttttatttgtttgatatttgatattttgtagggatgaaaggttatatttatggatggtgaaggtagtggaaattgtattgatttgggagttagaaattttaagtttaagttttagttttgttattaatatgttgtgattttaagaaagttatttttttttttgggttttagtttttttatttatgtaagtaagggttgagttggttaatttattaagattttttataggttaggtatggtggtttatgtttgtaaatttagtattttgggaggttgaggtaggtggattgtttgaggttaggagtttaagattagtttggttaatatggtgaaattttatttttattaaaaatatgaaaaattagttaggtgtggtgatgggtgtaatttttgttttttagttatttaggaggttgagataggagaattatttgaatttgggaggtagatgttgtagtgagttgagattgtgttattgtattttagtttgggtgatagagtgagattttgttttaaaaaaaaaagattttttatagtgtagtttatggtttttttaatttatttatgttatgtagttaatagttattttagtaaggtagtttgtgatttgtttttttatttttaggtttggtaatttttatatttaaaatgttttaagataatttttggtttagggtagttgaaatggatttttaatttggagttagagtttttattatttttatagtatttatgagggttaatgttttatttttttagtatagaatatggatttttagtttttaattatgagattgggtttagggtggttattttgaagttttttataattttttttttatggttttgggtagggatttatttttggtttttttgaaattataatataaattaagtagggaatattgaagtttttagatattagagattttaggttgattgataggttttagaaagtgagggaaggagagaggattggagttgggattttattttagttttagttttatagatagtagttatgtagagggtgtttgtagagttatattttgggtttgtggttgtggggtaagaaagatagatgtttggttgtttggttggggattatagttaaagggaggtgtttttattggggttttattttgtttataaatattagagatatgtttttatttttttttttattttttagatttttagaaggaaagaaagaaaattaatattttttgggttgttatttgtgataagtgttgtgttaggtatttttatgtattatatatttatttaatttttagagtaatgttgggaagtgggtgttattgttgttttttatagtgagtaaataggtttagagatttaggattttgtttaaggttataaagttagtaagtgtaatttttaagtttggtttttttttaatatattatattgttttgtattttaagatttggttgattgtttgataagtatgtagtaggaatttttatgttttagtatttttttataaatttgagtttttttttttaaggttttataaatgtaattgggaattttttttttagattttaagattatatatttttttgggttttaattttaggtgattgttttttaatttaaaatattttaggtttttattaagtttttataagtgaatttttggggaattgtgataaagtattagttagggtgagggtttagaatgaggggtgttttttttgagttttggattaaatttagtttgttgtgagttagtagggagatattggaggagatagatttagtgggtgagagggaattttttttaggggaggggtttggatttttttaaggaagaaggaggtttggtgaataagaggttttagggttggggaaaattttggaagtgataggggtttttagatagttaaagtgtttttataagttatgagagagtttggggtgattttggataattttaattggttagagaaagggagaaaggatattttttggagtagggttatggtagggttttaggagtttttattggtgattgggatggaaagtatatattaggagggagttttgttagttttgtgtataatattggttttatgtgataggatag

SEQ ID NO: 3872 - DNA, 2443 bp, Artificial Sequence
  chemically treated genomic DNA (Homo sapiens)
ttgttttgttatgtgagattagtgttgtgtatagaattgataagatttttttttgatgtgtgttttttattttaattattagtaggagtttttggggttttgttatgattttattttagagaatattttttttttttttttttgattaattgagattgtttaaggttattttagatttttttatgatttatggaagtgttttaattgtttaagaatttttgttatttttgggattttttttagttttaaagttttttatttattaggttttttttttttttggagaaatttaggttttttttttaaggggagtttttttttatttattggatttgttttttttagtatttttttattggtttatagtaggttaggtttagtttaggatttagagagagtattttttattttgaatttttattttgattgatgttttgttatagttttttagggatttatttgtgagaatttagtggggatttggagtgttttgaattgaggagtagttatttgggattaggatttagggaggtgtgtggttttgagatttaggaaaggagtttttagttgtatttatgggattttggaaggaagagtttagatttgtgggagaatgttagggtatgagagtttttattatatgtttattaggtaattaattagattttggggtgtagagtaatgtgatatattaggaaaaggttaaatttaggaattatatttgttagttttgtgattttgggtaagattttgaatttttgagtttgtttatttattgtaaagggtgatagtaatatttattttttaatattattttgggggttaaatgagtatatgatatgtgaaggtgtttggtatagtgtttgttataagtagtggtttagaaaatgttagttttttttttttttttttaagggtttgagaaatgaagagaaaaatgagggtatatttttggtatttgtgggtagagtgaggttttagtggaagtatttttttttggttgtagtttttaattaggtagttagatatttgttttttttattttataattataaatttgggatgtggttttgtagatattttttatatggttgttgtttgtagggttggggttgaggtgggattttagttttagtttttttttttttttttattttttggagtttgttagttaatttaaaatttttggtatttgaaagttttgatgttttttatttaatttatattgtggttttaaaaaagttaagagtaagtttttgtttaaggttatagaggggaagttatggaaagttttagggtgattgttttgaatttagttttgtggttgaaggttaggagtttatgttttatgttagagaagtgaaatgttagtttttatgggtattgtggagatggtggggattttgattttagattaaaggtttattttagttattttgggttaaaggttgttttaagatattttggatgtggaagttgttaggtttgggggtaagaaagtaggttataggttattttattgaggtgattattagttatatggtatgagtagattaaaaaaattatagattgtattgtaagggattttttttttttgagatggagttttgttttgttatttaggttggagtgtagtggtgtagttttaatttattgtaatatttgttttttgggtttaagtgatttttttgttttagttttttgagtagttgggaggtagagattgtatttattattatatttggttaattttttatatttttagtagagatggagttttattatgttggttaggttggttttgaatttttgattttaggtgatttatttgttttagttttttgaagtgttgggtttataggtatgagttattatgtttggtttgtaagggattttaatagattgattagtttagtttttatttatatagatgaggaaattgaggtttagagagaagagtaatttttttaagattatagtatattagtggtagaattaggatttggatttagggtttttgatttttaggttagtatagtttttattgtttttattatttataaatatggttttttgtttttgtaggatattaggtgttagataggtagaatagaagtgttttagtagttatttgtttgtttttattttttttgatttagtttagtatttttgatttttttagtagtatatgaggttaatagaagtggtttagaaggataagaatatgttgttattattagtttattagattgattagttttaggattgggaagaggtttatttatttttttttttttaggtttgtggtggagtaattaatatttatttgtggggagatattttaagttaggaagttgaaagtggtagggtatggtggtttatgtttataattttagtattttgggaggttgaggtaggtggattttttgagtttaggaatttg

SEQ ID NO: 3873 - DNA, 2480 bp, Artificial Sequence
  chemically treated genomic DNA (Homo sapiens)
aggtgtgtagagttttgatttttggttttggaaaaaaggttagtatagtttggaatgggattattttagaattatatttttttttttttttgtattatttattattaggggttttttaggtttattgagaaatttggttttgtagatttttgtgttatggttttattatttttgttggatagtttaggtttaggggttgttataagatttagtttagtttttggggttatattggtggtgttgtgtttggtgtggaaaattttaaggttagggtttataatttttgttttttatgttttattaggttttttttataggttttgtttttttttttattttatggggttggggattttttttggttaaagtttagtagattggatagattttttagaaagtaatggtaggagatgtatgggatgtttgatttatttgtttttttttatttatgtgtgtagtttttttggttttgggtaaggttaaagttgggtttgtagttgtaggttattttatttttgggtgttttttggtagatgtgggtatagttatggtttttgtttatgtagtttatattttttgggaagagagatagataagagatgggttgaagattaggtagagagggagagagaaaattttaggttgaaaggggatagttaatgatatgtaataattaaatgggttgttattgtatgtattatgtatatatatgtatttgtgtatatatatatatgtgtgtgtgtagtagttatttatatggatattttttagggagaaagtaagggtatggtgtttgggtttagatttaggttttgttttgtgagttgtattgtaaatggtattttgtgatttatggagattaagtttttgttttaggttagattgtggggtatggtttgtagaattatttttgtgttagggtgatttgttttttttttttgagttatttatggttttagggtattttttatttgtttagtagattggattttttttttttgtttgtttggagtggtttatatttttttttgttgattttagttgatgtttatttttttggtgatttgtgaggtgtttttagaatttatgaggttaggggttaagtgagaggttgtaggttataagtttattaagaggttaaggtagatgaaagggaagtgtttttgtttgttaatttattagttttgtgatttgttttttatttttatttataggaagtttaggtaggagtgaagttggtttggggagtggtagtgaaggttgtagatggtgaatatgtatagggtaattttttttttttgggatatattggttttttgttttaagggaggattggtttaattttgattttgtttattttaaatatgggtatgtagtaatatagaatagatttaagaatataaatattttgttagttgtaataaagataaaaatgtttaaagttaaaaattaaataaataaatggaaatgaggaagtttgtattttgtttggtattgtaatttttggttttatttgattttgtgatttatatttttttattttgatttttttattaattaattaaattgttggaatgatgtagagtttaattaagtaatgagttagtatggaaagtgtttttatgttgttgttttgtatagaagttgtaagtttatatggaaagattttttttgttggtttgattttaaaatagtattagtgtttgagttatatagatagtggtgtgtggttaatgtttaatagttggtaggggtggaggttgatttgtagtatttattaatttatgtgggataaatatgttagttatggttaattttaaggtattagggagatgttgttaagggtagagttgggaataaatgtgtatagttggtttttataagttgagataagttagttatagtatgttttttttttagaaaggttgttgtaaagttaggtagatgtaggtgtgaatttggttttttttttggttgtggtttgggagataattgttttttttttttgagtttaattttagaaggggtaggattatttttgttttatagaggagttgtgtaaattaaatttagttatagataggaaatgttaggtaataagagatgaggtttgtttgtgggggtattggtttttgaggttggtgttttttttgtaggtttggagatagtgtggtttttttttggggtttggttggattgggtggttagaggtggtttttggtagagaaatttttttaggttattgagatatatttagttttttattaggttttttgggagttttttgttttggtaagggtttggttagtgggtggtggttagtaagttatttttttgattgttattgatagttgttgttggtggtgggttgagtttagggttgttttttttatttttgtttatttggtttttatggttttttgttgttttagtttttttatagttgtatatattttatggtttgttattttataatgttt

SEQ ID NO: 3874 - DNA, 2480 bp, Artificial Sequence
  chemically treated genomic DNA (Homo sapiens)
aggtattgtgggatggtgaattgtggagtgtgtatagttgtgaagaagttggaatagtagggagttatggaagttaaatgaatagggatgaagggggtgattttggatttagtttattgttgataatagttgttagtaatggttagggagatggtttgttggttattatttattggttaaatttttattagggtaggaggtttttagaggatttgatgagggattgaatatgttttagtagtttgggaaggtttttttattgagagttgtttttggttatttggtttagttaggttttagggaggagttatgttgtttttagatttgtaggagagatattggttttaagagttagtgtttttatagatagattttgttttttattgtttggtattttttgtttgtaattggatttaatttgtatagtttttttgtgagatagaggtgattttgttttttttaagattaggtttagaaaagggaagtagttgttttttaggttatagttaggaaggaagttagatttatatttatatttgtttgattttataatgatttttttaagaaagggatgtgttatggttggtttgttttagtttgtgagagttaattgtgtatatttgtttttagttttatttttggtgatatttttttggtattttgaaattagttgtggttggtgtatttattttatgtaaattggtaaatattgtaaattagtttttatttttgttggttgttaagtgttgattgtatgttattatttgtgtgatttaggtgttgatgttgttttggaattgagttagtggaaagggtttttttgtgtgaatttgtagtttttgtgtagggtagtagtatgaaagtgttttttgtgttaatttgttgtttagttagattttgtgttattttaataatttgattgattagtgagaaaattaaggtgaggaaatatgagttgtaaaattaggtgaaattaggagttatagtgttgggtaaaatgtaggtttttttatttttatttgtttgtttgatttttaattttagatgtttttgtttttattataattagtagggtgtttgtgtttttaaatttattttgtgttgttgtatatttgtatttaaagtggatggggttaggattgagttagtttttttttggaataagaggttggtgtgttttgggggaaggaggttgttttgtgtgtgtttgttgtttgtagtttttattgttgttttttgagttggttttatttttgtttgagttttttgtgggtggaggtggaaggtaggttatagagttggtgggttggtagatagaggtgttttttttttatttgttttggttttttgatggatttgtgatttataattttttatttgatttttgattttataaattttagaaatgttttataaattattaggaagataaatattaattgaggttaatggaagggggtatgagttattttaggtagatagagaggggagatttagtttgttgggtgggtggggggtattttagaattatgggtggtttgggagaggggagtaaattattttgatataaaagtagttttatagattatgttttataatttgatttagagtaagagtttggtttttgtgggttatgaggtgttatttatagtgtaatttatagagtaaagtttgaatttagatttaggtattgtgtttttgttttttttttaagggatatttatgtagatggttgttgtatatatgtatatgtgtgtgtgtgtaagtgtgtgtgtgtgtatgatatatgtaatgatagtttatttgattgttatatattattggttatttttttttagtttgaaattttttttttttttttttgtttggtttttaatttgttttttgtttgtttttttttttagagggtatgaattgtatgaataaagattatggttgtgtttatatttgttgggagatgtttaaaggtggggtggtttgtgattgtaggtttggttttgattttgtttaaaattagaaggattgtatatgtaggtagagggagataaatgggttaaatgttttgtgtgttttttgttattattttttggagggtttgtttagtttgttggattttggttagggagggtttttagttttatggggtggagagaagggtagggtttgtggaaggggtttgatagggtataagggataagggttgtaaattttagttttggggttttttgtattaagtatgatattattagtgtagttttaggagttgggttggattttatggtagtttttgagtttaagttgtttagtaggaatggtggggttgtggtatagaggtttataggattaggttttttgatgggtttgggaagtttttggtaatgagtagtataaagaaggaaaagagtatggttttgaagtggttttattttgggttgtgttgattttttttttgggattaaagattagaattttgtatattt

SEQ ID NO: 3875 - DNA, 2487 bp, Artificial Sequence
  chemically treated genomic DNA (Homo sapiens)
ttaaaagagttttgtggaggttaggagtggtttttgatgtttatttgaagtttttagatgttgttaggagggggggtttttttgggtttttaatatttttttgtttgttgttgttagtgtatttttgtagtttagtgtgtatttattttatgtatgttttgtgttgtgtttttgggttttgtttatggttttaataaattttttgtttggtgtgatattggttgtttttagagggtgttaagatatggggttaggtgtttaggggttgtttattgtggtagggatagagtttttagtggtgggagtgttgtggtaattttatttttttagttttttttgaaattgtgttgggggtttttgtggtgttgttttggggttttatttgaggtgttgtatttagaagtatttttgggaattttttttagatatatttgattggttatagaggaatttgaggttgtgtaatggggtgttttttttatgtgtatggattgggggttagtatggtttaggttagtgtgtagtgggggtatgaattttttgaagaataatttggttgggtatggtggtttatgtttgtaattttaatattttgggaggttgagttggggtgtattatttgaggttaggagtttgagattagtttggttaatatggtgaaattttatttttataaaaaatataaaaattagttaggtgttttggtgtatatttgtaattttagttatttaggaggttaaggtatgagaattgtttgaatttgggaggtggaggttgtagtgagttaagattgtattattgtattttagtttgggtgatagagggagattttgttttagaaaaaggaaaagaaaaataatttatttagattttaaaatggatatttaaaaaattttttagagaaagttagaagaaaataggtgatttttttattatgtgtttaggtgattgtagatgtttggtaatgtttttttttaggtttttttgggtgagtttgttttttaggtaggggttagtatggttggggtttttttgtttgagtttaggatttgtgtaatattaggaagataatagttgaaggttttttagtgagttaagggaagtatatataaatttattatataaatattagaaagtgttgtttgtaaaaaatatgtttttatagagttaataagtagagaaatagttgtttagtgttaggaagtgtattatgatttagaggtttagtttgtgtgtagtgtatagatttgaggttttagagagattgaggatgtagattagtggtatgatggaaatgtagaatgtttatgagaaaatttttttattaattgagataaagttgtaaagaggtagatagttttattgggtgtgtatgtttgaaatttgtgttttttgggttagggtatttggggtgtggtttttagttttttgtagttgttgtttggaaattgttgttatttatttattttttttttttgtttttttatttaggtgagaattttttaagttttgttttttggtgtttttgttttgtttttgtttggtttggttttgtttttgtttggttttgttttttaatgtgtttttaggtttttttttttttagttggtttttaggatggttgttggatgtgtttgtgagttttttgtttgtttgttttttatttttttgtagttttttttttaattttatggtttttttgagtttggttgttttttatgttttatgttgggtttggttggttttggggtttatttttttggttttattttttttatagttttgagggtttttttgtgtttaggtttttggtagttgttttttgtgtagattattgggtagatttagttgatttttaggggtatttttttggtttattattgggttggtgttttgtagaatgagttgtgagagttattgtggttggttagagggtgttatttatagttattttagatttataggagtttttgttttgatttttgtatttatttgtgttttgttttatgtttttttttagttatttgagttgtaggttttggttattttagattttttttttttgttatttttatttttattttagtatttttatgtttgttttaggttttattttttttttttttgtttggattaaattattttgatttttttgggtttttgtgtaatagtttgttttggttgttgttttattgtatttgtaaatttatttgtatttatatttaggttagggtttttaaatagaagttttagtagatttttttttttggttagttttttgttgaattaggaagtaggtttttgttgaattttagtatgatttgtttttatttttgtattttatttttgttttgggagtttttgggtttttgggtgtatttgttgtttttttttgtttgttattgggtgattttttgtttttgtgggtgtttttgggttttggttttgggttttttgaggatttgtttttttggtagtggttgttga

SEQ ID NO: 3876 - DNA, 2487 bp, Artificial Sequence
  chemically treated genomic DNA (Homo sapiens)
ttagtagttgttattaggagagtaagtttttagaaggtttgagattagggtttgggagtgtttataaggatgggaggttatttagtgataaatagggaagggtagtaggtgtgtttaggaatttagaggtttttagagtagaagtgggatgtaggggtgggggtgggttatgttgaggtttaatagggatttgttttttggtttaatagggagttggttagagagagggatttgttgaggtttttgtttaaaaattttggtttgggtgtgggtgtaagtggatttgtaggtgtagtgaggtagtggttggagtaggttgttgtatgaagatttaggaaagttagggtggtttgatttaggtagaagagggggaaatggagtttggggtagatgtaaaggtgttggggtgaggataagggtgataggagggaggagtttggggtgattaaggtttgtagtttaggtgattgggaaaaaatataaaatagaatatagatgaatgtaggggttgggatgaaggtttttgtgagtttgaagtgattgtgagtggtattttttggttagttatagtggtttttatagtttattttgtagagtattggtttagtgatgagttgaggaagtgtttttggaggttagttggatttgtttagtggtttgtatagggggtggttgttaggggtttgagtatagggaaatttttgaaattgtgggagggatgaagttagagaggtagattttagaattgattaagtttagtatggggtgtggagggtggttaagtttaagaagattatgagattggagaaggagttgtagagaggtggaaggtagataggtgaaggatttatgagtatgtttaatagttgttttaagggttggttggagggaaagagatttgaagatatgttggggggtggggttgggtaggggtggggttaggttgggtaggggtgggatgggggtgttggagggtagggtttggagaatttttatttgagtggaagagtagagggaggaggtgggtgggtggtagtggtttttaggtagtagttataggggattgagggttatattttgaatgttttagtttagggggtataagttttaaatgtatatatttagtggggttatttgtttttttatagttttattttaattagtaggaaagtttttttataaatgttttgtgtttttgttgtgttattggtttgtgtttttggtttttttggggttttaggtttgtgtgttgtatatgggttgaatttttggattatgatgtattttttaatattgggtagttatttttttgtttgttggttttgtgaagatgtgttttttatggatagtattttttaatgtttatgtagtaagtttgtgtatattttttttagtttattaaggaatttttaattgttgtttttttggtgttgtatgaattttgggtttagatagagggattttggttatgttgatttttgtttgggaggtgggtttatttaggagggtttgggagggaatattgttgggtatttgtagttatttaagtatatagtgaaaaagttatttatttttttttggttttttttggagaattttttaaatatttattttaagatttaagtagattgtttttttttttttttttttgagatggagtttttttttgttgtttaggttggagtgtagtggtgtaattttggtttattgtaatttttgttttttaggtttaagtgatttttatgttttagttttttgagtagttgggattataggtgtgtgttaggatatttagttaatttttgtattttttgtggagatggggttttattatgttggttaagttggttttaaatttttgattttaggtgatatgttttggtttggttttttaaagtgttgggattataagtgtgagttattgtgtttggttagattgttttttaaggagtttatgtttttattatatattgatttgagttgtgttggtttttagtttgtgtatgtggaaaggatattttattgtatagttttggatttttttgtggttaattgagtgtatttagggagaatttttaagggtgtttttagatatggtattttagataaggttttagagtagtattgtagggatttttggtataattttggaaagagttaaaagggtgagattgttataatatttttgttattggggattttgtttttattataatgggtagtttttgggtatttggttttatgttttagtattttttagaaatagttaatgttatattaagtagagagtttattgaggttatgggtagggtttaggaatatagtatggggtgtgtgtggggtggatgtatgttggattgtaggggtgtgttagtagtggtaagtggaggggtattgggggtttaggagggtttttttttttagtagtgtttaggggttttaggtgagtattaagaattatttttagtttttgtagggtttttttgg

SEQ ID NO: 3877 - DNA, 2429 bp, Artificial Sequence
  chemically treated genomic DNA (Homo sapiens)
aaaatataaaaattagttgggtgtgatggtatgtatttttagttttagttatttgagaggttgaggtaggagaattgtttgaattagggaggaggaggttgtagtgagttgagattgtgttgttgtattttagtttaggtgatagattgagattttgttttaaaaaaaaaaaattagttgggtgtggtggtatgtagttgtaattttagttatttgggaggttgaggtgggaggatggtttgagtttaggagtttgaggttgtagtgagttatgattatatgattgtatttgggtgatagagtggaggtgatgtgtttttttaaatagttatgagaataatgtttttttttttgttttggtttaggaattttattattatgttatgttgttttgttgtgttgtgttggtgttgtaggttggtggtaggatatttgtttattttataggttttgtttttagttttgaagtatggttttttttgattgttgtttatatggttttttgttgttagtttgggttatatatttgggtttttttatttttgtgggtttggtgaggtttggttatgtgtttgtgttatgttagttgtttttaagatgatgtttttagtaggattatatgtgaatatagtgattattatggttaggaggaagttggttgtttattattagtttgtttagggattttttgtattttggtggggattagtagattttgttatgagagagtagaaggtagtatgttgatttttaggagtgtttatagtgtggttgggtagagtagagttataaatgaatagatttagtgttgaggttattttgatttttttaggggttgttaggttgtgggtgtagggtttagtaggtttatttgattttagtattttatgtgtgtttgtttggggtggttagtttattgtttttttatttttagtttaattagtaggtgttttattatgagtttttttaggtttattttgtttatttttgttatgtgatttgggatttttgagatgagattatagttgtagagtatatagtatagggaggagtttattagtatttttttatttgtggtgttttggtttagtttttttttggttggggttggatttgttttggtagttaggttttgtgttatttgttttatttgttttgtaatttatttgtttaattgttattttggtggttgtgaggttagttgatagaatggagaggggtaagtattttttgtttggagaggatgggtgtgtggttatttgattgtttttgtaagtttggtggttgtgtgtaggttgttttggtggttttagttttttggggtaggtggggttttgtgtaggatgtagagattgggtgtggttttttgtagatgtttagatgtttttgggttgtggtttttgagatttagggtaaggttgttgattggattttagatttttttgtttgtttttttttttagttgttttttgtggtttggttttggttgtttgggttttagggttaattttgtatggttttgattattttggtttttttggattgttaaggatatgttgagagttggttgggtttggtttaagtgttgagtttagggtaggggtggggataggtagggtggagttttatttggaaagttaggtatgattttttttgggatattaatttttttgtagagttggttaatttgggtaattttgagggtgagttttgtgtggtataagagatgttttgaggagtttagttttatttggtgtgatgggatttgtggaagttgtgggaagtggttttggttatttgtgtgtttatatgttttgtgtttagattaagatatggtgattaaaaggataaggattatatttatggtttttttttagagtttggtaagttagtaggtatgagagggtgttggaatgttgtggtgggtttgtgtggggattttgtaggatttagggaatttgtagggtttggtttagggagtatataggggtttaggtaaaggtaaggttataggttgggggaggtgaagttggtagggggagggggagatttgttggttagagttgggttgggggttggtgggtagtgggtttggtttgagtagggggtgagggattggagagaaaggtagtttttgatggttttttttttaggggttggtttttttttggttttttttttttaatgattgtgtttttgttgaggttatagtttttggttttgtgtttatatttttagtgttaggttgtttggagatttgtttatggtttttttttggattatggagttttttttgttattggtgtttggagggttggtttgttgtttttgtattttggttagttaggatggtggggttttgtagttgaattgggggtgtttttttgtttgtttgttttatgtgtattagtggttagaattgtttttat

SEQ ID NO: 3878 - DNA, 2429 bp, Artificial Sequence
  chemically treated genomic DNA (Homo sapiens)
atgagggtagttttggttattgatatatgtaggatagataggtagaaaggtatttttagtttagttgtaggattttattattttagttggttagggtgtaggggtagtagattagttttttaggtattagtggtagggagggttttatggtttaagggaaggttataaatagatttttggatagtttggtattggaggtgtgggtgtagagttaagggttgtggttttgatgaagatgtggttattgggagggaaggattagaggaaagttagtttttggggaggggattattaggaattgtttttttttttaattttttgttttttgtttgagttaggtttattgtttattggtttttaatttagttttagttagtaggtttttttttttttttgttagttttattttttttgatttgtgattttgtttttgtttgggtttttgtgtgttttttaagttaagttttgtaggttttttaggttttataaggtttttatataggtttattatagtattttaatatttttttatgtttgttgatttgttaggttttgggagggagttatggatatagtttttgtttttttggttattatattttgatttgggtgtagggtatgtgggtatatgggtggttaggattattttttataatttttataggttttattatattaggtgaggttgggttttttagggtattttttgtgttatatagagtttgtttttaaggttgtttgaattggttaattttataggagggttggtgttttagggagaattgtgtttggttttttaggtgaggttttgttttgtttgtttttatttttgttttgggtttagtatttgggttaagtttaattaatttttagtatgtttttggtagtttaagaaggttagagtggttaaagttatgtagggttggttttgaggtttaggtggttagaattagattataaagagtagttggaggaagaggtaggtaggagggtttggggtttagttagtagttttgttttgggttttagaggttatagtttagaagtatttgaatatttgtaggaagttatgtttagtttttgtattttgtataggattttgtttgttttaaggggttaagattattagggtagtttgtatataattattaggtttgtagaagtagttagatggttatatgtttattttttttaggtggaaaatgtttatttttttttattttgttaattggttttatggttattgggatagtagttgggtaagtaggttatagggtgggtggggtaggtgatgtaaaatttggttgttagggtgggtttaattttaattggaaggaggttgggttagggtattataggtgggaagatgttgatgagtttttttttgtgttgtgtgttttgtagttgtgattttattttaagagttttaggttatatggtagggatgggtaaggtgagtttggaggggtttatggtggggtatttgttggttgggttagaggtgaagaagtagtgagttggttattttgagtaggtatatgtgggatgttgggattaagtgggtttgttggattttgtatttatggtttggtagtttttgagagagttaggatggttttggtattggatttgtttatttgtagttttgttttgtttagttatgttgtggatatttttggaagttagtatgttgttttttgtttttttatagtaggatttgttgatttttgttagggtgtaagaggtttttgggtaagttggtgatgggtagttagtttttttttggttatggtggttattgtgtttatatgtggttttattagaaatattattttgaaagtaattggtatgatataggtatatggttaggttttattaggtttatagggatggaagagtttagatatgtagtttaggttgataataggaggttgtgtgggtagtagttgagaggagttatattttaagattgaaagtagagtttgtgaggtgggtaaatgttttgttattgatttatgatattagtatagtgtagtagggtaatgtggtatggtggtgaggtttttgagttaggataagaaaagaagtgttgtttttatggttatttgaggaagtatattatttttattttgttgtttaggtgtagttgtgtgattatagtttattgtagttttgaatttttgggtttaagttatttttttattttagttttttaagtagttaagattatagttgtatattattatatttggttaattttttttttttgagatagagttttgatttgttatttaggttggagtgtagtggtgtgattttagtttattgtagtttttttttttttggtttaagtgatttttttgttttagttttttaaatagttgggattagaggtgtgtgttattatatttagttaatttttgtatttt

SEQ ID NO: 3879 - DNA, 2267 bp, Artificial Sequence
  chemically treated genomic DNA (Homo sapiens)
ttaagggtttttatttgtttttttagttttagttttttttttgaagaaagaggtaagatgttagtggaaaataatttttattgagattttattaattgtaaaatttgtttttggtattaagttttttttttttttgtaatttggtttttttttagtggtttttgtggggagagaggtagtggttagaggtagaagatgataggtgatagtagatgtttattttagaggagattaagattttgggttagtttttatagttataagagaggtttaaggtattaagattatttttattttggttggagttaaaggtaggtggttgtttaagttattatatttagtgaggggggtaggtagaggtgtttattatgaatgttttttttttttttatggtttggaagtggttatggttaaatttggaggtggtgttaatgaatttaaggttaattttttttagagtttgttgttttgtttgtattagtaaggattatgggttaagaggggaagggatttaggattatgaggagttaggttttttttagtattgtttatagtgtttttgtatttgggaagttatatgattaatttagttttttttattatttggtagatgaggatatatttaaagtagtaaatagtttagtaaggttagattgggaatttttttattttaggattttaaagttagtgtgaaaggattgttaatatttttttttttttttttttttttattatagggttattagtgtttgtggttttggattttttttttataagagtttttttatgataagttaggatttgttttattttgtggagggtgagtatttgttttttggtttttattatatagttttttagtatgataaagttattggttattttattatagtggataaagttattttggaaaatgagtattggattagtataggtttaggaggggattgttgtgtagatgatttttttaggtttaggttttttttgattatagggttgtttttagaaggaaggtaataaggaatggttttgtagtttgttttgggtgttgtgtttagtgtatattttaggttttattattgaatagttgagtttgagattttattttttattagttaattttgatgagtggatttagatgataatatgttatttataagggatatagttaggtgttgtgttggttttagttaatgattttgttagtagtttttaggaagtagtttatttttaaaagtatgaggtttgggatggttttatagagtagaatatttattatttattagagggttgatgtttttgttagataggttatagttagtggaggtattgtttttgattagtttgttgtttttgataaggtagttttggttaattttataaatttgaatgaataagaagggtgtaaggttggggtattagggataaataatttagatatgttagtgtgttgatttgtaaagtatgttagaaggtagttgaggttttagttttagttatagtgtattttaaggttagagtaaaaagttggttggttttttaggtttttttttgtaaggtggttgggttaaaattaaagattttgttgtataatataggtttgttatttttttggtggtggtattagggattaataagattagtatttttagttatattagttagttttattatagttattttataggatggtattttataaattattaagatgggttagaattgattatgagaagtaagttattgatgtttatgtgatgtataagttatagttagtgaagtagtattgataggtatagaaattttattttttattatgggggtttttttttatttttagggagttatttttagaattttatttttttgttgattttagtgtggtgatggtagtttttttgtttagtgtgtgttatagagaaggttatatgagtaggatgttatgttttaatataggttattttgtgtaggttttggtgggttttgtggggtagttttttggtgtgttaatgattggtgatttttggaatggatatatattattttattttagtgtttagtattttttattgatttttttttgttatttagtaattattaattatggttgggttatttgagggagtgataagattattttatgtgtattatttataggttttttttgttaagttggataggttttgggggtgttattttgaatttaattttgaatgggtgttttttaaggtatttattagtttaagtttttttatttatagggattg

SEQ ID NO: 3880 - DNA, 2267 bp, Artificial Sequence
  chemically treated genomic DNA (Homo sapiens)
tagtttttgtgaatgggggagtttaaattaatggatgttttaaaaagtatttatttagaattgagtttagggtgatatttttagagtttatttagtttgataggggagatttgtgggtaatgtatatgaaataattttattatttttttagatgatttagttatggttggtaattgttgagtagtaggaaggggttagtgggaggtgttgggtgttgaggtgaagtaatgtgtatttattttaggggttattagttgttggtatattaagaagttgttttgtaagatttattgaggtttgtgtaaggtggtttgtattggggtatggtattttgtttgtgtagttttttttgtggtatgtgttgggtagaaaggttattattattgtattgagattaataagaaggtgaggttttgagagtggttttttgggggtgggaagaggtttttgtgatggggagtggggtttttgtgtttgttagtgttgttttattgattgtagtttatgtattatgtggatattagtggtttgttttttatggttagttttggtttattttgatgatttgtaaggtgttattttgtagagtggttgtggtggggttgattggtgtggttggggatattagttttattggtttttgatgttattattaggggggtgataggtttgtgttgtatagtaggatttttagttttagtttagttgttttatagaaaggaatttggagggttagttagttttttgttttgattttgggatatgttgtgattgggattgaggttttagttgttttttagtgtgttttgtaggttagtatattggtatgtttgggttatttgtttttaatgttttagttttatattttttttgtttatttagatttataagattggttagggttattttattaaggatggtaagttgattaagaataatgtttttattgattatgatttatttgataagagtattaattttttggtaagtaatgggtgttttgttttgtgaggttattttaggttttgtgtttttggggataggttgttttttaggggttgttagtaggattgttaattgaagttaatataatatttagttgtgttttttgtaagtggtatgttgttatttgagtttatttgttggggttggttggtgagaagtggggttttaggtttagttgtttagtgatgaggtttggaatgtgtgttgggtatagtgtttgagatagattgtggaattgttttttgttgttttttttttgagaatagttttgtggttagggagggtttgaatttggaggggttatttgtatgataatttttttttgggtttgtgttgatttgatgtttgttttttagggtggttttgtttattatggtgaagtgattaatgattttgttatgttgaaaggttgtgtggtgggaattaagaagtgggtgtttattttttgtaaggtgaggtaggttttgatttgttatgggggggtttttgtagagggaggatttaaggttatagatgttggtggttttgtggtgggagaggaaaggaaggagagggtgttggtagtttttttatattggttttgaagttttgagatgaggaaatttttagtttggttttgttgggttgtttgttgttttgagtgtgtttttatttgttggatggtgggggaggttgaattgattgtgtggttttttagatgtaggggtgttgtgaatagtgttgaggaaagtttggttttttgtaattttaaattttttttttttttggtttatagtttttgttggtgtagatgaagtggtgggttttggagaagattgattttaagtttattgatattatttttaagtttggttatggttgtttttagattatggaggagaagaaagtatttatggtgagtatttttgtttgttttttttgttgggtgtggtggtttgggtagttgtttgtttttggttttagttggggtaggggtggttttgatgttttaggttttttttgtggttgtggagattggtttagagttttggttttttttagagtgggtatttgttgttatttgttattttttatttttgattattgtttttttttttatagggattattgaagaaagattgaattgtaaaggaagaaggagtttaatgttaggaatagattttgtagttggtggggttttaataaaagttattttttattgatattttgtttttttttttaggagagaggttgggattggggaggtagatgggggtttttga

SEQ ID NO: 3881 - DNA, 2426 bp, Artificial Sequence
  chemically treated genomic DNA (Homo sapiens)
gttttggttaattttataaatttgaatgaataagaagggtgtaaggttggggtattagggataaataatttagatatgttagtgtgttgatttgtaaagtatgttagaaggtagttgaggttttagttttagttatagtgtattttaaggttagagtaaaaagttggttggttttttaggtttttttttgtaaggtggttgggttaaaattaaagattttgttgtataatataggtttgttatttttttggtggtggtattagggattaataagattagtatttttagttatattagttagttttattatagttattttataggatggtattttataaattattaagatgggttagaattgattatgagaagtaagttattgatgtttatgtgatgtataagttatagttagtgaagtagtattgataggtatagaaattttattttttattatgggggtttttttttatttttagggagttatttttagaattttatttttttgttgattttagtgtggtgatggtagtttttttgtttagtgtgtgttatagagaaggttatatgagtaggatgttatgttttaatataggttattttgtgtaggttttggtgggttttgtggggtagttttttggtgtgttaatgattggtgatttttggaatggatatatattattttattttagtgtttagtattttttattgatttttttttgttatttagtaattattaattatggttgggttatttgagggagtgataagattattttatgtgtattatttataggttttttttgttaagttggataggttttgggggtgttattttgaatttaattttgaatgggtgttttttaaggtatttattagtttaagtttttttatttatagggattgattaatataattttaagtttttttttgtagttattagtaggttataaagagtaaagggtttaggaatgtgttaagaagttgttttttggttttttgttattttagttatttttgattataaggttgtttttagaaggaaggtagtagagaatggttttatattgtttgatttgggtgttgtatttagtgtttattttgagttttattaatgaatagttgggtttgaaattattttttttttaggtttgtatagtaatttaagttattgtaaagtttatttttgtagtttttgtttttggttattttgatgatgttgattattttattttgtttaaatatttggtttataggtatttgttgtttaagttttttgtgggtttagtttagttttttggttatagtgtttttgtttatttggatttttattaggtgggtttttttttggtgtagaggaagtaggtgtatttaggagaaggtagatatagtttagttttagttgttagtgttttttttatagtagaggaattgtagttttatgtggtttgattgatgttaagtatatggtaaaaagttagtaattttgaataagttattgaattttattaagaggaaggaatttttatttttgttaatagtaataatttaattttggatattggtgtttgagttattgttaggatgagtggataagatttatattataggtaaataattagattttagtttttattagtttaatgtttttgtggttgttttttgggttagttttttttggggtattgtagtggttttattttagttatttatatttgttttagtgataagtttgtttttgagagagtataagttttaagtaagaaaatgtattattgggagtggtggtttatatttgtaattttagtattttgggaggttgaggtaggtggattatttgaggttaggagtttaaaattagtttgattaatatggagaaattttgtttttattaaaaatataaaattagtagggtgtggtggtgtatgtttgtaattttagttatttaggaggttgaggtaggagaatagtttgaatttagaaagtggaggttgtagtgagttgagatagggttattgtattttagtttgggtaataagaatgaaattttgtttttaaaaaaaaaaaaatgtatttaagtataaagtttttatttaaggatagtttggtaatgttttgataaaattttaatggtggatatgtatttttatttgtggtggtttttattatatggggttgtatttagtatttgagattagttaggataattagtaataggatagtaagaggtatttattttaattaagttaataaaaagtttgtttagtttattaattaggtttttaggagagtagttagtattttataattgatttttaggtaggtattttagtgttattggtgagttattagttgaattttaaaggggaatggtttttttgttaagggttagtaaggatatagtgttttttgttggtaagggagaagtt

SEQ ID NO: 3882 - DNA, 2426 bp, Artificial Sequence
  chemically treated genomic DNA (Homo sapiens)
ggttttttttttgttagtagagggtattgtgtttttattggtttttagtaagggaattatttttttttaaaatttaattggtgatttattagtaatattgaaatgtttgtttgaaagttggttgtgaggtattggttgtttttttggaaatttagttgatgagttgagtaggttttttattgatttggttagagtgggtgttttttgttgttttgttattggttattttggttgattttaagtgttgagtgtaattttatgtggtgagggttattatggatgagagtgtatgtttattgttgaaattttgttaggatattgttaggttgtttttgagtgaaagttttatgtttaaatgtatttttttttttttagagatagaattttgtttttgttgtttaggttagagtgtaatagttttattttagtttattgtaatttttattttttaggtttaagttatttttttgttttagttttttgagtagttgggattataggtatgtgttattatgttttattaattttgtatttttagtagagatggggtttttttatgttggttaggttggttttgaatttttgattttaggtgatttatttgttttggttttttaaagtgttgggattataggtgtgagttattgtttttggtgatgtatttttttatttagagtttgtgtttttttaaaagtaggtttgttattagggtaagtgtaggtggttgaggtaaaattattgtagtattttaaaaggaattgatttaaaggatagttataggaatattgggttggtaggggttgggatttggttgtttgtttgtggtgtgggttttgtttgtttattttgatagtaatttaggtattagtatttaaagttaagttgttgttgttggtaaaaatgaaagttttttttttttggtgaggtttagtgatttgtttagagttattggttttttgttgtgtgtttgatattaattaggttgtatggagttgtagtttttttgttgtgggaggagtgttggtagttggagttgagttgtgtttatttttttttagatgtgtttgttttttttgtgttagaagaaggtttatttgatggagatttaggtgaatggaggtattgtggttgagaagttggattgggtttgtgagaggtttgagtagtaggtatttgtgaattaagtgtttgggtaggatgagatgattgatgttattggggtgattaagggtaaaggttataaaggtgagttttgtggtggtttgagttgttgtgtaaatttgggggagaagtggttttaggtttagttgtttgttgatgaggtttagagtgagtgttgggtatagtgtttgaattggatagtgtagaattattttttattgttttttttttgagaatagttttgtggttagaagtggttgggatagtggagggttaggggataattttttaatatgtttttggattttttgttttttgtagtttattgataattgtaaaggggagtttggaattatgttagttagtttttgtgaatgggggagtttaaattaatggatgttttaaaaagtatttatttagaattgagtttagggtgatatttttagagtttatttagtttgataggggagatttgtgggtaatgtatatgaaataattttattatttttttagatgatttagttatggttggtaattgttgagtagtaggaaggggttagtgggaggtgttgggtgttgaggtgaagtaatgtgtatttattttaggggttattagttgttggtatattaagaagttgttttgtaagatttattgaggtttgtgtaaggtggtttgtattggggtatggtattttgtttgtgtagttttttttgtggtatgtgttgggtagaaaggttattattattgtattgagattaataagaaggtgaggttttgagagtggttttttgggggtgggaagaggtttttgtgatggggagtggggtttttgtgtttgttagtgttgttttattgattgtagtttatgtattatgtggatattagtggtttgttttttatggttagttttggtttattttgatgatttgtaaggtgttattttgtagagtggttgtggtggggttgattggtgtggttggggatattagttttattggtttttgatgttattattaggggggtgataggtttgtgttgtatagtaggatttttagttttagtttagttgttttatagaaaggaatttggagggttagttagttttttgttttgattttgggatatgttgtgattgggattgaggttttagttgttttttagtgtgttttgtaggttagtatattggtatgtttgggttatttgtttttaatgttttagttttatattttttttgtttatttagatttataagattggttagggt

SEQ ID NO: 3883 - DNA, 2306 bp, Artificial Sequence
  chemically treated genomic DNA (Homo sapiens)
tagtggtttatgtttgtaattttagtattttgggaggttgaggtgggtggattatgaggttaggagattaatattattttggttaatatggtgaaattttttgtttattaaaaatataaaaaattagttgggtgtagtggtgggtgtttgtagttttagttatttgggaggttgaggtaggagaatggtgtgaatttaggaggtggagtttgtagtgagttgagattgtgttattgtattttagtttgggggatagagtgagattttattttaaaaaaaaaaaaaaaaaaaaaaaaaaaagtttggtagggagtaggatatttggattttattttgttgtttttttggttgtgtgatatttaggttatgttgtttttttgggttttggtttttttatttgtttaagaggggttgatagttgtatttgtttttttagtttttttttaggaaggtggtagttataattagtatttgttgaggttgattttgtattaggtttaggataggtggggtttagggaggtttgttttttgttatgtttttttgttaggggagttttgaggtttttttagtgttatttttatgttatattttgttttagttttgtgtgttttaagttagggtattgagtgtgttagtatttgtagggataggtattggattttgggtggatttgagggtttgtgattatttttttagttgtttttttttagaggttattttttttaaggaaggaaagaatttttttgttattttttgtagtgtggttagtttaggttagtttgtatagtagggttagaattagggtttttggggagggatgtttgtttgtttagtgggaggagatggtatgtttgtgaagttgttatttagttagtttgggggttatgagtgttgtttttggtggtgttgtgtggggagggagggggttgagtagggtgggtatttgtatgtttgtgttttgttggtttttgatagatgatagttttttttttagggtttttagtgtagagttttttggggatattatggttatttttgtttagatgagagggagttggttgtttgtgatagtgttgtaaaatgttgttagggtttttttttttttttttttttttttttttttgtttttttttggttggtggttttttgtaggtttttgtttttgttggtgttggttataatgtttttatttttagggttttggtgttttagttttttgtgtttattgtgtttgtttgttagaatttttgtgtttttggtgtgtgtggtttgttgagttttgagtttttgttttttttagttttttttttttttgtgtttttaggaggtgtttttggaagttatggagttttattggtattaagattgattgttttttggggtgaggtagtaggttgtatagtttggggttttgttttgttatgggataattatataatttattgttttttttgaagtggttgtaatatttgtggtggatagagtgtttggaattttggttgggagtgggtagggttaggtttgggggtagttttggtagtagttgggggtaggggttgtttatattgagaagtttgataggtttaggtgttatttgttgtgtgattttggataggtttttgatttttttgggttttagtttttttttttgtaaaatggaggtaaatgaggatggaaggagatgtagtgtggagtattgagggtagaggagagttgagttgattttattttttgttttagttgtattgagagaggtgatttatgtagttgtttgtttgatttttgttttttaatattttttaatattttttttgttattaggtttaggtttatgggtggttttgagttgtattttttattgagtattaggagaaggtattgtggggttaggggtggttgagatgtttggaggttatagggttgtgagtattggtgttgtttattattttaggtttttagtatgtgttttagtttggttagtttagtggtagggtttttgtttgtggaggaagggaggttaaggtattttttttgagtaggaagtgagaggaatagttttgtatatattgggttttatatggtataatttgaaggtagatagtggtttttttgtatttggggaaattgaggtttagagagttagggattttttaagattagttagtagtagttgtttttttttggggtgttattttttttgttttttttgttttgtgtttgtttagtttttttgttttggtgattgaggattgttaggtaggggttggtgttgggtggggggtggtgggtttttttgtagtgta

SEQ ID NO: 3884 - DNA, 2306 bp, Artificial Sequence
  chemically treated genomic DNA (Homo sapiens)
tgtattgtgggagggtttgttgttttttgtttagtattagtttttgtttggtggtttttagttattagagtaggagggttgggtaggtgtagggtaggagggataggggagatggtattttaggaaggggtagttgttgttggttggttttgggaagtttttggttttttgggttttagtttttttaggtatagaggagttattgtttgtttttagattgtgttatgtgggatttagtgtatgtagagttgttttttttattttttgtttaggaaaggtgttttggtttttttttttttataggtagaggttttgttattgagttggttaggttggggtatgtgttgggaatttggggtgatgggtaatgttaatatttgtagttttgtgatttttaaatgttttggttatttttggttttatggtgtttttttttggtgtttagtggagggtatggtttagggttatttatgagtttgggtttgatggtggggggagtgttggggagtgttgggagatagaggttagataaatagttgtgtggattgttttttttagtgtggttggggtagagggtggggttggtttagtttttttttgtttttgatgttttatattgtatttttttttatttttatttgtttttattttatagaggaggaaattgagatttagagagattaggggtttgtttaaggttatatagtaagtggtatttaggtttgttagattttttagtgtaggtggtttttgtttttgattgttgttaaggttgtttttaaatttggttttgtttgtttttagttagggttttagatgttttgtttattgtagatattatagttattttaggaaagatagtagattgtatagttattttatagtagggtagagttttaaattatataatttattattttattttaaagggtagttggttttggtgttgatgggattttgtggtttttagaggtattttttggggatgtgggaggaaagagggttgaggagaataggggtttgaggtttggtaggttatatgtattaagggtatagggattttggtgggtaggtgtggtgggtgtagggggttgggatgttgaaattttgggagtggggatattgtggttagtattagtagggatgggagtttgtaggaaattattaattagagagggatgaggaagagagaaaggaggagggagggaaagttttggtggtattttgtgatgttgttataggtagttggtttttttttatttggataggagtggttataatgtttttaaggaattttgtattggagattttaggaggagggttgttatttgttgaaggttagtaagatataggtatgtgagtgtttattttgtttggttttttttttttttgtatagtgttattagaagtagtatttgtggtttttaggttggttgagtagtggttttatgggtgtgttgtttttttttattgggtaggtaggtatttttttttaggggttttggttttggttttgttgtgtaggttggtttgagttgattgtattgtaggaggtggtgggaaggttttttttttttttgagggaagtggtttttaggggagagtagttgggggggtagttatagatttttaggtttatttagggtttagtgtttgtttttgtgggtgttggtatatttagtgttttagtttgggatgtatagggttgggatagagtgtagtatgaggatgatattgagagggttttggggtttttttagtaggggaatgtggtgagagatgggtttttttaagttttgtttattttgggtttggtgtagggttagttttaataaatgttaattgtggttattatttttttggggaaaagttgagggggtagatatgattgttaattttttttaaataggtgaggagattgaggtttagagaggtaatgtgatttggatgttatatagttaagggggtagtagagtgaggtttaaatgttttgttttttgttaagtttttttttttttttttttttttttttttgagatggagttttattttgttttttaggttggagtgtagtggtgtgattttggtttattgtaagttttgttttttgggtttatgttatttttttgttttagttttttgagtagttgggattataggtgtttgttattatgtttggttgattttttgtatttttagtagatagggggttttattgtgttagttaggatggtgttgattttttgattttgtgatttgtttgttttagttttttaaagtgttgggattataggtatgagttattg

SEQ ID NO: 3885 - DNA, 2473 bp, Artificial Sequence
  chemically treated genomic DNA (Homo sapiens)
tagttttgatgtttgagtatttttaatgtttgattggattttttattttttatttttttttgggtgatgttggttattttggtttgtttttagttagaatttagtttggttagtttagatagagtgatttatttttttagttattttttatttattaattttatttggagttttgtttttgaatttttatatttttttgtgtttgaaatggagtataattttttttttttgttgtaaaattttattgtaggggtttttgtgagtagagattgttttattgtttggaataagttttagaagaattttatttttaatatgggaagtggattagagggtagagtttttagggtttttttttttagttggtagtttatagttttatttttagttttagaggtataggttttttattgttgggttaggaatgggaatagtaggggttttggagtgggtagggggtttttgggtaggaggtgtatagagggtatgggttggttattttgggtttggtaatggttatttgttttttgtatatgatggttttatagggtatttttatgtttattatgttataaatgatgttttaaggatttgaattgggggtggaattgatatttttggatttttaagtttaggtgtattttaaaattgttgagataggatggttgaggttttagaattttaaggtgtaatattatttatttagtttaagttgtggttttaaatttttatttgaaaattttggttttgtttatgtgggttagattatgttgggtaggaggatttggtttttgaggatttagttgtttagagtggtttagatttaaagttaaaaggatgttttttttattttttttttgggttttgttttttttttaattttggagtgtgtggttagatgttagttagatgaggttttgtatttttggatagttttttgatttttttttttttttattatgaggtggtttttgttattgggttttaggataaagttttggggtagtttggatggtgttttgattttaatttttttagggggtttttagttaagggttttttttgtatggaatttttaaagttagtaagaaatagaagttttttgaatattgttaatgttttgaatatttagtatttatgaaatttaagtgaattagttaaaaataaaaatgtggtgatgattatttgttgtgggtttaatttaatttgaggatttatttaaaataaaattttggggaatgaaaatagaagttagtagtatatttttagggttagtagggagtatatttgtttagtatttgagtttttgttaggtgttagattttgtttttgatagttgtgttgggtgtgtgtatataagttttgggtggaggttagggttgtatttagtgtatatgagatgttatgtgggattggaaatgttttttgtgtttttttgagttatatgaaattattgagaagtttttgatttgggggttattagaggaatttggtttattttgtttggaatatagagggaaggttggttatggggaaaatttagaggtggtaattttgtgtttttaatagatagtatgagttattatgagaaggggaaaggggatttggtttttagatatatattaaggattttaatgtggatagtggtaaggtgttgtttttgattttttatttgttgtttatttaatttggtattttagggttgtattggttgagttattattaaggtttattttttgtttggtttaggatttttttggagatgagggtagataagtggatggtattttttgttttaaggttttggggttttatgaagtagttgtttttattgaatagttttagtagttgtagtgtttttttttgtattttttagaatttgttgttttgaagttttgtttgttattattgtgtttattttttttagttagttatatagaataaatttatttttttgtttttggaaaaggggttaggtttttggatgtttgaaaatagttgttttgttttttttgattttttttttgttattgttgtaatttaaggtgaggagttgttatttataaggtatttattgtttgttgagggttttatttaggttaggatgtggttatttttatttagagatgaagaaattggggtttggtgaggttaattgtttgtttagggttatatagggaataggagatgttggatgtaaatttagttttgtttggttttgaaggttgttttttttttggttttgtagagtgttagttttttttttataagttggatgtttttggtttaatattttatagagaaaaggtttttaatgttttttttgttattagtgtttttttgtaaaagagtattttgaatgtttatgttagttatagaggtgttttttttattttttggtaggtgggttttttttattttttttttttgtattgattggtatgtatttaggttaggtagtagaatgtttggt

SEQ ID NO: 3886 - DNA, 2473 bp, Artificial Sequence
  chemically treated genomic DNA (Homo sapiens)
gttaggtattttgttatttgatttgaatatatattaattgatatagaaaaggaaggtgagaggagtttatttgttagagggtgggaggggtgtttttgtggttggtgtgggtatttaggatgtttttttgtagagaagtgttgatggtaggggaggtattggaggttttttttttgtggggtgttgggttgggggtatttagtttatagaagagaggttggtgttttgtagggttggggagaaggtagtttttagaattagatggggttgagtttatatttagtgttttttgttttttgtgtgattttgggtaagtagttaattttgttgaattttagtttttttatttttaaatgggaataattgtgttttgatttaaataaaatttttgataaatagtaggtgttttgtaagtggtagttttttgttttaggttgtggtggtggtgggggaggggttagagaggatagggtagttatttttaaatatttaaggatttgattttttttttgaggataagggaatagatttgttttgtgtgattgattgaagggaatagatatagtggtgatagatggagttttaggataataggttttgaggaatataggaaggaatattgtagttgttggagttgtttaataggaatggttgttttatgaggttttggagttttggagtagagggtgttatttatttgtttgtttttatttttaagggagttttggattaggtgagaggtgggttttggtgatgatttggttggtatagttttggggtgttaggttgagtgggtgatgggtggagggttagggatagtattttgttattgtttatattgaagtttttggtgtgtgtttggaagttaagtttttttttttttttttatggtgatttatgttgtttgttgagagtatgaagttgttgtttttggattttttttgtaattagttttttttttgtgttttagataaggtgggttaggtttttttaatggtttttagattaagaattttttagtagttttatgtaatttaagggagtgtaggaggtatttttagttttatgtagtattttatatgtgttaagtgtagttttggtttttgtttggggtttgtgtgtgtatgtttagtatagttgttaggaatagggtttggtatttggtaaggatttaggtgttgggtaaatgtgttttttattagttttggaggtgtgttattgatttttgtttttattttttaaggttttattttaagtaaatttttaaattggattaaatttatagtaaatgattattattatgtttttatttttaattagtttgtttgggttttgtggatgttggatatttaggatgttagtaatgtttaggaagtttttattttttattggttttgggggttttatgtagggaagatttttgattaggagttttttggggggattggggttagaatattatttaggttgttttgaggttttgttttgggatttagtgataaaggttgttttgtggtggaaggaaaaggggattaaaggattgtttagaaatgtgggattttatttggttggtatttggttatatattttagagttggggaggaggtagggtttaagggagaggtgggagaggtatttttttggttttgggtttgggttattttggatagttgggtttttagaaattaagtttttttgtttaatatggtttgatttatatgaatagggttagggtttttaagtaggagtttggggttatagtttgggttggatagatagtgttgtgttttagggttttagggttttagttattttgttttgatagttttgagatatatttgagtttggaggtttagagatgttagttttatttttggtttagatttttagggtattgtttatagtatgatgaatatgaggatgttttgtgaggttattatgtgtagggagtaggtggttattgttaggtttggggtggttaatttatgttttttgtgtattttttgtttgagggttttttgtttattttggagtttttgttgtttttatttttggtttggtagtggggagtttgtgtttttggagttgagagtgggattatgggttgttagttgaggagaagagttttgggggttttgttttttggtttattttttatgttaagaataaaatttttttgaggtttattttagatggtaaagtagtttttatttataggggtttttgtaatgaggttttgtaataggggagaaagattgtgttttattttaaatataaggaaatgtggggatttagaagtaaggttttaggtggaattggtggatggaagatggttaagagggtgggttattttgtttaagttgattaggttggattttggttagaggtaggttagggtgattgatattatttagaggaaggtaggggatgaggaatttggttaggtattgagggtgtttagatattgaaattg

SEQ ID NO: 3887 - DNA, 2498 bp, Artificial Sequence
  chemically treated genomic DNA (Homo sapiens)
taaaatgtaagggagggtatgggtattttttattttttataaataggattttgttttttataatttttttattgttttatttttatttgattaaattttaaatgaatatttgaggtagataattataagagattttttttgaaagtaaaattgagatgaaatttttggttaaatgggtttgtttattatagtgtggatttggagagagatgtaagtaagaagaaaagttttggttgggtgtagtattttatgtttgtaattttagtattttgggaggttgaggagggaggattgtttgagattaggagtttaagagtagtttgggtaatatagtaagattttatttttatgaaaatataaaatattagttaggtgtggtggtatatatttgtagttttagatattttggaggttgaggtgggaggattgtgtgagtttaggagttggaggttgtagtgagttatgatggtgtttttgtattttagtttaagtgatagagttagattttgtttttaaaaaaaaaaaaaaagagagagagaaaaaaaaaataaaagtttagtttagtattgtggtttatgtttgtaattttagtattttggaaggttaaggtgggtagattatttgaggttaggagtttaagattagtttggttaatatggtgaaattgtgtttttattaaaaatatatatatatatatatataaaatattagttgggtgtggtggtgtatgtttgtaatgttagttattagggaggttgaggtaagagaattgtttgaatttagaaggtggaggatgtaatgagttgagattatgttattgtattttagtttgggttatataagtgagattgtatttttaaaaaaaaaaaagaaagaaagaaaagaaaaattttatagggtatattatttttattttgagttagtgatttaggttgatgataaagtagtgggaatagttattagggatttttatttattaggtatagtttttaagggttatatatggtttgtttggtaattgtttgtggagaatttgttattatatatatgtagagtagaaggtgtgattaatgtgtttttaaatattattagtattgttgttgtgattttgaggagttttttaatattaatgagggattgatttttttagttttatataaatagggaatttaagaagtgggtatatggggttagggtatttaaaattttaaggagttttagaaaatgtataatttttgttttagatttatttttttattggttggtgttgtaatatatttagttgttgagggaatttttgttagttgttgtggttatttttttttttttgaatggtatttaagattatttttttaaattttgtaggtaaattttttattgtttattggagaatgagttattttatagggggatgtttatttttttttattttatgtaatgtgttatttttttttttttataggtttttgatgttttttgtgtaggaggagaagtatttgtatttatgttaaggtttagtgatgtttgtaatgtgttagatgttgggtggagtgttttttattatttgttttaatttttgttatgattttgtttaatttaaaagatagatgaggaaattgaggtttggggtagtaaggagattagtttagtggaaggttataggtttggttttttgtattgtttttttttttgaggtttgggatgtaaaatttgattttaatgtttagttattaggtgattaatggaggaaatgtgagtatttttgtgtagtttattatagttaggtgggttttgatgtttgtaataagttttatttgggtaggatagtggttgaagtttagattatagtggtttaggtaaatgtaatttatgaaagtagaagttggttaagattagtgtttttaaggataagggaggaagaaatgaggtgggtggggttgggataaggaatttttatataggggtattttttttttttttatttatttttgtagagatgggggtgaagatttttgattttgaattagttttatttgggtttattttggtttttttgtaggaaatttttattattttttttatattttaggggttaaaggtagtagggtgttagggtgattatgatgaatgttgtttttggatggggtttttattttttaggtttgggattaggataggatgtatttttgtaataaagtatttgtgttttttggtatttagtaggtattagttatattggtaggtgttttttttttattggggttttaggagatgttagaattgagttattggatagaatagttgattgaggattagtgaggtagtatggttttgttttaattatattttggtttttaggttaggggtttgaattattgttttgttatttgtggggaataaatgggaagatttaaatagttaatggtatgatttggtgatggttatgaggaggtaagatatagagttggtttttatttttagtatttgttggtaggaaa

SEQ ID NO: 3888 - DNA, 2498 bp, Artificial Sequence
  chemically treated genomic DNA (Homo sapiens)
ttttttattaatagatgttggagataaaaattaattttgtgttttgtttttttatggttgttattaggttatgttgttggttgtttaggtttttttatttgttttttataggtgatgggatagtggtttgaatttttagtttgggggttgggatgtgattggggtaaggttgtgttgttttattgatttttagttagttattttatttagtggtttaattttggtattttttaggattttagtgaggaggaagtgtttgttggtatagttggtatttgttgagtgttagggagtataggtgttttgttgtaggagtgtattttattttggttttaggtttagggggtgaggattttatttagagatagtatttattatggttattttggtattttgttgtttttggtttttgaggtgtaggaggggtgatgaggattttttgtagagggattgggatggatttagatggggttggtttggggttagggatttttatttttatttttgtaggggtgggtagggaaggaagggatgtttttgtatgggaattttttgttttagttttgtttattttattttttttttttttatttttgagaatattggttttagttagtttttgtttttgtaggttgtatttgtttgggttgttgtggtttgggttttagttattgttttatttgagtgaggtttgttatagatattagggtttatttgattgtggtgggttatatgaggatgtttatattttttttattagttatttgatggttaggtattggagttagattttatgttttagattttggggaggaggatagtgtaggaagttaggtttgtggttttttattggattgatttttttattgttttgggttttagtttttttatttgttttttgggttaaatggggttgtggtgaggattaagatagataatgaaaagtattttgtttagtgtttggtatattgtagatgttattaagttttggtataaatatagatgtttttttttttgtataggaagtattgggaatttgtgaggggagggggatgatatgttgtatgaagtggagaggagtgggtgtttttttgtgggatggtttattttttagtgggtagtgagagatttgtttgtggaatttaggagggtggttttgggtgttgtttaggaaagagaaagtggttgtggtagttggtagaaatttttttaatggttagatgtgttataatgttaattagtgagaaaatgaatttgagataaaaattgtgtattttttggaattttttagagttttaaatattttggttttatatatttattttttagattttttgtttgtgtagggttggaaaaattagttttttgttagtgttgggaaattttttaaaattatggtaataatgttaataatatttaagagtgtattaattatattttttattttgtatatatatggtgatgggttttttatgggtagttattagataaattatgtgtagtttttaaaagttgtgtttggtgggtaggaatttttggtagttgtttttattgttttgttattagtttgggttattgatttaggataaaaatgatgtattttgtagaatttttttttttttttttttttttttttttttggagatgtagttttatttgtgtggtttaggttggagtgtagtggtgtgattttggtttattgtattttttgttttttgggtttaagtggtttttttgttttagtttttttggtagttagtattataggtatgtgttattatgtttagttaatattttgtgtgtgtgtgtgtgtgtatttttagtagagatatggttttattatgttggttaggttggttttgaatttttgattttaagtgatttgtttattttggttttttaaagtgttgggattataggtatgagttatagtgttgggttggatttttattttttttttttttttttttttttttttttttttagaaataaggtttagttttgttatttaggttggagtgtaggggtattattatagtttattgtagtttttaatttttgggtttatgtgatttttttattttagtttttagggtatttaggattataggtgtgtgttattatatttggttaatgttttatgtttttatagagatggggttttgttgtgttgtttaggttgtttttgaatttttggttttaaatgattttttttttttagttttttaaagtgttaggattataggtgtgagatgttgtatttagttagaatttttttttttgtttgtgtttttttttaaatttatgttatggtgagtaaatttatttgattggaggttttattttgattttgtttttggaagaaattttttgtgattgtttgttttaagtgtttatttagggtttaattaaataaaggtggggtggtaaagggattgtagggagtaaaattttatttgtagagagtggggaatatttatgtttttttttgtgtttta

SEQ ID NO: 3889 - DNA, 2460 bp, Artificial Sequence
  chemically treated genomic DNA (Homo sapiens)
atttttgaggtagtatttattggttttattgatttttggtagtttagagtgagggtgaagagatgtttgggtttatgttttaattttattaattatatagtatttttgggtaagttatttatttataagttttagttttttattgtaaaatgtgattataatagaatttgttttaaggagtgagtttgatgattttttttttgtgtgaaatgtttagtgtttaatatagagtaagatgtttataatgattgttgtttgttgttttgtgtattgttttgatttgtgagtgttgttgattgtgggtgagtggttggtgaggttgggttttggatggtttttggatgtttttttttttttttatttttaggtttgtggagttattgtagtgtttttattatttgtggttttattttttttagttgtagtttttagtagttagttatagtttgaaaatattaaagagaaaattttagaaataatttataatttgatattgtatgttattttgagtagggtgatgaaattatgtagtgatgattgtgatttatttttttgtttagtgtttttgtgttgtaggtgtttttgtttgtgagttattttgtagtttttttggtgattagagagaaaaagtttaatttatagagggttttgtattatttgtggttttaggaatttatggggggtgttggagggtaggggttattgtaattttttgttttttgtgaggtttgtattaggtagttttttgttggtggtttggtttgggtttttgagattgtttttgaaagggaaagggattttgggtttttgggaattgtttaggaggtagggtagagggatttttagaagttgtagtaagtagttgtattattagttatgaggttgagaattaaggggaggaaggtgagttgttagttgtatggggttatatttgggtggggggatagagatagagtagtatagtttttgttagtaaggttgttaatgaagatttaggtagagagtaatttggggtgagtttataaggtggtggttagttatttatttttttatattttgtggttatttttaggtgagttgagtgaagtttttggttttgttatattttttaaggtaaaggtagtttttgttattatttttttgtttttatttgtttagaaatttttagtaggtatttttttttttttttaggaggaatggaatgggattttttgttttgttattgtaggattttggtgaggtttgtttaggggttttggtgagagaaaagtgtgataggaagtgtatgttagtaggtatttggagatgtatttttggtgatatgtataggtatggtagttgttttatttattataggtttttgtttgggatagtggggtatatgtataatatagatgaggtttagagatgtagagatttttaataaattttttttatgttagggagataggagatttagttgggaatgagtttatattatgaagttttttttttaggagtttatattggagtttaggagttttgttttattttagggtttttgtatttattattttttggtgggagtgagtgttttagtatagggttttataggtaggatttttgatattttttaaattttagagaggtttttttgattttatttatatgattttattttagtgatttgttttatttttttatagttgtttttatttttaaattgtttttttttttgataggattttgttttgttatttagtttggagtgtagtggtgtaattatgtatggtttattgtagttttgattttttaggtttaagtggatttttttattttagttttttaagtagttgggattataggtatgtgttattatatttagttaatttttaaattttttgtagagataggttttattaggttgttttaaatttttgggtttaagttatttttttgtattagttttttaaagtgttgagattatagatgtgagttattatatatggtaggtaaggaagggttgaggggttgttaatagtaaaggtttagtttttagttaagttaggttgtttgtgagaaaggttttttgtgtatttgggtatatgtggataggtatgggtgtgatgttagtttttatttgtagtttgtaggtgtgtttgtggtattgggtgtttatgtgtgtgttttgagtttgggggaagatagatagattatttttaggggtttttgttttttgtgttttgttattttggttatatttagaatttggtatagagttttggataagtagttaggtttggttaggatattttagattagtaaatttttttttttttgggttggtaggtagtggggttttaggtttagtttaagggatggggaagggaggggataggttgggatttttgtttagttagtatttttattaggatgagatttaattatggagattgataagaggtagtatttaggagatta

SEQ ID NO: 3890 - DNA, 2460 bp, Artificial Sequence
  chemically treated genomic DNA (Homo sapiens)
tggttttttgggtgttgttttttgttagtttttatggttagattttgttttggtggggatgttgattgggtaggggttttagtttgtttttttttttttttattttttaggttgggtttggagttttgttgtttattagtttagaaaggaaagggtttgttggtttgagatgttttggttgagtttggttgtttgtttagggttttgtattgagttttgggtatggttaggatgataggatgtaaagaataaaggtttttaggggtagtttgtttgtttttttttaggtttaggatatatatataggtatttagtattatagatatatttgtaggttgtaagtggaggttggtattatatttgtatttatttatatgtgtttaagtgtatagaaagttttttttatgggtagtttggtttgattgggggttgagtttttgttgttgatagttttttagtttttttttgtttgttgtgtgtggtggtttatgtttgtaattttagtattttgggagattgatatgggaggatggtttgagtttaggagtttgagataatttagtgagatttgtttttataaaagatttaaaagttagttgggtatggtggtgtgtgtttatagttttagttatttgggaggttgaggtgggaggatttgtttgagtttgggaggttaaggttgtagtgagttatgtatgattgtattattgtattttaggttgggtgatagagtaagattttgttaagaaaaaaggtagtttagaagtgaagatggttgtgaggaaataaaataggttattgggatggagttatgtgggtggggttggggaggtttttttgagatttgaaaggtattaagggttttgtttgtggagttttgtgttggaatatttatttttgttagggaatggtgagtgtgaaggttttggggtgggataaggtttttgggttttggtatgagtttttgagggaggggttttatgatatgggtttatttttagttggattttttgtttttttagtatggagaaggtttgttgggggtttttgtatttttgggttttgtttgtattgtgtgtgtgttttgttgttttgagtggaggtttgtggtgggtggggtggttgttgtgtttgtgtatgttattaagggtatatttttaagtgtttgttggtatgtgttttttgttatgttttttttttattagaatttttagataggttttgttggaattttgtggtgatagaataagaagttttattttattttttttgaaaaaaagaaaaaatatttgttgggaatttttgagtaagtgggaatagggaggtggtggtgggagttgtttttgttttaaaaggtgtgatggagttagggattttgtttagtttatttggggatggttatggggtgtagaggggtgagtggttggttgttattttgtgggtttattttaaattgttttttgtttagatttttgttgatagttttgttggtaggggttgtgttgttttgtttttgtttttttatttagatgtagttttatgtagttggtagtttatttttttttttttggtttttaattttgtagttgataatgtagttatttgttgtaatttttgggggtttttttgttttgttttttgggtagtttttaggagtttaaagttttttttttttttaggagtagttttaggagtttgggttaggttattgataggagattgtttgatgtaaattttatgggaggtaggaaattatagtagtttttattttttgatattttttgtggatttttgaaattgtggatagtatggaattttttgtggattaggttttttttttttgattattaagagggttataaagtgatttatgggtgggaatgtttgtagtgtggagatgttggatagaggaatgagttatgattattgttgtatgattttattattttgtttagaatggtatgtaatgttaaattatgaattatttttgaaattttttttttaatatttttaggttgtggttgattgttggaaattgtaattaaggaaagtgaaattatagataatgggggtgttgtggtaattttatgggtttgagagtgagggaggaagggagtatttaggaattatttagagtttaattttattagttgtttatttataattagtagtatttataggttaaggtagtgtgtgggatagtaggtggtaattattgtgagtattttgttttgtattaggtattgagtattttatatagagaaaaagttattaggtttattttttgaggtaggttttgttatgattatattttatagtaagaaattggggtttgtggatgaataatttgtttagggatgttgtatgattggtggggttgggatgtgagtttaggtatttttttatttttattttaggttattaggggttggtaaagttaatgaatgttgttttaagggt

SEQ ID NO: 3891 - DNA, 2300 bp, Artificial Sequence
  chemically treated genomic DNA (Homo sapiens)
tttttgttatggggttatggttggtagaggtagtttttttgaatttagggtttgttaggttgatggaggaagttattgtaggataagggggtgatgtattattatggggtagggttatatgattttaaagttgtatttagttttattttagtggtttataggtgggttgtagtaggataatgtttaattttgttaggttagggagggtaaaattttatgtaggttaggttaggttaggaaggagaatagagttatatttattaagggtaggaggatttaggggagtttataaaggttagatgggtgtaggaggtatagttagttatgttttgtagggtgagtagagtatggataggttagagggttatgaggttaggttttggaggttagtagaaggtatgttggggttttttgttttttatatgtatgtttgagttatagtttttagagttatagttttaaatagatggttttgtttttagtggtggtgatttgagtgttaggatgttgttttgtttatttgtttgtattttaggttgtaagagtgtaggtattgttgtgatataggtttttgaggttattaggtaagtattagggtttaggttgggtattaggttagaggataagattgggtttttggtttggtaatatttttttttattgttttttttgtagttgattttttagatttaaatatgaggtttttttttaggtttggtttttttttattaattttagttggttagggttttgattttgtaattgtttgtggttttttagttttttgttttgttttgttttttatttttgagagttgtaggtttttggtttaggaataaatttatgatgtagtttttgttttatttgttggtttattagtattatattgttagtattatattgttttatgttgggttttttgattttttttatagtttttttgttttataaagattataggatgggtatttattattttttaagttttattttttattagggtggagtttatgtgtagtgaaggtttagtttgtgttagggatgttgggatggagtgaggtggtaagtttaggtgttttttatgttttgaagttttttgtttgagtttggaagtgaggtatgtggttggtgttttttgtaggtttttttgatttttgttagatagggtttagttaagaaataagattaggaaattaggtgtttatatagagattttgttattatttgaggtttattatttttttggtgtttattaaatattagttagtgtggtttttatggtttgttttaaggaatagaggaaattaggaagtttgagtttgaaatgtttgtaaagtaaggggagttttgggtataagtaggggtttgagttgagggaagggtttatatttgggagatgtttgtttgttttgatgaggttgttgtagtggtggaattttgataagagtgtattgtgaggtattgtgtttatttttagttgttttgtgagataagtatttgagtttttatgatttttaagttaggaataggaggtttaaagaggtgtttagggtttttaaggtttattgagaggtattagtagggaagtagtttagatattatggaaggggtttttagtgtattgggatagtttgatttattttaggatttatgggggttatagttaggagtgttttatggtgttggataagaagagtggttgttttggttttggagagagggggtttatgtggtttattggttttttttattgttgttagttgagttttttttatatataggtgttttgtagaggattagtttggtttagatttgaggttttagatgattagtatatgtgaattgtttttgtattagtgaggtggtttttttgtttttttttttatttaaattttattgtttgtttaggaggtgatgggttaagttgggtattaaaattattttaattgttatttttaagtgatttattagggtttagagaggtagatttaggtttagtatttattttgtgtttgtttttttatttttgaatttttaggtttatattttgttggtggttagattatgttttttttaattttggaggaagttttttattttaaaaggattttgttatttttgtttggttttatttttgtagttttaggatttttattttaagttttattatttggtatgagagttgatgtggatttagggtgtgtttagtaagtgtttgtttagtaaattaataatatgtgttaatggttatatttgttatttaattgatgtaaaatttggggttagaagtatagttttta

SEQ ID NO: 3892 - DNA, 2300 bp, Artificial Sequence
  chemically treated genomic DNA (Homo sapiens)
tgggggttatgtttttgattttaaattttgtattagttaaataatagatatgattattagtatgtattattaatttattgagtaaatatttgttgagtgtgttttgagtttatattagtttttatgttaggtgatggagtttgaggtgggagttttggggttgtaggaatagagttaggtagggatggtagggtttttttggggtagggggttttttttggggttgggaagggtgtgatttggttattagtagggtatggatttgggggtttaagggtgaggggataagtatagagtgggtgttaggtttgggtttgtttttttgagttttgatgggttatttggggatgatagttgagatggttttaatatttagtttagtttattattttttgggtaggtagtggaatttaggtaagaggaggagtaggagggttattttattgatgtggaaatagtttatgtgtattggttatttgaagttttagatttaaattagattggttttttgtagggtatttgtgtgtagggagagtttagttggtagtagtgggaggggttgatagattatgtggattttttttttttaaggttaaggtagttattttttttgtttaatgttatgaaatatttttgattgtggtttttgtgagttttggggtgagttaagttgttttaatgtattaggagttttttttatggtgtttaaattgtttttttgttgatgttttttagtggattttggggattttggatatttttttgagttttttgtttttgatttagaggttatggaaatttaggtatttattttataaggtagttggaggtgggtatggtgttttatagtatatttttattaggattttgttattgtggtagttttattaggatagataaatattttttgagtgtgggttttttttttagtttaggtttttgtttgtgtttaggattttttttgttttgtaggtattttaggtttaggttttttggttttttttattttttgagataaattatgggaattatattgattaatatttagtgggtattgaggagatgatgggttttaaataataataaaatttttgtgtagatgtttggttttttggttttgttttttggttgggttttgtttggtaggagttaggaaagtttgtaggaggtattaattatatattttatttttgggtttagataggaagttttagagtgtgggaagtatttgagtttgttgttttattttattttagtgtttttgatgtaggttgagtttttattgtatatgggttttattttagtaggaggtgaagtttaggagatggtgggtgtttattttgtaatttttatagaataggaaggttataaagaaggttagagggtttagtatgggatagtgtggtgttggtagtgtggtgttgatggattagtaagtgaggtaggagttgtattgtgggtttgtttttagattagaggtttgtagtttttagagatgggggataagatagagtgggaggttgaagaattatagatggttataaagttaggattttgattagttgaagttgatgagaggaggttaaatttagagaagagttttatatttgggtttgaaagattaattgtagaggaggtagtggggaaaggtgttgttaggttagaagtttagttttgttttttgatttagtgtttagtttgggttttggtgtttgtttggtgattttgggagtttgtgttatagtggtgtttgtatttttgtagtttggagtgtagataggtgggtaaagtggtattttgatatttaaattattattattgaaaatagagttgtttatttgaagttgtagttttggaaattgtgatttaagtatgtatatgggaagtaagaagttttagtatgttttttgttggtttttagggtttggttttatagttttttgatttgtttatgttttgtttattttgtaaaatatgattggttgtgttttttgtatttatttggtttttgtgggtttttttgggtttttttgtttttggtggatgtggttttgtttttttttttggtttggtttggtttgtatggggttttgttttttttggtttggtagggttaaatattgttttgttgtagtttatttgtgggttattggggtagagttggatgtagttttggagttatgtggttttgttttatggtagtgtattatttttttgttttgtagtgattttttttattagtttgatagattttggatttagaggagttgtttttgttaattatgattttatggtaaggg

SEQ ID NO: 3893 - DNA, 2300 bp, Artificial Sequence
  chemically treated genomic DNA (Homo sapiens)
ggtgtaaggttggggtattagggataaataatttagatatgttagtgtgttgatttgtaaagtatgttagaaggtagttgaggttttagttttagttatagtgtattttaaggttagagtaaaaagttggttggttttttaggtttttttttgtaaggtggttgggttaaaattaaagattttgttgtataatataggtttgttatttttttggtggtggtattagggattaataagattagtatttttagttatattagttagttttattatagttattttataggatggtattttataaattattaagatgggttagaattgattatgagaagtaagttattgatgtttatgtgatgtataagttatagttagtgaagtagtattgataggtatagaaattttattttttattatgggggtttttttttatttttagggagttatttttagaattttatttttttgttgattttagtgtggtgatggtagtttttttgtttagtgtgtgttatagagaaggttatatgagtaggatgttatgttttaatataggttattttgtgtaggttttggtgggttttgtggggtagttttttggtgtgttaatgattggtgatttttggaatggatatatattattttattttagtgtttagtattttttattgatttttttttgttatttagtaattattaattatggttgggttatttgagggagtgataagattattttatgtgtattatttataggttttttttgttaagttggataggttttgggggtgttattttgaatttaattttgaatgggtgttttttaaggtatttattagtttaagtttttttatttatagggattgattaatataattttaagtttttttttgtagttattagtaggttataaagagtaaagggtttaggaatgtgttaagaagttgttttttggttttttgttattttagttatttttgattataaggttgtttttagaaggaaggtagtagagaatggttttatattgtttgatttgggtgttgtatttagtgtttattttgagttttattaatgaatagttgggtttgaaattattttttttttaggtttgtatagtaatttaagttattgtaaagtttatttttgtagtttttgtttttggttattttgatgatgttgattattttattttgtttaaatatttggtttataggtatttgttgtttaagttttttgtgggtttagtttagttttttggttatagtgtttttgtttatttggatttttattaggtgggtttttttttggtgtagaggaagtaggtgtatttaggagaaggtagatatagtttagttttagttgttagtgttttttttatagtagaggaattgtagttttatgtggtttgattgatgttaagtatatggtaaaaagttagtaattttgaataagttattgaattttattaagaggaaggaatttttatttttgttaatagtaataatttaattttggatattggtgtttgagttattgttaggatgagtggataagatttatattataggtaaataattagattttagtttttattagtttaatgtttttgtggttgttttttgggttagttttttttggggtattgtagtggttttattttagttatttatatttgttttagtgataagtttgtttttgagagagtataagttttaagtaagaaaatgtattattgggagtggtggtttatatttgtaattttagtattttgggaggttgaggtaggtggattatttgaggttaggagtttaaaattagtttgattaatatggagaaattttgtttttattaaaaatataaaattagtagggtgtggtggtgtatgtttgtaattttagttatttaggaggttgaggtaggagaatagtttgaatttagaaagtggaggttgtagtgagttgagatagggttattgtattttagtttgggtaataagaatgaaattttgtttttaaaaaaaaaaaaatgtatttaagtataaagtttttatttaaggatagtttggtaatgttttgataaaattttaatggtggatatgtatttttatttgtggtggtttttattatatggggttgtatttagtatttgagattagttaggataattagtaataggatagtaagaggtatttattttaattaagttaataaaaagtttgtttagtttattaattaggtttttaggagagtagttagtattttataattgatttttaggtaggtattttagtgttattg

SEQ ID NO: 3894 - DNA, 2300 bp, Artificial Sequence
  chemically treated genomic DNA (Homo sapiens)
tagtaatattgaaatgtttgtttgaaagttggttgtgaggtattggttgtttttttggaaatttagttgatgagttgagtaggttttttattgatttggttagagtgggtgttttttgttgttttgttattggttattttggttgattttaagtgttgagtgtaattttatgtggtgagggttattatggatgagagtgtatgtttattgttgaaattttgttaggatattgttaggttgtttttgagtgaaagttttatgtttaaatgtatttttttttttttagagatagaattttgtttttgttgtttaggttagagtgtaatagttttattttagtttattgtaatttttattttttaggtttaagttatttttttgttttagttttttgagtagttgggattataggtatgtgttattatgttttattaattttgtatttttagtagagatggggtttttttatgttggttaggttggttttgaatttttgattttaggtgatttatttgttttggttttttaaagtgttgggattataggtgtgagttattgtttttggtgatgtatttttttatttagagtttgtgtttttttaaaagtaggtttgttattagggtaagtgtaggtggttgaggtaaaattattgtagtattttaaaaggaattgatttaaaggatagttataggaatattgggttggtaggggttgggatttggttgtttgtttgtggtgtgggttttgtttgtttattttgatagtaatttaggtattagtatttaaagttaagttgttgttgttggtaaaaatgaaagttttttttttttggtgaggtttagtgatttgtttagagttattggttttttgttgtgtgtttgatattaattaggttgtatggagttgtagtttttttgttgtgggaggagtgttggtagttggagttgagttgtgtttatttttttttagatgtgtttgttttttttgtgttagaagaaggtttatttgatggagatttaggtgaatggaggtattgtggttgagaagttggattgggtttgtgagaggtttgagtagtaggtatttgtgaattaagtgtttgggtaggatgagatgattgatgttattggggtgattaagggtaaaggttataaaggtgagttttgtggtggtttgagttgttgtgtaaatttgggggagaagtggttttaggtttagttgtttgttgatgaggtttagagtgagtgttgggtatagtgtttgaattggatagtgtagaattattttttattgttttttttttgagaatagttttgtggttagaagtggttgggatagtggagggttaggggataattttttaatatgtttttggattttttgttttttgtagtttattgataattgtaaaggggagtttggaattatgttagttagtttttgtgaatgggggagtttaaattaatggatgttttaaaaagtatttatttagaattgagtttagggtgatatttttagagtttatttagtttgataggggagatttgtgggtaatgtatatgaaataattttattatttttttagatgatttagttatggttggtaattgttgagtagtaggaaggggttagtgggaggtgttgggtgttgaggtgaagtaatgtgtatttattttaggggttattagttgttggtatattaagaagttgttttgtaagatttattgaggtttgtgtaaggtggtttgtattggggtatggtattttgtttgtgtagttttttttgtggtatgtgttgggtagaaaggttattattattgtattgagattaataagaaggtgaggttttgagagtggttttttgggggtgggaagaggtttttgtgatggggagtggggtttttgtgtttgttagtgttgttttattgattgtagtttatgtattatgtggatattagtggtttgttttttatggttagttttggtttattttgatgatttgtaaggtgttattttgtagagtggttgtggtggggttgattggtgtggttggggatattagttttattggtttttgatgttattattaggggggtgataggtttgtgttgtatagtaggatttttagttttagtttagttgttttatagaaaggaatttggagggttagttagttttttgttttgattttgggatatgttgtgattgggattgaggttttagttgttttttagtgtgttttgtaggttagtatattggtatgtttgggttatttgtttttaatgttttagttttatatt

SEQ ID NO: 3895 - DNA, 2487 bp, Artificial Sequence
  chemically treated genomic DNA (Homo sapiens)
ataaaaataaaaataaatagaagatattgataatagttgattttattttttattttaaaagtggtgattttatataatttaatttaatattaaggtatttttgttatattgtattagtttttaaatattatattttttattttatttttatttttaagttattattattataataattaagagaaggtaaatataggttagagatttgatttttgttttttgtatgtatttatttttgtagatttataaataatttatattttgtagttttaaggtttttaattatattagattttgttttttattttatttagagttattgtttttgttgtttgttttttatatgtgataagttaattttttatgttattttttttataatttttatgtaaatttattatttttatttttatttattttttagagatgtatgattgtagaaaattttttttttttgaaatattgtttaatagagattaaatttaatatttagttttatttgtttatttttgaattataggttattgagaagttagaatagatagttatagaagtattttattaaatttatttttttattttttttaatatttgataaatatttattaagtatttattttgagtaagtattggagtaagtttttttataaatatgaagttgtgtaaataaggatgtatgtatttatgtaaatataagtttaatgttggatatatattgttttaagtgtttgatatgtattagtttatttatttttatttaaggggataagtgttattgttgtttttattttaaagatgaggaaattgaggttagagagattatatgaatttttaaaattttaatttttaattatagtatttagaatttatttggttgtagtggaggatttaatgttaaaaaagtaagtgttttttttagattatgaatataatgtgtgataaattagtagtttttttttttgttttaagatagtaaatatttatttaggttaatttgtgtttgttagagaataaagagtgggtttgttatattgtttttttttaagagggtttatttgtttttgtttttttggtatatgttaggggatatatattgtttagtatatttttgtagagttatattttattttatattttattataattttgttgaatgttaggtattattaagaaaatgtttatttattttttttttgttatgtttaatgtgtgaattgataatatatttaaatttaaagaaaattaatagatattattttaattaatttgaaaagtttggtgatttatttttattttttttatggggtttttgttgggttgtttggttttttggaattagtttttaggttttttgtagttggggtgtagtttagtgtttgagttttttttttgttgtttattagatgagtgttgattttttttggtataggtatttgagttgtatttgaattgtagaatatgttgtttttattttgtgttgattgtgattttattttatgtgttttagaggtaggttaaataagtttgttttggaaaaaataatagggaagaagatgttgattttttaatttttagagtaagttttgttattttggaggtaaagttataatatttaaatatggtttgatttatgttaggttttataaatatatatatatatgtggatgttgaaattgtgtatgttttgatagttaaaaaaaaagttaaaatgatttattgttttattagtaggataagatttgataggttagtttattagaataaagaatataaaaaatgggtatttaatttttttatatagatatatatatatatatatatatatatatatatatatatatatatataatttgatgtaatgattttaagagagttggttgttttggtaatgaagaattgtttgtatatttaaggatttttttgtttaaatttaagttagttatttgaattttttgagtttttttgagtttagttttaggtttttatttttagatagaggtttgatatttatgttagtttttagtaaggtaggaagtttagaagttggattaaaattttataagttagttagtttggatttgaattttagttttatggttttttagttgtgtgatttgggttagttgtttaattattttgaatttttatttttttatttgtataatgggaataataaaattaaaataaatttgtatgggtttattatgaaaattagattgattgatgatataatatatagtaagtatttagagttgtgtttgattttgaatgtgagttatttgtaatagtgatttgaaatgggtttatattgtttggtaggaaattatttaatttttttttgtttttgattttaatttttgaagtgtttttattttatttttttttattttgtgtttgtggagaaggaggatgtttagttatttttggagtataattttttattaaaaattattattaagtttttttaagttttttttttgtagtaaa

SEQ ID NO: 3896 - DNA, 2487 bp, Artificial Sequence
  chemically treated genomic DNA (Homo sapiens)
tttattataaaagagaaatttgaagagatttaataatggtttttaataaaagattgtattttaaggatggttaaatattttttttttttataaatataaaataagaagaaatgagatgaaagtgttttaaagattaaagttaaaaataaaaaggaattgaatggttttttgttaggtagtgtaaatttattttaagttattattatagataatttatatttggaattaggtatagttttaaatgtttgttatgtattatgttattaattaatttaatttttataatgaatttatgtaagtttgttttaattttattatttttattgtataggtgaggaaatagaggtttaaggtggttaagtagttaatttaggttatatagttgagaaattatagagttgaaatttaaatttaggttggttggtttgtgaggttttggtttgatttttaagttttttgttttgttagaggttgatatagatgttagatttttgtttggggatggaggtttgaagttaagtttaagaaagtttgagaagtttaagtggttagtttaaatttaaataagaaaatttttgaatatataaatgattttttattgttagggtaattagtttttttgaggttgttatattagattgtgtgtgtgtgtgtgtgtgtgtgtgtgtgtgtgtgtgtgtgtgtgtttgtgtagagaagttaaatatttattttttgtattttttattttggtgagttggtttattaggttttgttttgttaatgagatagtaagttgttttgattttttttttggttgttagggtatgtatggttttagtatttatgtgtgtgtgtgtatttataagatttgatatgaattgagttatatttagatattatgattttatttttagagtgatggaatttattttgggggttggagagttagtatttttttttttgttattttttttaaggtaagtttgtttagtttgtttttggggtatatgaagtggggttatagttagtatagaatgggggtagtatgttttgtaatttaaatgtaatttaaatgtttgtgttaaagaaagttaatatttatttgatgggtagtagagagggggtttgaatattgagttgtattttggttgtaggaggtttggaggttggttttggagaattaggtagtttagtaggagttttgtgagaagggtgggaatgagttattagattttttaggttgattgaggtgatgtttgttgattttttttgaatttagatgtgttattagtttatatattgggtataatgggaagaagatgagtgaatatttttttgatagtgtttgatatttagtagggttgtgataagatgtggggtaagatatgattttgtaagaatatgttggatagtgtgtgttttttagtgtgtattaaaggagtggaggtagatggatttttttgggagaaaatagtgtgataagtttattttttgttttttgatagatataagttggtttgggtggatatttattattttagggtaaggggaagaattgttaatttgttatatattgtgtttatggtttgggaaaagtatttgtttttttgatattgggttttttattataattagatagattttgaatgttgtggttaagagttagggttttaggagtttgtataatttttttggttttagtttttttatttttaagatggaaataataatggtatttatttttttagataggaataaatagattaatatatattaggtatttaaaataatatatatttagtattaaatttgtatttatatgaatgtatgtatttttatttatataattttatatttatgggaggatttattttaatgtttgtttaagatagatgtttagtaaatatttgttaaatattgaaggagatagaagaatggatttagtggggtatttttatggttatttgttttgattttttagtaatttgtaatttaaggatagataggtaaaattgggtgttagatttaatttttattgagtaatattttaaaaaaggggagttttttgtaattatatatttttgaagaatagatggaaatggagatgatgagtttgtatgaagattgtgaaggaaatggtatgaagaattgatttgttatatgtgaaggataggtagtaaggataatgattttaaataaaataaaaaatagggtttaatataattagaaattttaaaattgtaaaatataagttatttgtgaatttataaaaataaatatatataaaaaataggagttaaatttttgatttgtatttatttttttttggttgttgtaataatgatagtttagaaatagaagtaaaatgaaaagtataatgtttaggagttggtatagtatgataagaatattttaatattagattaaattatataaaattattatttttggggtaaaaaatagggttagttattgttaatattttttatttatttttatttttat

SEQ ID NO: 3897 - DNA, 2435 bp, Artificial Sequence
  chemically treated genomic DNA (Homo sapiens)
tatgtaaaaatatgatgataaaatagtaaagtattgttgtgtgtttgagttgttggatagggatgatttagttaagaagatagtgagagaattttttagaaatatgtttttattatttgtatatagagatatgattgtttttttttaaagtattattatttgggagagggagttttggggggtgatgggaggttttgagttatagtttttatatattatatgggtaggaaggtgtaaggtgtattttggtgtatagatatggtgattgggttgttaggtttttaagagaagagatgaatgagtttggggggtagatggaggtattagttgagggttagaggttggattttgggatttagaggggagggatagagttgaatgttttatttggggttattttggataattgtgttttgggtaaagttaaggaaggtggtatagaagtttatgtatatagagggattttagttgttatggttattttggagtaggtagaggaggaggtagaagatgggtagtgggggtggtgggaggagagaaggtaggttgttgttttggatgttagatttgtggttttggtgtttggggatatgggtgggagttgtaatattgtttttttattttgatatatttaaatatttttatggtaggaaaggttttgagggaagagataaaattgtttgggttatggaagttagtaataatatttgggatttttgggaggaatgattgagtttattattttaggagtttgtgtttgataggaaaagtaagggattagtgggattttttgtgtattttttattttgtttttatttttttttttaagttttttttttagtttttaagtttaagtttttgttttgtttattttgattttgaatttgtagaaatttttttattggttagggttgtgtatttttttggaggttttgagttttatatagtaggttgggggttgtgtggatggggtttgggggtttgtgtagtttattttttttgagaagagtagagggtggttttttaggtggttgtgtagtatagagtagaaggttatgttggtgttaatttttttagaggggtttggggagtttttaggtttgtttgtataaggagagaagtagtagtaggtgtggtgggtttttaatttttgggaaggggaagggggttatgaagtaggggtaatttatttgtatatatgtattgtttaaatttgtattttatgtatataagtttttggaggagtggtggttgagtaagtttttgggtttgagtgtttggtgtttttattttatttaggtatagtgttttttggaattgggaggttgttagttgttagtttttttgttgtttatatggtgttgttagtagttttgttaggtgtttttgttatgttattatggtttttgttagttagtttggatttttgagaggtaggagttataggttgaaggtttgatataagtattagtgagatgttttttttgaagaatagttttgttttttttaaggattgatttttattttggttttggtttttttaattttagagggtaggtatgggtttttagatatattgtttattatgttttgtttatttttttaattggttttggtgttttaggagttagtatagtaggtggtttagttttttttggatttttttgttttggggttggtattgatttgggtatttgtttttgaggttaaagttggggtttggattgttagtggggggtgggttatagtagtgtagggtttgggtatttttatggtattggtgttgagtatttagggagaagtagtttagttttgaagggtgttggtagaaaggaaagggtttagagtagagggtagggtttgtgggtagagaaggtgttggatgaggtagtttgttttgaggtttagttatttttgtttttttagttttttttttggtttttttgggatttatgaggttttaagataagtaggggtatagagtttttattttatagaggaggtttggagaaggatgattggtttaggattaagtgagttatttgattgttaggttttggttttgaaatatttaggttttttagatgttattgtggttaagtttttattttgtttttttttttgttttttatttattttttttttaggttttttaaatgtagtgaggttaggaaggatgtttgtgtttagattaagaatttagttattttaaagttttttaatttttatttttgtagagttatgatgttatggtaggtatgttagaggttgaaggatgtaaaagtggttttttgtttttgatgatgtaattatttagtgatagtggtgggtaaattttttttggggtgggggaggtgtgagttttatgaaggaggttgatattaatgtggttattggtgtttttttatgttgttaatgagtttttgggtgtgtgt

SEQ ID NO: 3898 - DNA, 2435 bp, Artificial Sequence
  chemically treated genomic DNA (Homo sapiens)
atgtatgtttggggatttgttggtggtgtggaggggtgttggtggttatgttggtgttaattttttttgtgaagtttatattttttttgttttgggaggggtttgtttgttattgttgttgaatgattgtattattgaaagtagaaaattatttttgtattttttggtttttggtgtgtttgttatgatgttatagttttgtggaggtggaagttggggagttttgaggtaattggatttttgatttgagtgtagatgttttttttaattttattgtatttggaggatttggagggagggtgggtgaagggtaaggaaagaggtaggatgagagtttggttgtggtggtgtttgaggggtttgaatgttttaaggttagagtttggtgattaggtggtttgtttagttttaaattagttatttttttttaggttttttttgtagaatggaaattttgtatttttgtttgttttaggattttatggattttagggggattaagagaggagttgagaagatagaggtagttgagttttggaataaattattttgtttagtattttttttgtttatagattttgttttttattttgggtttttttttttttattggtgttttttggaattgggttgtttttttttggatgtttaatgttagtattatggagatgtttgagttttgtgttattatagtttattttttattaatggtttaggttttaattttgattttagagatggatatttggattgatattagttttgggatgaggaggtttaggaaaggttggattatttgttgtgttggtttttggaatattgaggttggttggaggggtgagtaaagtgtggtaggtagtatatttggagatttgtatttattttttaaaattaggagagttaaagttggggtgagaattagtttttagaagaaataagattattttttgaggggagtattttattaatgtttgtgttagatttttagtttgtaatttttgttttttaggggtttaggttggttggtagaggttatagtgatgtggtgggggtatttgataaaattgttgatgatattgtatgagtggtaggagggttggtagttggtagttttttggttttagggaatattatatttgagtgaagtggagatattgaatgtttgggtttagaggtttgtttggttattgtttttttgggagtttatgtatatgggatataaatttgagtagtatatgtgtgtaggtgagttgtttttgttttatagttttttttttttttttagaggttgagagtttgttatgtttgttgttgtttttttttttgtgtagataaatttggaagttttttagatttttttggggaggttaatattaatgtggttttttgttttgtgttatgtagttgtttgggaagttattttttgttttttttaggggaggtagattgtatagatttttaagttttatttatatagtttttaatttgttatgtggagtttaagatttttaaggagatgtatagttttggttaatggaggagtttttataggtttaggattggggtgggtagggtgagagtttaggtttgaaggttgggaaagggatttggggaggagggtgaaggtagaatggagggtgtatgaggggttttattgattttttgttttttttgttagatataagtttttgaaatggtgggtttagttattttttttaggggttttgaatgttgttgttggtttttgtaatttagatggttttgtttttttttttaagattttttttattatgaagatgtttgaatatgttagggtaagggaatgatgttgtagtttttatttgtatttttaaatattaagattataggtttagtatttagggtaatagtttgttttttttttttttattatttttattgtttattttttgtttttttttttgtttgttttagaatgattgtgatggttggaatttttttgtgtgtatgaatttttgtgttgttttttttagttttgtttagagtatggttgtttaggatgattttaggtgaggtatttagttttgttttttttttttggattttaggatttagtttttggtttttaattgatgtttttatttgttttttaggtttgtttatttttttttttgggagtttggtggtttagttattgtgtttgtatattaagatgtattttatgtttttttgtttatatggtatgtggaagttatgatttaggattttttattattttttaagatttttttttttaaatagtaatgttttagagggaggtagttatatttttgtgtgtagataataaaagtatatttttaagaggtttttttgttgtttttttagttgagttatttttgtttagtaatttaagtatataatagtgttttgttgttttattattatgtttttatatg

SEQ ID NO: 3899 - DNA, 4136 bp, Artificial Sequence
  chemically treated genomic DNA (Homo sapiens)
ttttagagttttttttatggtttagtaaggtttgagggaagtttatttagatattagtaggttatgatttttgggtttttttttgttaaagtgttggtttaaggtttggttttagttgaatgtggttatatgtagggttagattttttttaagattttgggaatttaggttgtttagatttttaggtagaaaagttagtgttttgatattttatttaaattttttttgtggttgtttttttagtttttttttattatttttttagtttttatgtttgttgtttgtttttttttttttgagttttaatatatagtgggtatttgaagattttttttttatttttttatttttattaatttattttttatttgaatttgggatttttatttttgtttttttttataatttaatttatttttttttgaaggaattattttggttttgatttttatttttattttttaatagtttgtttttgttttttgtatgttagttggttttatttttttattattgtttttttagatatttgaggttttatttagttagtttgtgagttttaaggttgttttgatttttttatttgtttttttatttggtttttgtattttttttttttttggattttttgaatttttttaggatttttgtttagtttttttttgtttttaattgattttttttgaatgttttttattaattgtgagagttttttattgtgttttggttatattttttatgttttgtttttggttttgtttttgtttttgattgtgtttgtgtaaggtgggtgttttaaagttttattttattttgttgggaggagggggaaaggtgtatgtaggtgtagtggtgtttaaatttgggtttattaaatgtgttggagtatttttgtgtttaggtggtttttttttattgtggtaatttgggaaaatttgtgaattaattagaaaaagtggaaggtgggagattttggggtgttgtttaatggtgtggaagagaataaatgagttggttaattgggaatggtatgggggtgggtttgtttggtgtgaagtttgggtttgggaattttgaaggaggggtaggtgttgtttgtgtgtagaggttgtgttttttttggttttggttttttggttgttaaatagatgtagtaatgttggtttttgttgaggagtttaaggggttttgggatttgttgtataggttggtattgtttgaagaggaggttatttggagattgtgttgtgtgggtagatttgaaatggggttggggtggagtgggaaaaggttgggtatgttttgtatgattgtggggagtttttttttgtttttattttatttagagaagttgggaagtaggggtttaggtttaatttgttggagtatttaaggatttgtttgtatttttttttgggggatgatagtggatttattgtttttggaggtttaattagttatgagtgagggattggttagaagattggggtgtaggtaagtaggagtgttttattaggataagtaagtttgataggaagaagttgtttttttttgaattatatagaggtgatgtgtttgtattgtatgtagatgtgtgtataataggatttttttttttgtgttttgttattttgatatatataggagttgtttaaagtatttttgttttgtagattggaggttttttaaatattttgtgatttgaggatttagtttaagtgaggtgttataggatgtgtttttgagtttgtattgtatggagatttttttggaattttttatttgtaagttggtttaattaattttgtattgagttttaggttgtttgtattttgaatttgggttatttaggtagtgtgtttaaagttgaaattgtatatagtataatttaagtttgtattagattgggaagtgaatttaagttagtggtgtgtggtttaggagtgggaaaggaaatggatgtttgaagtggaagaggtggtgtagagggggtattgtttatgttgttttgtttttaattgttgtgtatagggggtggtaggggtggtgatttttatattttttatttttttgttggggttggttgtatttattgtttgggttatagggttgatttgtgtgatgtggttttgtggttttagtaggagtttggttttatttttgggatttatgttgaattgtatgttgagttttggggtgatgattggagggttagtttggaagattatagtagttaaggtgagtattaagtagggtagttttgtttttgggtggttgaagtgttaggttggaatgagtaaggtttttataagattttgttgtttgttttttatatttttattagattggatggatagttgtggtttagatttttatttttttattagaagtgtgtatagttagaagttttttgttagattgattttttttggttttgtttagtttatataggatttgggatattattagaaagatattatagtggggatgttttgaggttattagaggttaagtttagatttgatttagtttttagttttgttgaggtattttgtttttgggttagggtagttttatgttgaataatgtttttaataatttgggtatgtttttttttgtgatttgaggtagttagttttagaaagtttagatttatatttgagttttgttattgttttttggtaaagttagttgtaggagtgttatggttattagattatagtagttaatatttatttagtgtttattgttatgagttaggttttattttaagtgtattgaatgtaggtggtattaatattatttttatttatagtaaaggaaaatgaggtataaagaggttaaggaatttgtttagggttgggtatggtggtttatatttataatttagtattttgggaggttaaggtagggtggattatttgagtttaggagtttgagattagtttgggtaatatggtgaaaatttgtttttattaaaaaattaattaattttttaaaaaaagtttgggtgtggtggtttatgtttgtaattttagtattttgggaggttgagatgggtagattatgaggttaggagtttgagattattttgattaatatgttgaaattttatttgtgttgaaaaaaaaatataaaaattagttaggtgtggtggtgtgtatttgtaattttagttatttaggaggttgaagtagtagaattatttgaatttgggaggtggaggttgtagtgagttgagattgtattattgtattttagtttgggtgatagagtgagattttattttaaataaataaataaattaaaagtttgtttagggttatataattggtaagtggtagagttaggatttgaatgagttggagttgggggagagtgagtatgtttgaaaattggattttagggtggggtatggtggtttatgtttgtaattttagtattttgggaggttgaggtgggtagattaggaggttaggagtatgagattagtttggttaatatggtaaaattttgtttttgttaaaaataaaaaaattagttagatgtggtggtatatgtttgtaattttagttatttaggaggttgaggtaggagaattgtttgaatttgggaggtggtttaagtttgggtaatagagtaaaattttattttaaaaaaaaaaaaaagaaagaaaaaaaaagaagaaagaaagaaaattggattttaggatagtgagggtagggattttttgtaggaaagtataagaaatatagatttgtttttagttgataaggagtgtattgtttggtatttgttatttgttgaggggtttaggatgtgagggagaatttgattatagttttatatttttttttagaaattatatagatttttttatttttgattttggttatttttgtttttgttttttatatttgtttggtgttttattattaataggtattttggttaataatgtttgatttttaagaggttataggttggaattgagtgatggagattttttgatttttggttttgaagggtttttaggaattagttttttggagttttattttatgttttaataagtatgagttaagttttaggattttgttgttattattattttatggtttaggggagaagtttgg

SEQ ID NO: 3900 - DNA, 4136 bp, Artificial Sequence
  chemically treated genomic DNA (Homo sapiens)
ttgggttttttttttagattgtgggatggtaatggtagtaaagttttgaggtttgatttgtatttgttggaatatgaagtagaattttgaggggttggtttttgggggttttttagggttaaaggttaggaggtttttattatttaattttagtttgtgattttttgggagttggatattattgattaaagtatttgttgatggtggggtattaggtaaatatggaggataaaaatagaaatgattagagttaggagtggagaaatttgtatgatttttggggaagaatatgaaattgtagttagatttttttttatattttaagttttttagtaggtgataggtattaggtagtatattttttgttagttaggaataagtttgtgttttttgtgtttttttataaaggatttttgtttttattgttttaaggtttaattttttttttttttttttttttttttttttttttttttttttttgagatggagttttgttttattgtttaagtttgaattgttttttaggtttaagtaatttttttgttttagttttttgagtagttgggattataggtatgtgttattatgtttggttaatttttttatttttagtagagatagggttttattatgttggttaggttggttttatatttttgattttttgatttgtttgttttagttttttaaagtgttgggattataggtgtgagttattgtgttttgttttaaggtttagtttttaaatatgtttatttttttttagttttagtttgtttagattttagttttattatttattagttatgtgattttgggtaagtttttggtttgtttgtttgtttgagatggagttttgttttgttgtttaagttggagtgtagtggtgtgattttagtttattgtaatttttgttttttgggtttaagtgattttgttgttttagttttttgagtagttggggttataggtgtatgttattatatttggttaatttttgtattttttttttagtatagatggggttttaatatgttggttaggatggttttgaatttttgattttgtgatttgtttattttggttttttaaagtgttgggattataggtgtgagttattgtgtttaggttttttttaaaaaattaattaattttttggtagagataggtttttattatgttgtttaggttggttttgaatttttgagtttaagtgatttattttgttttagttttttaaagtgttggattataggtgtaaattattatgtttagttttggataagttttttaatttttttgtgttttatttttttttattgtaaatgaggataatattagtattatttatatttaatatatttaaaatagggtttggtttataatagtaagtattagatgaatgttggttattatagtttaataattataatatttttatagttgattttattaagaggtagtggtaaaatttaaatgtgaatttaggttttttgaggttaattgttttaagttatggagaaagatatgtttagattattaaaaatattatttaatatagaattgttttaatttaggaatagagtgttttagtaaagttggaaattgaattaagtttaaatttggtttttagtggttttagaatatttttattgtgatatttttttgatgatattttaggttttgtatgagttaaatgggattaaaaagggttagtttggtagagagtttttgattgtgtatatttttggtgggaagatgaaggtttggattatgattatttatttaatttgatgggagtatgggaggtaggtagtagggttttgtggagattttatttattttagtttggtgttttaattatttaggggtaaagttgttttgtttaatgtttattttggttgttgtggttttttaggttgattttttagttattattttggggtttggtatgtagtttggtgtggattttagagatgaggttaggtttttgttggggttgtagggttatattatataggttggttttgtggtttaagtgataggtgtagttagttttggtgggggggtggaaggtgtagagattattgtttttgttgttttttatgtgtagtagttggaagtagggtagtatgggtggtgttttttttgtattattttttttattttaggtatttatttttttttttatttttgggttatgtattgttggtttaagtttgttttttagtttgatgtaaatttgagttgtgttgtatgtggttttaattttgagtatattatttgaatagtttaaatttagagtgtaagtagtttaggatttaatgtaaaattggttaagttgatttgtaaatgaaaaattttaggaaggtttttgtgtaatgtaaatttaggaatatgttttatggtattttatttgagttggatttttagattataaaatatttggggagtttttaatttgtaaggtaaggatattttaggtagtttttgtgtgtgttggggtggtggggtgtggggaaggaggttttgttatatatatgtttatgtgtaatatgaatatattatttttgtgtaatttggagaagagtagtttttttttgttaaatttgtttattttaatagagtatttttgtttgtttgtgttttgattttttggttaattttttatttataattggttgaatttttgagggtaatgaatttattgttattttttaaaagaaagtgtaaatgagtttttaagtattttaataaattggatttaaatttttattttttggtttttttaggtgggataaaaataggaaggagttttttgtgattatgtaaggtatatttggtttttttttattttgttttagttttgttttggatttatttgtgtggtgtagtttttgagtagttttttttttaagtagtgttagtttgtgtggtggattttgggattttttgggttttttggtaggagttgatgttgttgtatttgtttgatagttaagaagttggggttaggaggggtgtggtttttgtgtgtgggtagtgtttattttttttttggaatttttgggtttgaattttgtgttgagtgagtttgtttttgtgttgtttttgattggttagtttatttgtttttttttgtgttattggatagtgttttaagattttttgttttttattttttttgattagtttataagtttttttgggttgttgtagtgaggaggagttgtttgggtgtggagatgttttgatgtatttagtgggtttaaatttagatgttattgtgtttgtgtatatttttttttttttttttaatagagtgaaataggattttagggtgtttgttttgtgtaggtgtggttaggggtagaggtggggttgggagtgaggtgtagggggtgtggttaaagtgtagtagggggtttttgtggttggtaagggatgtttgggaagagttggttgggggtgggaaggggttgagtgggggttttgggagggtttaaggggtttaaaggggaagggggtataggggttaggtgaagggatagatgaagagattagaatagttttagagtttatgggttaattgggtgaagttttgggtatttaggggagtagtggtgggagagtagagttggttagtgtatagggggtgagggtaggttattgagagatgggggtgagggttaggattagaataatttttttagaaaaaggtagattaggttgtaaaaagggatgggagtagggattttagatttgggtaaaaaatagattaatgagggtgggagggtgggaggaagatttttaagtgtttattatgtgttaggatttgagaaagaggaggtgggtagtaggtatggaagttaaggggatagtagagagaagttgagagaatagttgtaggaaagatttgaataagatgttaggatgttggtttttttgtttggggatttaggtggtttggatttttaaggttttggggagggtttagttttgtatgtggttatatttagttggggttaggttttgggttagtattttaatagggaaggatttaagagttatggtttgttggtgtttggatgggttttttttaggttttgttgagttatggagagaattttggag

SEQ ID NO: 3901 - DNA, 2460 bp, Artificial Sequence
  chemically treated genomic DNA (Homo sapiens)
tgtgggaatttttggatttatagtggggtgtggttggggtaggtggggggtttaggtgaggaagttttttttgtgttttgggttgggtgaagggttttgtgatgtgatgggggtagttttagtgtgtgtttagtttttatgttgttattgagtggtgtttttgttttagtttggagttttgtagggttgtttttatttttgtttatttttttgtgggttggggtagttttttgttagttattttgtgtttttaggaagagggattggttattatttatttatgtttttttattttattttaatattttttgtaaagttattgtttgtgttgtatttgtgtggtggggggtggggtggggtggagttatgttgtggagttgttgtaggtaaatagttttttttttgtggtgggagtggggttgttggttttaggtagggatagtagttgttgtttgtgttttgggttgggattttgttgttgtttttgttggaggtatgtgttagggtgggggttgggttgtggtggaggtgggtggttttggtgttttttgttgttgttttggtttggtttgtttgttttttgattttgggggtggtggtggagtgttttttaaattttgttgtgggttttgtgtttggttagttttgtatttgttgtgtgtttttggttatttttattttttggagttttttgtttggttttggtgttttttgttatttttttttgtggtttgtggttttgtttttgttttgtgtttttatgttttttgatttttgtttttgtgttgtgtgtttttttttgtttgtgttttttttgttgggttttgttttgtgttttttgttttgtttgtgttttttgttgggttgtgttttttgttttttatgtattattttttggagtagttggtggatatggtgattgtgttgttggtgggagagaagttgtgggagttgattttgttgggtgtgtaggatgataaggtgggtgtgttggttgtgttgtttttgtagttgaagttggagttgttgtttgattgggtggttattattggtattgtgttggtgtttattttgttggttattttggtttttattaagaattttgtaggtgaggttggtggttggggtgtggggtgtgggtagagggggtgtttgtaggtgtttgggagttggtgttttttgtgtttttggtggttttgtttagttgtgtttattgtggtttggttgtgtttgtggtgttttaggtattttttatagttgtttttattttagtaggtgttgttggttgtatagattttttgtttttattttattgttgtttttttttttatttgtttgtttatggttgtgggtgggattaggtttgtttggatttaggggttttaaatgttatgagatatggggtttggtttggagaatgttataagtagtgtttgaggggatgtagggtggttaggtggggattaggaaaggttgggatgggtgttgatagtagagagttgattataggggttggtggagttgttgggtagggtttttaggttggatttgggtggaaggagggtagagagagtttttgagaggtttaggttttttattttttaggtagggtgaggtttttttgggtgtattgggggtttttgaaggtttgaagtaggggggttagtatggggtagggttatgtgttagagtagggagtttggagtttttgtagggagatgggggttggattagggtagggatttgtgttggttagattaggatttgtgggggtatttgaagttatttaggtgaggtaggaagatggatagagtagttagtttgtttgtgagtttttgtggggtggggttttggtgtttttgttttttttaaggagtggggtgagataggtggagttgagaatttttttttttggggtttgggttaaggtaagggggattagggttttttggtttgtgtggtttagaggtattagtttgtagtggggaggggtgttgggattttggggtttttttttttgtagtttttaaattttagtagattttgttttagtattggtgttttttaaattttttagatgttttgttttaaggagtttttgtggtttggagatattaggtttgagggtggatattggttaggttgtttgattttatttaggggtggaggaggtttttgttggttttttttttgatattggaggttagattttggggattagaggatttttggggtgggtatatagtatattttgtagagtagggagtttaggtgtgtggtggggttttggggtaggtttagtatgtttagatattatgtgtgttttttgtgtttgtagtaattaagtattgtaaattaggtagttttaaatagtagatatttattttttatggttttggaggttaaaagtttaaaattgaggtgttggtagggttttgtttttttttatagttttaggaa

SEQ ID NO: 3902 - DNA, 2460 bp, Artificial Sequence
  chemically treated genomic DNA (Homo sapiens)
tttttagagttgtgggagggagtagggttttgttgatattttgattttggatttttggtttttggaattatgagagataaatgtttgttgtttgaaattgtttagtttgtggtatttggttgttataaatatagagaatatatgtggtgtttggatatgttgggtttgttttaaggttttattgtatgtttgggttttttgttttgtagagtgtgttgtgtgtttattttaggggttttttaatttttggggtttggtttttagtgttgaagaggagattagtagaggttttttttatttttgggtgggattagatagtttggttaatgtttatttttaggtttggtgtttttaggttatggggattttttaaggtaaggtatttgggagatttgggaagtgttagtgttgaggtagggtttgttgaggtttggaggttgtagaagagagggttttagggttttaatatttttttttgttgtagattagtatttttgggttatataggttaggagattttgattttttttgttttggtttagattttaggggaggaagtttttggttttatttgttttgttttattttttggggagggtagaggtattaggattttattttgtagaggtttataggtaggttggttgttttgtttatttttttgttttgtttgggtggttttaagtgtttttataggttttgatttaattagtgtgggtttttgttttggtttagtttttatttttttgtaggagttttaggttttttgttttgatatgtggttttgttttatgttagtttttttgttttaaatttttggaggtttttagtgtatttggagaggttttgttttgtttgaggggtggagggtttgggttttttagagattttttttgttttttttttatttaagtttagtttgggaattttgtttggtagttttattagtttttgtaattagttttttgttgttaatatttattttggttttttttggtttttatttggttattttgtatttttttaggtgttgtttgtgatattttttaaattagattttgtgttttatgatatttgggatttttgggtttagataggtttagttttatttgtggttatgggtggatgaatggaaggaagaataataataaaatagagatgaggggtttgtgtgattagtgatatttgttaggatgggggtggttgtggaaggtgtttgggatgttgtggatgtagttaggttatggtgggtgtggttggatggagttgttggggatgtgggaagtgttagtttttggatatttgtggatgttttttttgtttgtgttttgtgttttggttgttggttttatttgtgaagtttttggtgaagattagggtgattagtaggatgggtattagtatggtgttgatggtgattatttggttgaatggtagttttagttttagttgtagaagtagtgtggttagtgtgtttgttttgttgttttgtgtgtttggtaggattagtttttgtagttttttttttgttagtagtgtggttgttatgtttgttgattgttttaggaggtggtgtatggggggtggggggtgtggtttggtggggggtgtgggtggggtggggggtgtggggtggggtttggtgaggggggtgtgggtgggaggggatgtgtggtgtgggggtggggattggggagtgtgggggtgtgggatggggatggggttgtgggttgtgggagagggtggtaggggatgttgggattgagtggggggttttgggggatgggagtagttggaggtgtgtggtgggtgtggggttggttgggtgtggagtttgtagtggggtttggggggtgttttgttgttgtttttggggttagggggtgggtgggttgggttggggtggtggtggggggtattggagttgtttgtttttgttgtagtttggtttttgttttggtgtgtgtttttggtgggggtggtggtgggattttggtttggagtgtgggtggtggttgttgtttttgtttggggttggtggttttgtttttgttgtggggagggggttgtttatttgtggtgattttgtggtgtggttttgttttattttgttttttgttatgtagatgtggtgtgggtgatgattttgtagaaaatattgaaatgaaatgaaaggatatgaatgagtaatgattggtttttttttttgggaatgtggggtggttggtggggggttgttttggtttgtgggagggtgggtaggggtgggggtggttttgtggggttttgggttggggtgggggtgttgtttggtggtgatgtgaggattgggtgtgtgttggggttgtttttgttgtattgtagggttttttgtttagtttagggtgtagagggggtttttttgtttgggttttttatttgttttggttgtgttttgttgtgggtttggaggtttttgtg

SEQ ID NO: 3903 - DNA, 2474 bp, Artificial Sequence
  chemically treated genomic DNA (Homo sapiens)
tatgggttaggtgagtggggtttggttgagggtagttgggtagggggtagtagggtgtggtagtttgtttattggaattttttagggtgtattttaggggggttgtttatttgaagggaagtgaggatgagggtgtttaaaggttgttttttttatttttatttttatttttattttttgttttttgggattgttatgttttggagtgagtgtagttggtttgttttttaaagttttttgttttggttgattagttgggtgagttttggaattggaatttggattgtttagtgtgttgattttataattttgttggggtggatttttagtttggtatttagttgttttttaattttgagtggtatttgtggatgtagttggtttttggtttagggatgtttatttatttttggtttgtttgaagaaagttgttgtttttaatttttttttttttaagtaagtttaaaatttttatgagtaaaagagtttaaagaggtaagaggatattggtgttttaattgttttttttttttttaattttttttttttttttttttttggttggttttatggattatttgggagataaatttatagtggtttagatttatatgatttagtggatgggtattgtgaggaggtttttttaggaagtttttaatttggtgattattatggtgggttatgaatggatgagtgtagagttggttagttggattttttttaagtgtattttttttttttgatatttggttttttggagttgggaatttttttgttgtttttttgtttgtagttaatagagattttttttattgaggaaaaggtatatagatttggaattgttagatattgtaagtttattatgttttaaaaaatattaaaataatattgaaagttttttttttttagtttttttagggagggggttttagatattaaattggggaagttattttttttagaatagttgttagttaaagtttaggtattttttgttttttgtatttgggaaagaggtatgtagtaataattttttttttttgaagttagttaggatatttttgttggagttgatgtttgtgtggatagggttagtatgtgagttgggttgaatttgttagttgatttatgtttaagtgtgaatattttaatttttgatatgaaagtttatttttttttttatttttagggtggattagtggtatttgttttatttttttttatttttttaggaagtataagtggtggtgttatgtgtatgttgagttgtagtttttgttgttttattgagtttttattggattgttaaggaaagggttttaggagattgaggtgtggtgggtgagtttgtttgttggttgtgaattttgggtttggtgtgagtgggttagggagggaggttttgattttttatttaggtaggtttgggagggtttggattgggatagtagggtggaatgatagttaatgattaaaattttggtttgtgttttgttaggtgatagtgtagaaataattgtaaggtttttttgatgatttggagaggtgggattgggtttagaaagtgaaagtgtttattgtgggggaagtatagtgagtgagtggtagagttaggttttgaattttaggttttgatttttttatttatggttttttgtagtttagtttttagtagatgttttttttagatttttttaattaatttagggttgtttaggttattgattagatttgagtttaaagagagggtttgttatttttatataggagatttttgttatttgattgtgttggtttagtttatgggagtatttgaggataggtgaagggttaagttagtttttttttttgggttttttttagttaggagtgttatagttattaagggatttagtatttagggaggagttttgagttggttttttttatatttgaggtggtagggtttatagttgttttgttaggtgtaggggtttagtattttttttgttgatttagaggtgtgatttattttaggttatgtagtagttagagtaggtagttgtaaatgtaaggtaggagttgagtatttgggtatgatatgtgttttgtttataggatgttttttttatagtgggtttgtgtttttttgtggtttagaataaattagtggggtttggatttatgagatagattttttaatttttggaaggtgtgatttgttatagggaaagaaggttttttatttattttgtttttttttgtgtgtatttttgtttttgtgatgtgtttttttgttttgttttgtttttgtttgtttttttgttatttttgtttttttttagggtatggggttggtgataggtaggttttgttggtatttttttttttttattttggggagtggtgtgattatgggtattggtatgaattttttaggtgttttattttgtgttataggttggtgttattggtaggagtggtttttttag

SEQ ID NO: 3904 - DNA, 2474 bp, Artificial Sequence
  chemically treated genomic DNA (Homo sapiens)
ttggagaggttatttttgttagtggtattaatttgtaatatagggtaagatgtttaggggatttatgttaatgtttatggttatattattttttagggtggggaaagagggatgttaatagagtttgtttgttattaattttatattttgagagagaataggagtgatagagaaataaatagagatagagtaaggtagaaagatatattatagagatagagatatatatagagggagatagaatgaatgaggggttttttttttttgtggtaagttatattttttagaggttggggaatttgttttataaatttaagttttattaatttgttttgggttataaagaagtatagatttattgtgaaggagatgttttgtgaatgagatatgtgttatgtttaagtgtttggtttttgttttgtatttgtaattgtttgttttggttgttgtgtgatttggggtgagttatatttttgggttagtagaggggatattgagtttttgtatttggtagggtagttgtgagttttgttattttgagtgtagggagggttagtttagggtttttttttaaatgttgggttttttaatgattatagtatttttggttaggaggaatttagaaaaaggggttggtttagttttttgtttgtttttaagtgtttttataaattgggttaatatagttaggtggtagaagttttttatgtgaaaatggtaggttttttttttaggtttaggtttggttagtgatttgggtagttttgaattaattgggagggtttggggagaatatttgttgggagttggattgtaaagagttgtgaatggggaggttagagtttggggtttgggatttggttttgttatttatttattgtgttttttttatagtaggtatttttgttttttgggtttagttttatttttttaaattattagaaggattttatgattgtttttgtattgttgtttagtaggatataggttaaggttttaattattagttgttattttattttgttgttttaatttaagtttttttgagtttgtttgagtaagaaattaaggtttttttttttggtttatttatattaaatttaaggtttatggttagtgggtaaatttgtttattatattttggttttttaagattttttttttggtaatttaatgaaagtttggtggaatgataaaagttataatttagtgtgtatatgatattgttatttgtgttttttaggagggtgagaggagatgaggtaggtgttattaatttattttaaaaatagggagaaggatgagtttttgtgttgggggttggggtgtttatatttaaatataaattaattggtaaatttagtttaatttatgtgttggttttgtttatatagatgttgattttagtaaaaatgttttgattgattttaggagagaggaattattgttatgtgttttttttttaggtataggggataggaagtgtttgggttttgattgataattattttggaagaagtaatttttttggtttgatgtttgggattttttttttgggaggattggaggggaggagtttttagtgttgttttaatattttttaaaatataataagtttataatatttggtggttttgaatttgtatgttttttttttagtgaagaaaatttttgttggttgtgagtagagaagtggtggaaggatttttgattttgggaagttaggtgttggaaggaggaagtatgtttgaagggggtttggttggttgattttgtatttgtttgtttgtggtttattgtggtggttattaaattgagggttttttggaaggatttttttatggtgtttatttattgggttatgtgggtttgggttattgtgagtttattttttaggtaatttatggggttagttaggaggagagggaagaaggaagttagggagggagagagtaattaaaatgttagtgtttttttgtttttttggatttttttgtttatggaagttttgggtttgtttggaggaaaaaaaattaaaaatagtagttttttttaggtaaattaagggtaagtaaatatttttgagttaggagttggttgtatttatgggtgttgtttagaattaagaggtagttaagtgttaggttgggagtttattttagtggagttataaagttaatatattgggtagtttaggttttagttttagggtttatttagttgattggttgagataaggagttttgaggaataagttggttgtatttattttagggtgtgatggttttgaaaggtgggggatggggatgggggtgggggtggagggggtggtttttgggtatttttgtttttatttttttttaggtaggtagtttttttgaggtgtattttgggaggttttggtgggtaagttgttgtattttgttgttttttgtttggttgtttttggttagattttgtttatttgatttatg

SEQ ID NO: 3905 - DNA, 2827 bp, Artificial Sequence
  chemically treated genomic DNA (Homo sapiens)
ttggggttttgttttgtttaggtttgtatgtggggtttttgggaattgttgttttttttttttgtttttgtgtttgtgtttttttttttggggttttggtttatttatttttggtgtggttttgttggatttaggagttttggttgtttgggttgtggggagggggtgttttgggttggttttagaagttattttgtaaagaggtagggggtgtggggttgtgtggggtgagtttgggatttgtggggaagaagttttttgggattgtgttttggttgtttgagttttttgtgtttgttgttttttattttggttgggggtttatttgggagtttgttgtttttggttagttgtttgtgtgtgtttagggttagtagtatgtataagtgttagtgtatggttgttgtgtttatgtttaatgtgggttttgttgggtgtgtgggtgtgtggggtgtggggatttgattgattggttgtttttgtaggtgttgtttgttgtttgttgttttgttattgtttgggtttttgagttgtttagttagtttggttgatgagttgatagtgtgtgtttattggtttgtggtgttggaggggtggggtgttgtttagggttggttaatgggtgttggtttttggttttttgaggaagaggggggtttgggtgttgttggggggattttttttttggggtgggtggtaggtggggggtgtgggtttggttggttggtttgttaggtgtggggtttaggttaggttggggttgtttggaggttgtgtttttttttgtttgtggtgttttggtttttgttgttgagagtggatgtttttttggggtaattttttttggtttagaggtagttttgggggtggggattttgtgaattggggattttgtgaggttgtttgttatttgtgggtagtgaaatgtgttagtgtgtagagtagatttgtttgtgttgttgtttgttggatgttttttgagtatttattggggattgagtgtgggtgaggtagtagtgaaggaattgggaggggaaattttgtgaagattatttgaaaattgatgtttaaaataaatgaattttttagtatttgttaaaggatagtggtttgttagtgtgtttgttatggggtggttgtaggatttgtgtttggaattgggtgggtgtttgggatggataatgttgtttggtggttggttttgtgggaggtttttgtatggggttaattttggttggtgaagtttgttgtttggaatgtgaggttgaggtttttttttgtgatagattgggtggggttaggaggaggggtagggtgggtattttggtttgaagatttaggaattgttttggtttggtttggggtttatatttgatgtttggtgagggttggttttgggtttggttttattgggtttgggagggatgggtggttggaaataaatggttttttttagttttaggtaggatgttttaagggatgaaagtttagtaaattttaaggtttatttttttgataattattaataagagttttttttttttttttttgttttttaggtttaatttaaagataatttttttttttttttgtttattttgtttgtattagtttgagtttttttatattagtttttttttttgtttttaatatatatatgtatatatatatatatatatatatatatatatatatatatagttatatatgtagatatatgtttttatgtgtaattatttagatatagttttatatttttatattttttagtatatatatgtttatatatgtttttttatgtttttatttaatttattgtagatgagttttttagttttggaaggttaaatttgtgtttagttagtttttatattttatttgattttatattagtttgtggtatgggtttggtggttgaggtaaggggttttttatatggggattgggggtgtggggggtttagagatgtttaaagaagaaggaagtgttgtttgttgtttttattgagtttttattttattgttttagatattttggtttgtatggttgtttttggttgttggtttaatttgggagatgttgttgataggttttattttgtttttgttaattgtgtagttttgagtttttgtagggggtggggagtttttttagaattatatattattttgtgtattgggtaatagggtaagtagtgtgaggtggtgggggaggtttttttagggggttttgatttatttgaaataatgttttttaatgtgtttggttattaggtatttttttgtttagttttagttaggtgttttttaagtttgatggtagtaagagaagttttttttaggttttatttttataaattaaggtaggaatggaggtaggttattttgtgattttttagtttagaggtagttgttttttgtattaagttgtagtttttagtttgtttttaagtgattgtttaggttaagtttgttggtgaattattattttttaaggtgtgtaggtagagagaaagtggttttttttaggtagttgttgtttatgtggaggatttagtgagtagaggaggagggaaatggagagaagatatatttgtaagttttttataggtgaaggaaaggaggtggtttgtggagtagagaaagaggaggttatttttgttttagggtgttgttagggaggttttttaggataggtgatttgggttagatatagaatataaagaggatatttgtttaatggatgagaagaataaatagagaatttgttaaggtttatgagtgaaggtgaggattgaataagtgagttagagaatgttttggaagta

SEQ ID NO: 3906 - DNA, 2827 bp, Artificial Sequence
  chemically treated genomic DNA (Homo sapiens)
tgtttttagaatattttttggtttatttatttagtttttgtttttatttatggattttggtagattttttatttgttttttttatttattaggtaaatattttttttatgttttgtgtttagtttaggttatttgttttaagaggtttttttgatggtgttttggggtagaagtgattttttttttttttgttttataggttgtttttttttttttatttgtgaggggtttataggtgtgttttttttttatttttttttttttttgtttgttgagttttttatatagataatagttgtttagaaggaattattttttttttgtttgtatattttagagggtgataatttattagtaaatttgatttgagtaattgtttgggggtaggttggggattataatttggtataagggatagttatttttgggttgaggggttatagagtaatttgtttttatttttgttttgatttgtggggatggagtttggaagaagttttttttgttgttattaagtttgaggggtatttggttagggttgggtgggggggtgtttaatgattaggtatattagagggtattgttttaagtaggttagagttttttggaagaattttttttattattttatattgtttgttttgttgtttaatgtataagataatatgtggttttgagggaattttttattttttgtagaaatttaaagttatataattgatggggataaaataaagtttgttaatagtattttttaaattaaattagtagttaggagtagttgtgtagattgaaatgtttggagtaatggggtgggggtttagtggagataataggtagtgttttttttttttttgggtatttttggattttttatatttttgatttttatgtaggggattttttgttttagttattaggtttgtgttataagttgatgtgaagttagatggggtgtgagagttggttggatatagatttaattttttagggttgaggagtttgtttatggtaggttggatgagggtgtgaagaagtatgtgtgagtgtgtgtgtgttggagggtgtgagggtgtgaggttgtgtttgagtgattgtatgtgagagtatgtgtttgtatgtgtgattgtgtgtgtgtgtgtgtgtgtgtgtgtgtgtgtgtgtgtgtgtgtgtgtgttgggggtaggaaagggagttggtgtggaggggtttaaattggtgtaggtagagtggataaaaagagaaaagagttgtttttgagttgggtttggagagtaggagaagaaaaaaggagtttttattggtggttgttaaggagatgggttttggggtttgttgaatttttgttttttaaagtgttttgtttggaattgagaggggttatttatttttagttgtttgttttttttaggtttggtgggattagatttgaagttaatttttgttaggtgttaggtgtagattttaggttaggttagagtagtttttgggtttttggattgggatgtttgttttgtttttttttttggttttgtttggtttgttatagggggaggttttggttttgtattttgggtagtgaattttgttggttgaggttagttttgtgtgggggttttttgtgggattgattgttaagtggtattgtttgttttgggtgtttgtttggttttagatgtaggttttgtggttgttttgtgataagtatattgatgggttattgttttttgatgagtgttaaaaagtttgtttgttttgaatgttaatttttaagtgatttttatgaggtttttttttttggtttttttgttgttgttttgtttgtatttggtttttagtaggtgtttaagaaatgtttagtaaatggtagtgtaggtgagtttgttttgtgtgttggtgtgttttattgtttatggatggtgggtgattttatgggatttttggtttgtaggatttttgtttttgaggttgtttttgggttgggaggggttattttagaggggtgtttatttttgatggtgggggttggggtgttgtgggtaggggagggtgtagtttttaagtagttttagtttggtttagattttgtgtttagtgagttggttggttaggtttatattttttatttgttgtttgttttaggggaagggtttttttgatgatgtttgagttttttttttttttggagggttggaggttggtgtttattggttggttttgggtgatgttttgtttttttgatgttatgggttaatgagtgtgtgttgttagtttattagttgggttggttgggtggtttgggagtttgagtggtggtggagtggtgagtagtgagtagtgtttgtgggagtggttggttggttgggtttttgtgttttgtatgtttgtatgtttagtggggtttgtattgagtatgggtgtggtggttgtgtgttggtatttgtgtgtgttgttggttttgggtatatgtgggtggttggttgggggtagtgggtttttaggtaagtttttgattgaggtggggggtggtgggtgtggggggtttgggtggttgaggtgtggttttggagggttttttttttgtggattttgagtttgttttgtgtggttttgtgttttttgtttttttgtaaagtaatttttagggttggtttggggtgttttttttttgtagtttgggtggttggggtttttgagtttggtggggttgtattaggggtgggtgggttggggttttgggaggggaagtgtgagtgtgggagtgaggaagaaaggtggtggtttttggggattttgtgtgtggatttgggtggggtgggattttga

SEQ ID NO: 3907 - DNA, 2265 bp, Artificial Sequence
  chemically treated genomic DNA (Homo sapiens)
gttagtgggttatttttgtttattatgtagtatggtatttatttgtttagtattttatataatattggaggtaggggagtttattatagaattttttattaagaaggtttttattatggagaaattgaggtattggaggtggggtttttgtagttatgttgggttatgtgttttagttagttaagttgtagtggttattaagggtgtttagggtttggtttgttggttatagtgttgattttatggtttgaaatgggttttttttgtttagataggttttagtttattattatttatttgttttagttttggtgggtagggagtggttgggagattttgttttttatattttgggttttgtggtatttaatgagtttttaatatatattttagggtttttgttttagattaggttatagtttgtttaggtatataaggggtatttatattttggaggtaaagagatatgtttatgtgtttgtaggtatatatgattatgtgtatagatatatgtgtagatgtatattaagttatatatatgtatataagtttgaggtggggatttttaggatatggaggtaggtaggtagaggtggggtttaggatgttttgtttttgtttgtgggtttggtttttttatttaatagatgagtatgtgggtgtgggagtggttattgtgaaaggggttttagtatgtgttatttgtggagattatagtaggtatgttgtgtgtatgtatgtgtggttgtgggtgtgtaggtgggggtgaggatatagatatgtatttttagagtttgtgtgtgtatttagtgtttgtgtatgtgtatattggggtggtgttggtttgtatgtgtattagaggtgtgtaagtgtgtagtttgtgtagataagtgtatgtgtaaggaaatgtgtgtgtagtttgtggtattatggatattagtagggtagtttgggtgggtatttggggagtattttttaggtggggtatgtttaatttatatggagtttatttttttttgtttgtattgtgggattttatagttggtggggtgggggagttttatgagggttgttagggaggggttgttgattgttttattgtttttgatttttttagttaagttttttaatgttttttgggttgtagatggtgggtgttgttgtttttttttattgtttgttttggaggtagtgttgggataattttgttttttatgttttttattgttgttaatgtttttatttattttattgtggattgattttggagaaatgggaggttttgagtttagattgtgaggttggggtggaggtggtttgatatttttatttatttttggtatttatgtttttgtaaaaatttgtttgttaattttttggtggttggggtgttttgaggttgggttttgtttttttagtttatggtttttgtttttgatttggtttagtattggggatttttggattgttatttttggttttgttgaagttgttaatttttttgggaagtggtaattttttttgttgtttttggttttgtttttttggggttggggtgttagtggttttagtttggtgtggtattgtggtggttttttttgttgtttggttatgttttttttgttttggtagtttgggatgggttttgtggttttggggagggggtgagttgtttttttttgtgttttgttgttggttgggtttgggtgtagtgtggatatttatttttagtggatgttttttttattgtaggggttgggtggggtgtgttggggattgaaagttgttttggggtgggtgtttgtttttttgtggttgggtttgtatttaggtgttgttgttatggtttggttttggtttggttgtgggatgaggtttggtgtgttttgttttgtttggttttggttgggtttgggttgtgggtgtgtagggtgtgtagggtgtatagggtgagggtggtggtggtgtgggggttggggtgtgggtggtgtggtgggttggggtgtgtaggttgggttgtaggaggtgtttagtttgtttggtgtattggtgttgtgtggttttagataaaggtggtgtatttttgaagaggtggtggtttttgtaggtggtggaggggatggtggtttgggttggagttggttggggatgtgggtttgagggtgtggtggtttaggttggtttggtttttaagtgggtaagggttttgttttgaggtttaggaatggtttttgtttgatttattttttttttggttttatgaaa

SEQ ID NO: 3908 - DNA, 2265 bp, Artificial Sequence
  chemically treated genomic DNA (Homo sapiens)
ttttgtgaggttaggaagggagtgggttaggtagaggttatttttaggttttgggataaagtttttgtttgtttggggattgggttagtttaggttgttatatttttgggtttgtgtttttggttggttttggtttgggttgttattttttttgttgtttgtaggggttgttgtttttttaggaatgtgttgtttttgtttgggattgtgtggtgttggtgtattgggtgggttgagtgttttttgtggtttggtttgtgtgttttggtttgttgtgttgtttatgttttaatttttgtgttgttgttgtttttgttttgtgtgttttgtgtgttttgtgtatttgtggtttgagtttagttagagttgggtggagtggagtgtgttgagttttgttttgtggttgggttggggttgggttgtagtggtggtgtttggatgtggatttggttgtggggagatgggtgtttgttttgaaatgatttttagtttttgatgtgttttgtttaatttttatgatgaagagggtgtttgttggaggtgagtgtttgtgttgtatttgagtttggttggtggtggggtgtggaggggggtggtttgttttttttttggagttgtagggtttgttttgggttgttgaggtgagggaagtgtagttgggtggtagggaaagttattgtagtgttgtgttaggttggggttgttggtgttttggttttgggagggtggagttggaggtggtaggaaaagttgttgttttttgggaaagttgatggttttggtagggttgagggtggtggtttgagggtttttgatgttgggttaagttgagggtgggggttgtgggttggaagggtggggtttggttttggagtgttttggttattaaggggttaatgagtgggtttttgtagaaatgtgggtattgagggtgggtgggggtgttgggttgtttttattttagttttatggtttgggtttagaattttttgtttttttgaggttagtttatagtgggatgaatgggggtgttggtggtagtagagggtgtgggggatagggttgttttagtgttgtttttagggtgggtggtgagaggaggtagtaatgtttattatttgtagtttgagggatattgagaggtttggttgggggaattaggggtggtggggtaattagtaatttttttttagtagtttttgtgggatttttttgttttattggttgtgaggttttgtggtgtgggtaagggagggtgggttttatgtgagttgggtatgttttgtttggagggtgttttttaggtgtttatttaggttgttttgttgatgtttatggtgttgtaggttgtatatatgtttttttgtatgtgtatttgtttatatggattgtatatttgtatatttttggtgtatatgtaagttaatgttgttttagtgtgtatatgtataaatattgggtgtatatatggattttgagggtgtatatttgtgtttttgtttttgtttgtatatttatggttatatatgtatgtatgtggtatgtttgttgtggtttttatgggtggtatatgttggggttttttttgtaataattatttttgtatttatatgtttgtttgttgagtggggaggttaggtttatagataggggtaagatattttgggttttatttttgtttgtttgtttttgtgttttgggggtttttgttttgggtttgtgtgtgtgtgtgtaatttggtatgtatttgtatgtgtgtttgtgtgtgtgattatgtgtgtttgtgggtatataggtatgtttttttgtttttagggtgtgggtgttttttgtgtgtttagataggttgtggtttaatttggagtagaggttttggaatgtgtgttgggggtttgttgaatattgtaaagtttagggtgtgaggggtagggttttttagttattttttatttattagggttgaggtagatagatgatggtgggttggaatttgtttgggtagggaagatttattttaggttatgaggttaatattgtgattaataggttagattttgggtatttttggtggttgttgtagtttggttgattggagtatgtgatttagtgtgattgtagaggttttgtttttagtgttttagtttttttatggtgaggatttttttggtgaggggttttgtggtgggtttttttatttttggtgttgtgtagggtgttgagtagatggatgttatgttgtatgatgggtaagggtggtttattagt

SEQ ID NO: 3909 - DNA, 2459 bp, Artificial Sequence
  chemically treated genomic DNA (Homo sapiens)
ggtattttttaggtttattaagattagttttttgtgtattgtgttttttgattatattttgggtttttgtaatgtggttagtattttttggtatttttttatttattatgtttttggtaagtagttgaattgtaaggtttttagggttttggtttgtgatagggttggagtatttagttgttttgttggtatatttattgtttgtagtgaagatgattagtgtttttttaagtagttttaggttttttatggttgttattagggtttttatagttgtatttagttttattagggagtttttaaatggtttgtggtttgaatgttttgtaaagttttgtttattgaattgagggtagtgggtgtgttgggggtaaagattggagttagtattgggtaggggttatgggtagttagggggttgggttaagattatttatgtgagaggtatagtataggaagaaggggtgattttggtgttgggtgttggttatgaggttatgggtgaaagttatgtagtgggtttttagtttgggtagttaggggggttgtgtttttatggataggttggttaatagtgggatggggattaggttttggttatagttattgttgtaaggagtggttggtgggaagtaggttaggttttggtaggggttttgaggtgggtagttgttgtgagggttgggttggtaggtggggttgtgggagtattaagggttgggggattttgggaggtgggagggtggttgagggtttgggtggtttttatttggttgtgggagtatgggatgtttagaaattgatggaagttttgatgggggggtaggaaggtttttttaggttttattttaaggtgttatttgttggttatttttgtgaggtagttttgggtagttaggattttggttatggttattttttttaggggtaggtttttttgggagttgggtattaggatgttagggtatatgtttatttgaattgggagttggttggttaggagggtggttttgtgggataagttatagagtttttgagatagatagaaatgtggttttttttagagagagagatagatgttttttttgtttttttgtaatttattgggaggaaagggatggagggttggggtggggaagaggtgtggttttttttttatttagagggtgtgtatagagatataggtatgtagaagtttgtgaattgtagtttttttgttgttagttggtttaggttgggagtggtagagttggggtgtttatagtagtttaggtttttatagttgaggttgttggtaaagattagtatgatgttgggtggatgggtaatggttaggttagtagttagggttaggaggagggattgtggtgtttttatggatatgggattgaggggtttgttttaagagagggagggttatttggttttagtaggttttttttgatattgtagatttaggtgttgtttttttttgagattttggatttaaatattttttgattttgatggttgttttttgaagttttagagggttggggtttgatagtattgggagattgtgggttgggatggaatttttttaggattagggtatttttagatttttgagtggagatttgattttttttgtttagtggtttgggtttagggttgggggtgtaagttatttggtgttgattagtggagttgggttggggggaaggtgttagagggagtttaggaggagttggtattgggttgtgggtgtttttgttttggttttgttttgtgatttgtgatttttgtggggtggggttgggggtggggttgggggtggggttgggggtgggttggggtgaggggtgttgttgtgtgtgtttgttttgaggttgttgtgtgtgtttgaggttgttggttgtggttttgaaatgggttttgggagttttttttgtgtggttggttttggttgaggtgttttgggttgtgtgtggggtttggtgttgtgtagtgtttggtgtttttttggtttggagtttttttagaggaggagtggtttgtgtgtttttagatttttggtattgggagatttgggtttttttgtaagagatttgagtgtggagtgttatgggtatttggtgaatgagtaaatggtagggaaaattgtgtagttttatggattgtgggttttttttttatgattagtaaaagttttgatatttttttttttgtgtatgtgtgtttgtgtgtgtgtaagttgtggttgggtgtggggggttgtgtatgtgtttgtgtgtggtgtgtgtggagtgtttgaggtaggtgtgtggtgttttaggtgtgtgtgtatgtgtggtgtttgaggtgtgtgtgtgtgtttttgtagtgtttgagggatatgtgtgtgtggtgtttgaggtgggtgtgtggtgtttgaggggtgtgtgtgtgtggttgaggggtgtgtttggtgtttgaggggt

SEQ ID NO: 3910 - DNA, 2459 bp, Artificial Sequence
  chemically treated genomic DNA (Homo sapiens)
attttttaaatattaaatatattttttaattatatatatatattttttaaatattatatatttattttaaatattatatatatatattttttaaatattataaaaatatatatatatattttaaatattatatatgtatatatatttgaaatattatatatttgttttaaatattttatatatattatatatagatatgtatatagttttttgtatttagttatagtttatatgtatatagatatgtgtatgtaggagaaagggtgttaaagtttttgttagttgtgaaggaagagtttgtagtttatggggttgtatggttttttttgttatttgtttatttattgggtgtttataatgttttgtgtttaggttttttataggagggtttgagttttttagtattggaggtttgggggtgtatgagttgttttttttttggagaagttttggattgagaggatattggatattgtgtagtgttgagttttgtgtgtagtttgggatgttttagttagggttgattgtgtagaggaagtttttagagtttgttttaagattgtagttaatagttttaggtgtatatggtggttttggagtgagtatgtgtagtaatgttttttgttttggtttgtttttggttttgtttttggttttgtttttggttttgttttgtaagggttataggttatggggtggggttgaggtggaagtgtttgtagtttggtattggttttttttgggttttttttagtgttttttttttggtttgattttgttggttagtgttaagtgatttatgtttttgattttgagtttggattgttaggtgaggaggattagatttttgtttgagaatttgaaggtgttttggttttggaggagttttgttttagtttgtggttttttggtattgttgggttttggttttttggagttttaggaggtggttgttagggttggggagtatttgggtttggggttttagggaagggtggtgtttgggtttgtggtattggaaagagtttgttggagttaagtagtttttttttttttgggatagattttttggttttatgtttatgggggtattgtggtttttttttttggttttggttgttggtttggttgttgtttgtttgtttaatattgtgttgatttttgttgatgattttggttatggggatttgggttgttatgggtattttagttttattatttttaatttggattagttggtggtgggagggttgtggtttatagatttttatgtgtttgtgtttttgtgtatattttttaggtaaagagggggttgtgttttttttttgttttgattttttatttttttttttttaatggattgtaggggggtgggaaaaatgtttgtttttttttttagggaaggttatatttttgtttgttttagggattttgtgatttgttttgtagggttgtttttttgattggttggtttttggtttggatgggtatgtattttggtgttttggtgtttagtttttgggggggtttgtttttggaggaggtgattgtggttgaagttttggttgtttgaggttattttataggaatggttggtaagtggtattttggggtggggtttgagggggtttttttgtttttttattagggtttttattgatttttaggtattttgtatttttatgattaggtaggaattatttgggtttttagttatttttttattttttaaagttttttagtttttgatgtttttgtagttttatttgttagtttagtttttatggtagttgtttgttttagggtttttgttagaatttgatttgttttttgttggttattttttgtgatggtggttgtgattagggtttggtttttattttattgttggttaatttgtttgtggaggtgtagtttttttggttgtttggattagaggtttgttatatggtttttgtttatgattttatggttgatgtttagtgttaggattgttttttttttttgtattatgttttttatgtaagtgattttggtttaattttttggttgtttgtgatttttatttagtgttaattttagtttttgtttttagtatatttattatttttagtttagtgggtagagttttgtagagtgtttaggttgtgggttatttggggattttttgatggagttggatgtagttgtggggattttgatgatagttataggggatttggggttgtttgaagagatgttggttatttttattgtagataatgggtatgttagtagggtagttgggtgttttggttttgttatgggttagggttttggaggttttgtagtttagttgtttgttaagaatatagtgggtgagggggtgttaggagatgttggttatgttgtaggggtttaaggtgtagttaggagatatagtgtatagagagttggttttggtaggtttgggaggtgtt

SEQ ID NO: 3911 - DNA, 2731 bp, Artificial Sequence; identical to SEQ ID NO: 3329
  chemically treated genomic DNA (Homo sapiens)

SEQ ID NO: 3912 - DNA, 2731 bp, Artificial Sequence; identical to SEQ ID NO: 3330
  chemically treated genomic DNA (Homo sapiens)

SEQ ID NO: 3913 - DNA, 2499 bp, Artificial Sequence
  chemically treated genomic DNA (Homo sapiens)
ggggtttggggttagtggggagagttaaggttatatgggttttggatgtggtgaggggtgagggaaggagggtattttttagttaagatgaaattattatttttgagtgttggtagtttttttaggttgttgatttgtaagaattttttgtttttgtgttgttttgaagaggaagaagttagaaaaggtttttagaataaaaatgttgtatttttatattttttttttttttttttaagtggagttttatagttttgagaaatagtaaggtttgggattagaggtttggattagttttattttttggttgggtttttttgttttgttatattttggggtagttggggggttttggtgggtggggttaggtgtagtaggtggataaagagaagttttttagttggattttggtgggttaggggaggggaggtaaattggggtggtttatttttttttattttttaatttttataatagtatgtttttttttttgaggttttttgggttttgtgaatttatatgtgtgtattttatgtaagaattttgttaattttatttagtattttttttttatttttatagagtagaaggtaatgttatttttttttttagaaggtaagttaaggtttagagaggttgtgatttttttaaggttatttagtttatagtattttttggtggtagatgttgtaggaggaggtgagggggttgtgtgggtggtgagatgtttagggtagagtagggtgggggtttgggggtgtattgggtttgtggatatgtggggaaatgggttgggtttatttttgattaaatttatggtgtgtagttttaaggggatgttattttttttggtgaagatgtagatggtgtggttgggttgggatattaggttaagaaatagttttaggtttatggtgggggtggtaaggatagtggggatggtagtgaaggtgttgagtgtggtgtgggtagtagttgtggtaggattttggtgtgttgggaaataggggattaggttttattttttggggatagtatttaattggagtgtattatttttggatttgttttgtttttttggtttttgtttagttttgttggttaagattttattattagatttgtgtgtttttatagggagggtggttgttatgaatgtatagttgggagggtggagttggagttggggatttttgattggtagggaggatgtggatgtagggggttgattgtaaggggaaggggaattggttggatagggagaagtaggtttgttttttgggattttggtgttagggattttgtttagttttaggtgttgttttgatttagaaatgattgggtgttgttgttttggaaaggttttagtgtatggatatttgagggtttgtttagagttttgttttttggtgttgtatggtggtggaagggagggagtgaatgggattttttaaaagggattttagagttttatttagtgggatgtgatatttgtaggtgttttaaattggtgggaattttgattggaaggttggggttaaggatgaattttttgttgtttagattgttttttgtagagtagttgttgttagatagtgggagttgttagatagtgggagtttttattttgtgtataggatgggggtagggagtttgtagttgtgggaggtaggaatgattgtttgggaatttttttttttttttttgaattttagttttggtattttattagggggtatagtgatggtttagggttgggtttgggattttagttgaattttttagagtattttatttttttggttagtggtttaagtgagtgaattagaatgtttttttgggagttttgaaattggaattggagagaggagttttttatggggaggtaaatgggagttggggttatttgtagtgatattttttgagtttgaggagtagatgagattgagagagaaaagttgatttagagaaagggagtgataatagggtatgttggtttatatttgtaattttagttatttttatgggatttgtttttttgatgtttgggtatgaaaggattttttaagttttagaatagtgggagaatttaataaagaaaaaattaatatatatataaggttattttgtggaggaaaaaatggattaattttaagtaaaaaattgggaaggattttggtaaaagatatgttagaaggaagtaatgttttttaagatgtttttagaaatttattagataggtggggtgtggtggtttatgtttgtaatttttgtattttgggaggtagagatgggtggattagttgaggttaggagtttgagattagtttgggtaatatggtgaagttttgtttttattaaaaatataaaaattagttgggtgtggtggtatatttgggaggttgagataggagaattatttgaattttggaggtagaggttttagtgagttgagattatattattgtattttagttgggttattgagtgagattgttt

SEQ ID NO: 3914 - DNA, 2499 bp, Artificial Sequence
  chemically treated genomic DNA (Homo sapiens)
agatagttttgtttagtggtttggttggagtgtagtggtatgattttagtttattgaaatttttgtttttaaggtttaagtgatttttttgttttagttttttgagtgtgttattgtatttagttaatttttgtatttttagtagagatggggttttattgtgttgtttaggttggttttaaatttttgattttaattgatttgtttatttttgttttttaaagtatagggattataggtgtgaattattatattttatttgtttgatgggtttttaagaatattttaaaggatattatttttttttgatgtattttttattgagattttttttagttttttgtttaaggttaatttatttttttttttataaagtaattttgtatatgtattggttttttttttgttgagtttttttattgttttgaggtttagaaagtttttttatatttagatattagagaaatagattttgtgagagtaattgggattgtaggtgtgggttagtatgttttgttattattttttttttttgagttagttttttttttttagttttgtttattttttgaatttaggaaatgttattataggtggttttagtttttgtttatttttttatagggagtttttttttttagttttagttttaaaatttttaaggaagtattttggtttatttgtttgggttattggttagagggatgggatattttgaaagatttagttagagttttgggtttagttttggattattattgtgttttttggtgagatgttagggttgggatttagggagaagaaaggaggtttttggatagttatttttgttttttgtggttgtgggttttttgtttttattttgtgtatgaagtgggagtttttgttgtttggtagtttttgttgtttggtagtagttgttttgtaggggatagtttggatggtagaaagtttatttttaattttagttttttagttaaggtttttattagtttgggatatttgtaagtgttatattttattgggtgaaattttaagattttttttaggggattttatttgtttttttttttttgttattatgtagtgttgagaaatagagttttgaatgaatttttagatgtttgtgtgttggggtttttttaggatggtggtgtttagttgtttttgggttagggtgatgtttggaattgggtagggtttttggtattgggattttgaaaagtagatttgtttttttttgtttagttggttttttttttttttgtagttggttttttgtatttgtgttttttttgttagttgagggtttttagttttaattttatttttttagttgtgtgtttatagtgattgttttttttgtagggatgtatggatttggtggtggagttttggttggtaggattggataggaattgaaggggtgaggtgggtttgggggtggtgtgttttaattgggtgttgtttttagggggtggggtttgattttttattttttggtgtgttgggattttgttatagttgttgtttatattgtgtttagtgtttttattgttatttttgttgtttttgttgtttttgttatgggtttagagttgttttttgatttggtgttttagtttagttgtgttgtttatatttttgttaagaagaatggtatttttttagagttgtgtattgtggatttggttaaaggtgggtttagtttgtttttttgtgtgtttataaatttagtgtatttttaggtttttgttttgttttgttttgagtgttttgttgtttgtatagtttttttatttttttttgtagtgtttgttattagagaatgttgtggattgagtggttttgaagggattatagtttttttgaattttagtttgttttttgaaaaggaggataatgttattttttgttttgtagggatggaaagaaaatattgaatggagttgatagagtttttgtgtggaatgtatgtatataaatttataaagtttagaagattttgggaagaaggatatattgttgtgagaattaagagatgggaagagatgagttattttagtttgtttttttttttttggtttattagagtttggttagaaaatttttttttatttatttgttgtatttggttttatttattaaaattttttagttgttttggaatgtggtagggtagggaggtttagttagggagtgaggttgatttaggtttttagttttagattttgttgttttttagggttgtggggttttgtttggggaggaggagggagggtgtagaggtgtagtgtttttattttgaagattttttttgatttttttttttttagggtagtataagagtaaggagtttttgtagattaatagtttggggaaattgttgatgtttaaggatggtgattttattttgattgaaaggtgtttttttttttttattttttattgtatttggagtttatgtgattttggttttttttattggttttgggtttt

SEQ ID NO: 3915 - DNA, 2299 bp, Artificial Sequence
  chemically treated genomic DNA (Homo sapiens)
ttttttttaaaaagtattaaggttatttatttaataaataggaagaaattttaaagtgaaaatatagaggggttagggatttttttattaagagtttaagattaggttgggtttagtggtgtatgtttgtaattttagtattttgggaggttgaggtaggtggattataatggaaggggtttgagattagtttttattaaaatataaaaattaggtgtggtggtgtgtatttgtaattttagttatttgggaggttgaggtaggagaattgtttgaattttggaggtggaggttgtagtgagttgagattgtattattgtattttagtttggatgatagagtgagattttgttttaaaaaaaaaaaaaagagtttaatattaattttttgaaagttagaggaagtagaatgtattgtaagtaataaggagaaataagattgattttagtgttgtataaagggaaattattaattttgaaagtaaattatgtgaagggttttttgtgggttttttttatattttaagttttagggtatatgtgtataatgtgtaggtttgatatataggtatatttgtgttatgttggtttgttgtatttattaatatattatttatattaggtattttttttaatgttattttttttttagttttgatttttttgataggttttggtgtgtgatgttttttttgaagggtttttttaaagattaggttaaagttaaagattaagtttttttttttaaatgttttagttaaaagtaggagttaatttttatatttttgaaggtggttttaggattttaagttatattttggtaagggtgtggtagttggtagaggattgtaggtttttgttaggtagaatttgttgggttttggggagtggagatttagattttgaggtggaagtagagataagagttgggtatatttatttggatgtggggttgggagtggtgaattagagtttagttagattttggaggttggtagtaggttttgtagaggtgtaggggtattttatttagaaggggttatttattggttttttgtggttaaaattagttttaagtaggattttttatggttggagttgtttttaaaggggtgttggtttttatttaggtgtgattttgagtgttgtttagttgaaaaggtgtgatgatagggagtatatgtgaggttatttgggaagaatattttgttaagtgtagaggttgtaaaaatgtggaatatggttttgttttttatgttttattgaaaatgattattagaagtagaaattgggtttgtgtttagaatttgaaaatttgtagggtagaaaaataggataaaggtattttttagtgattgtaaaattaaattttaatagaaagatgtttgaagagataggtggattatgattttagaattggagataggagaggtttttagaattaaagattatttatggttatataaatatttgagaggtatttttattaaaatatttttttttttatattaatattatgaattatatgttatgtataatttataatagagtatagtagagttattagtggtttaaagtgttgtatatatgattgttatatgaggtaaataagattttttgatttagagttaagaaaatggaaataataattgttaaggtatattaagaattatatatgtatgtgtgtgtgtatatatatatatatatatatatatatatatatatatatatatatataatatttaatttttatagtaatatatatttataaatgagtatatataaatatgtgtgtgtatgtgtgtgtgtgtatatatatttatttaatttttgtagtaattttataaggtagggattattgtaatttttatttgagagaggtgtattttgaagtatttggtagtaaggtaatttgtttaaggttatatagttagtaataagtatagtatggttttgtaggtttaggtgggttttattatattgttttttttggtagtaagaaaatggaaggtttttgaagtagtgggggagttattgggtataaggaagtagatttttggaggaatatataattagtaaaagtggagtttaggaatagatgttattaggtataagtgatttttttagatattgggaatttgtgttttgaaatattaaagtatttttaggaagtagaaaagttagtttttttattgaattgttatgtggttttgaagaaaatgttttaatatttataaaatttaaagttttaatttgtaagaaggaaaaaatgttatgtgttttttattaagttttttttt

SEQ ID NO: 3916 - DNA, 2299 bp, Artificial Sequence
  chemically treated genomic DNA (Homo sapiens)
aaaaaaaaatttagtaggaggtatatgatatttttttttttttgtagattaaagttttgagttttatggatattaggatattttttttaaaattatatagtagtttaatgaaagagttaatttttttgttttttaaaaatattttggtgttttaaaatataagtttttagtgtttggaaaaattatttatgtttggtaatgtttatttttgggttttatttttgttaattgtgtgtttttttagggatttgtttttttgtgtttggtgatttttttattattttaaaaattttttatttttttgttgttagggaaagtggtgtggtggaatttatttgggtttgtaaggttgtgttatgtttgttattagttgtgtgattttgggtaagttattttattgttaggtgttttagggtatgttttttttaagtggggattgtaatagtttttattttataagattgttgtaaggattaaatgagtatatatatatatatatatatatatatatatatttgtatatatttatttataggtatgtattgttgtagggattaaatgttatatatatatatatatatatatatatatatatatatatatatatatatatatatatatatatatataatttttaatatgttttagtaattattatttttatttttttaattttgggttagagaattttatttattttatataataattatatatgtagtattttaaattattggtaattttgttatattttgttataggttgtgtatagtatataatttatgatattggtgtgaagaaagggatgttttaatgaaaatattttttaaatgtttgtgtagttatagatgatttttaattttgaaaattttttttgtttttaattttgaggttataatttatttgtttttttaggtatttttttgttgaggtttagttttgtagttattaaaagatgtttttgttttgtttttttgttttgtagatttttaggttttgaatataagtttagtttttgtttttgatgattatttttaatagagtataaaaaatagagttatgttttatgtttttatggtttttgtatttggtaaaatattttttttgaatggttttatgtgtgttttttattattatgtttttttagttaggtaatgtttagagttatatttgagtggaggttgatgtttttttggaggtgattttagttataaaaagttttgtttggagttggttttagttatagagggttaataaatggttttttttgaatgaggtgtttttgtatttttgtagagtttgttgttagtttttaggatttaattgggttttgatttattgtttttaattttatatttaggtaagtgtgtttagtttttgtttttgtttttattttaagatttgagtttttattttttagaatttggtaggttttgtttgataaggatttgtagttttttgttagttgttatatttttgttaaggtgtgatttggagttttggagttatttttggagatgtgaaaattagtttttatttttagttaaagtgtttggaaagaaaagtttgatttttagttttgatttggtttttaaaaaaattttttaaggggaatattatatattagggtttgttgggggggttggggttgggggagggatagtattaggagaaatatttaatgtaaatgatgtgttgatgggtgtagtaaattaatatggtataggtatatttatgtattaaatttgtatattgtgtatatgtattttagaatttaaagtataaaaaaaatttataaaaaattttttatatgatttatttttagaattggtggtttttttttgtgtggtgttggaattaattttgtttttttttattatttgtggtgtattttgttttttttaatttttaaaaaattagtgttaaatttttttttttttttttgagataaaattttattttgttatttagattggagtgtaatggtgtaattttagtttattgtaatttttatttttagggtttaagtaatttttttgttttagttttttaagtagttgggattataggtgtgtattattatatttaatttttgtattttagtaggggttggttttgaattttttttattgtgatttatttgttttggttttttaaagtgttgggattataggtatgtattattgagtttagtttagttttgaatttttgatgagggaatttttgatttttttgtgtttttattttgggatttttttttgtttattaaatgaatgattttggtattttttggagaaaa

SEQ ID NO: 3917 - DNA, 2270 bp, Artificial Sequence
  chemically treated genomic DNA (Homo sapiens)
gttatattttatgttttttgagagtgttattaatggaattgagaaaataattatttagatgggttatttgggggttgatttttattttggaatttttttggaaggtgaatggtttatgttatgtagttgttatgtaagaggtattatgggatttttttttttgggtgtttatggagttgtggtagagttttgggtgatttagtagtagttgtttgttgtgtggttgtttttattgtttttttttataattgttgttgatttttttgtattgattttgtagatgtttttttggttttgtggtgtttttttggatttttaagggatttttgtgtatttattttagttttttttttgttagtaatgtttatttttttagtttttttaagtagttttataaaaaatttttagtgaaaaatattagttaagaaggtgaaggtatttggaaaatttttagatttggttattgtgtgttgtaattttagtttttttttatagttatgatatgtatattaatgtaggtgtttttgagatttttgtaggtttgagaaagtatgatatgtttttagaattttggatttggattttattttggatagtatatgataaggatgaggatttttattttagttagttaaagttggatagaatttttaaaagtaatgaagttagttttttggatatatttatgggttttgttttgagaaggaattgagtaggtagtgagaagagttgagtgaagtttggtttgtgagtgttttaataattgagatgaatgttgatttgtttgtaggtaagttgttagtaagtatttattaaatatttattgtgagttttgtattttgtttagttattaagaaattaaaagggggaaaaatagttttatttgtttagagtttataataaatttgtattgtgaatatagaatatagaaaaattggattttagtgaggtgttagaaagagtgtattgtttagttgagatagtagatgaaggaaaaatatttttggtttttttttgttatgtaattgtattgggagggtggagtgttggtgtttttagtttatttaatttggatggagttgtgggtttattagtttggggattggttttattgtttgttttgtttagtagttgtgtttttttggattttttgttttagtttgaattttttttttgttttggttttattttaagatgaagattgtgtaatttagaaaatgtagtgtaagtaattatgtttagtgtgatgttaaatattttttaaaggtagtgtagatttgtagaaattgtagtttgggagaagtgatggtgtttttttttttattattttagtttgttttgattatttttatttatatgatttattgtgatgtttttataatgtagtttggttattatttgggaatttgttggaaatgtagattttggtattttgtttaagattttaaattgaagaaggttttagtttttttttgtaattagtaatagatgtaatttgtatggttttgatgtaaattgatttggaagaatggttttggtatttatattttggtttttagatgtaggtaatttgagttgaatatttttaaatttgaggtatagtatagaaaaaagaatataaatagtttatataaagtaaaaaaattttttagaaaggatttaagttggttggggtgtggtggtttatatttgtaattttagtattttgggaggttaaggtgggtggattatgaggttaagagatggagattattttggttaatgtgaaattttatttatattaaaaatataaaaaattagttaggtgtggtagtaggtgtggtagttttagttatttgggaggttgaggtaggaaatttatttgaatttgggagatggatgttgtagtgagttaagattgagttagtgtattttagtttgggggatagagtaagattttgtttttaaaaaaaaaaaaaaaaaaaaaaattaggtttaggtaatataatgaggttttatttttataaaaaaataattgttttaattagttaggttgatggtgtgtatttgtgattttagttatttaggagggtgaggtgggtggattgtttgagtttaggagtttttttttgggatgtttttatttttgtttgtagttttatttgttattttgtgtagatttattttgtttttgttttgttttgttttgttttgtttttgagatagttttgttttgttatttaggttggagtatagtggtataattttggtttattgtaaattttgttttt

SEQ ID NO: 3918 - DNA, 2270 bp, Artificial Sequence
  chemically treated genomic DNA (Homo sapiens)
gggggtggagtttatagtgaattgagattgtgttattgtattttagtttgggtgatagagtaagattgttttaaaaataaaataaaataaaataaaataaaaatagaatgagtttgtatagagtgataaatgaggttgtaggtagaaataagagtattttaagggagggtttttgggtttaagtgatttatttattttatttttttgagtagttgggattataggtgtatattattaatttggttaattaaaataattatttttttgtagaggtggggttttattatgttgtttaggtttgatttttttttttttttttttttttggagatagagttttgttttgttttttaggttggagtgtattggtttaattttggtttattataatgtttattttttaggtttaagtgagttttttgttttagttttttgagtagttgggattattatatttgttattatgtttggttaattttttgtatttttagtatagatggggttttatattagttaggatggtttttattttttgattttgtgatttgtttgttttggttttttaaagtgttgggattataggtgtgagttattgtgttttagttaatttaagttttttttaaaaaatttttttattttatataaattgtttgtatttttttttttatgttatgttttaggtttgaagatgtttagtttagattatttgtatttaaggattaaaatgtaaatgttagggttatttttttaggttagtttgtattagaattatgtaggttgtatttgttgttagttataagagagagttaggattttttttagtttaaggttttaggtgggatgttaaaatttgtatttttagtaagtttttagatgatggttaggttatattgtgagaatattataatagattatgtgagtgagaatgattagggtaggttgaggtggtggggagaggaatattattattttttttaagttgtagtttttgtagatttatgttgtttttgggaaatgtttagtattatattggatataattatttgtgttgtattttttgaattatatagtttttgttttagagtggagttagggtaaaagaggaatttaagttggaataaggagtttgagaagatgtgattgttggatagaataagtgatgaagttagtttttaaattgatgagtttgtagttttatttaaattaaatgggttgagaatattaatattttatttttttggtatgattgtatggtagggaggaattaaaaatattttttttttatttgttattttagttaagtagtatattttttttagtattttattagagtttagtttttttgtattttgtatttataatataggtttattatgaattttgagtagatgaggttattttttttttttttggttttttagtaattaggtaaagtataaggtttatggtgggtatttaataaatatttattgataatttgtttgtaagtgagttgatgtttattttagttgttgaggtatttatgggttaggttttatttgattttttttattgtttatttagtttttttttaaagtaaagtttgtggatatatttaaggaattggttttattgtttttaaaaattttgtttagttttaattggttagaataggggtttttgtttttgttatatgttgtttagaatgaagtttaaatttaggattttgggagtatgttatgtttttttgaatttgtaggagttttaagggtatttgtattgatatgtatgttatggttgtagaagggggttgggattgtagtatataatagttaaatttggggattttttagatgtttttgtttttttggttagtattttttattgaaggttttttataaaattgtttaaggaaattaggggagtgagtattgttagtagaaaggggattaaaatagatgtatagaggttttttaaaagtttaaaggaatattatgaggttagggaaatatttgtagggttaatgtagagaaattaatagtagttgtgggggaggatagtgaaggtagttatatagtaggtagttgttgttgggttatttagggttttgttgtggttttatgagtgtttagaaggaaaggttttatgatattttttgtataataattgtatgatataggttgtttattttttaggaagattttagggtaaagattagtttttaaatagtttgtttggatggttatttttttaattttgttggtagtatttttagagaatatagagtatagt

SEQ ID NO: 3919 - DNA, 2471 bp, Artificial Sequence
  chemically treated genomic DNA (Homo sapiens)
taggttgtgggggtggtttttgtgtggtgttaagaggaagttgggaagttaagtttttatgttttatgtatgttgtgttttaggttttgatgttggtttatatataggtggatatttttgagttatttaagataaagtttaaagaggaaatagttttagtggttggggtaagatttagatggattttttttttgggttttgttttatttgttatattataaggttttaggtagatttgtggttattttttttggtatttaggtataatagttgtttggttgtgggatttttaggtttagtgagtttttttttgtgtttgttggtttttttggttatgggtaggatttttgtggtgtagggagggatatgttagagtttttagtattttatttttaagagagggatagagaattatttagaggggttggggatgttaaaggggtatatgaagattttaatttttagttttttagggttgtagtttagaggtagtttgttttttttttaaaattaaatttaaatttaattgtatttagaagtttttgtattgggaggtgtttgtttaggatgttttagtttggttttgtttttttagatagttagggatttaggttataattggttaatttagtgggtgaatttgagtttgtagtagtgttggttgattgtttttatttagtgttgtaattggtatatttgtagataggaaattttttttattgaagtttttagtttattatttgagatatttggtgtgggtgggtgatttagagataaataatgagtgggggttttttgtatagtaattaattgttttaattgttaatatgtttaatttattatgtggagattaaggttgtgttgaggaaggggttttggtttttttttgtttttagattgtagggtttattttgtaatgttaatgtttatggtttttgttagttgtggttaggtgttaggtatatgggtaatgggtagggttagtatttggttttatatgggagttttgtgtagtatttgggttttttttgtgtgtgtgtgtattgggtatggaggtattttttttttttgttggagtttagtttgtgtggatgtagtgtatatttggtataggaagtagagttggagatgttggtattgttagttgtgttgtttttagggtgttttattttaattttttagagtggattattttttattgtaagtagaaataaagtttggttaaaggtttattgtataaattagtagaaaatgtttgtagttgttgatttgggaagtggtttttgaatgtttataaaatttggttttgagtagtagtgaagttagtatatgtttgagtggtttttagtaggtgtgtagaagttgtgttgtttttgggaagtagggttagaggttaaggattgtgaaaagtttttatttttagtattaattatgttaggtagattgtttgggggatgtttattttgaaagtataaaaaaataaaatagatttttagtaagggaggatgggtgtgtaggttatggtagttttgttgagtagggaggggttttgtttgttgtttgttaggttgatgttttggttttttggggatatagtttttggtttattggtttgttatatttttatgggtttggttgagggttgttttttggtttaatggtaatagtttttttatgttgtgggtgaatggaggtgttagtagatagaggaggagggttagggtgtggtgggagggagaaatttgttattttttttttagagtggagtttatttgggaatgatagtaggaggataaattttgaaagaaaaataaagtggagtttaggatgagaattattagtatattttagagtttaaaatgttatttaattttttgtagtgtttattataataaatttatttaaaatttatttttataatgtggttgagaatattgtttttgttgattgattatttttgggttaagagttttgtgtgtgtttaggtattttaggttttttttggttattatttttgtgtttgtgtttattgtataaaagtgaagttttagttgttttaggttggttttttttttgattttttattttgagtgattgttttagaagtgtattattttatgatatagtttgtgtttttgggagtttttttttaggagatattgatttttggttagttttatgtaagtttggttagttgatggaggtggaggtaggtgatttgagagggattttggttttgattttgggtttttgtaggggataatggattaggtttagtatagaaaggttttggagaattaataatattgattaggttgtttttgtttttaatatgtaagttgatagggtgattgggaaaattaggagtttaaattagatggttaggtattgaggtgggtaggatatttgagtaggtatgttgtgtgtgttgttatttattttgatgaggatttgtagttttttttgtggtg

SEQ ID NO: 3920 - DNA, 2471 bp, Artificial Sequence
  chemically treated genomic DNA (Homo sapiens)
tgttgtaaggagggttgtgggtttttgttagggtgggtggtggtatatatagtatgtttgtttagatgttttatttattttggtgtttggttgtttagtttaggtttttagtttttttaattattttgttaatttgtatgttgaaggtgggagtaatttagttagtgttgttagttttttgaggtttttttgtgttgagtttggtttgttgttttttgtgagagtttaagattagagttagggttttttttagattatttgtttttatttttattagttaattgggtttgtgtggggttggttaggggttagtgttttttgggggagggtttttagaggtataagttgtgttatagggtgatgtatttttgaagtagttatttggaatgggaaattagaaaggaaattagtttggagtggttgaggttttatttttgtgtagtggatataagtgtagaggtgatgattggggaggatttgagatgtttgagtgtatgtagggtttttggtttggaggtgattagttagtaagagtaatgtttttagttatgttgtaaaagtagattttaagtaagtttattatgataaatattatgaaggattaggtaatattttggattttggagtgtattgatggtttttattttaaattttattttattttttttttaaaatttatttttttattgttatttttaaataaattttattttaaaggggaggtggtgagttttttttttttattgtgttttagttttttttttttgtttgttgatatttttgtttatttatagtataagggagttgttgttattgaattgaggggtagtttttgattaagtttatagggatgtagtagattaatgggttgggggttgtgtttttggaaagttggggtgttagtttggtaggtaataagtgaggtttttttttatttagtagagttgttgtggtttgtatgtttatttttttttgttaggagtttgttttatttttttgtatttttaaaatgagtattttttagatagtttgtttggtatgattgatgttgggggtggaagttttttatagtttttggtttttgattttgttttttgagggtggtgtggtttttgtgtgtttgttgggggttgtttgggtatgtgttgattttgttgttgtttagagttaggttttgtaaatatttaggagttattttttaggttagtaattgtgagtgttttttgttggtttgtatgataagtttttaattaagttttatttttatttgtaataaaggatgatttattttgggaggttaaaataaagtgttttaggggtggtatagttggtaatgttaatatttttgattttgttttttgtattgggtgtgtattatgtttgtataagttgggttttgataggaaggggggatgtttttgtgtttggtgtatatatatatagaaggggtttaggtgttgtatagagtttttgtgtggggttgagtgttggttttgtttgttgtttgtgtgtttggtgtttggttgtagttggtgaggattatggatattggtattgtgaagtgggttttgtagtttggaagtagaggaggattagagttttttttttgatgtagttttgatttttatgtggtggattaaatatattagtagttaaagtagttaattgttgtgtagggggtttttgtttattgtttgtttttgaattatttgtttatattaggtgttttagataatagattgggaattttagtgaggaggattttttgtttgtagatgtgttgattatagtgttgagtgaagatagttagttagtattgttgtgggtttgaatttgtttgttgagttaattagttgtggtttgaatttttggttgtttaggggagtagggttaggttggggtattttgagtaaatgttttttagtgtaggggtttttaagtgtagttaagtttagatttggttttaaagaagggatagattgtttttggattgtagttttgaaaaattggaagttgagatttttatgtgtttttttggtgtttttagtttttttggatggttttttgttttttttttgagggtgagatgttgaaggttttggtgtatttttttttgtattataggagttttgtttatggttagaagagttagtagatataggaggggatttgttaaatttgggggttttatagttaggtagttgttgtgtttgagtgttagggagggtggttataggtttgtttggggttttgtgatatggtaggtgagatgagatttagggaaggaatttgtttggattttattttagttattgaagttattttttttttgggttttattttagataatttagagatgtttatttgtgtgtaaattagtattagagtttgaaatataatatgtatggagtatgggagtttggttttttggtttttttttggtattatatagaggttatttttatagtttg

SEQ ID NO: 3921 - DNA, 2343 bp, Artificial Sequence
  chemically treated genomic DNA (Homo sapiens)
ttgtttgtataagtttatgaggtgtgggtgggtttttgggagtgtgtttttagggttaagggtgggttttttatggtattgattatttatttttatttatggttttttattgtttttagaataaagtttttttgttgtagtttatttggtattgtatttttgatttttgttgtttgtgtgggtttttttttttgttgattttatttgtttttttgtgttttaggtgtatttagttttatgtatttatttatttatttttgtaggttggggtataggggttgaagattggataggggagtttgagttttagttttatttttgttgtgtattgaatttaaattttggtttttttttttagtagattgtatatatttgattgtttggtttgggggtttttgtgaaggttaaaggagtgaatgtttattagtgtgttttttgttatatatttttttagtattgagttttattgttttagtttggaatttgtttattgttttttatttataggtttttgtttgagttaggttattgaaggggtttaggatatgttattttagaatatattattttggtatattgatttttttgtattaaaggtattttagaaatagtaggtgtagaaagggggttttgatttttttttttttttttgaaagtaggagttaaaatgttttgtgaaagatgttttttttatgttaggaggaggaaagatattattagataaggagagttgaggttaaaagaaatttgtatgaatagattttttaatttttatttttttagttatataattgttattttatgtttaatttggtataaaagtttttatgtttagttatttttttgggttttggttatttgggtgggaggtgggggggtttttttgtatatgtaaatgaaatttgtatgttttttttttgttgatttgttttatgttagtttaattttttagtttagttagagattttaagatagtaaagaagggtttttttttttttattttattattattttgtatttttttgtttttatttttgttttttatttagtagagagagtgagtttattataaatataagttattttagttgtttttttgagaattttttatggttatttgttttttgttaaataaaatttatagttttgattgtggtttagggattttatgtaatgagttttagtttgtgtttttgttatttggttttttttttgttttaaagtattagggtttttatttgaaatttattggtgttgtgagtttttagtaggttattttgggtttttttttttatttttagtttggttaggtattttttgttttggtagttttttttagagttttttttttttttaatatttttttttttaggattttttatttgtaatgtaatgattttttaatttgtttttattttattaaagtattgtttgtaagtaaatttagaaattagtagaatagtttttgttttatgttttttatgttttggtgtatatattttaatattttgagtggatgtttgaatttgtggattatagtgaatttgtatatatatgttattatttttttttgtatgatgttttatatatttatggtaattttttttttaaaagaaatagggtttttttatgttggttaagttagttttaaattttaggttttaagtaatttttttattttagttttttaaagtattgggattataggtatgagttattttgtttagtttgataattttttttttttttttgagatggagttttgtgttgttgtttggattggaatgtagtggtgtgattttggtttattgtaatttttattttttaggtttaagtgatttttttgttttagttttttgagtagtagggattataggttgataatttttttttaaataaaagattttatttatgtattattgaatttagtttattagtgtagagtatatgaataaagagaaaaagtatttttttaattaaatatgtttagttgtttagatagtggtgatatttttagtttgttatggtaatatgattataattttgatataatatgaatatgtgtagtattttatgtttaattttttatagatttagtttggttttttttaatatttttttttggagttgtatttgatgttattattagtttttatatagatttattggggaatgggataattttgtttttgttttttgtgtaggaattatttgattttgaaagttttgtgagaagttgtggtgagaaatggagttaattatatattatgatggtggagaaagataatgtttaatttataaattaggtatagttaagagatgaatagtaataattaataatat

SEQ ID NO: 3922 - DNA, 2343 bp, Artificial Sequence
  chemically treated genomic DNA (Homo sapiens)
gtattattaattattgttgtttgttttttaattgtgtttaatttataagttaaatattatttttttttattattgtggtgtgtggttgattttgttttttgttatagttttttataagatttttaggattaagtgatttttgtataagaaataaaagtaaaattgttttattttttagtggatttgtatgaaaattggtaataatattaggtatagttttaaaaggagatattggaaagaattaagttgggtttataaggaattgagtatgagatgttatatatatttatgttgtattaaggttgtgattatattattatagtaagttgaaaatgttattattatttggatagttggatatgtttgattgggaaggtattttttttttttgtttatatgttttgtattagtaggttgggtttagtaatatataggtgagattttttatttaaaaaaaagttattagtttgtaatttttgttatttgggaggttgaggtaggagaattgtttgaatttgggaggtggaggttgtagtgagttaagattgtattattgtattttagtttgggtaatagtgtgagattttgttttaaaaaaaagaaaaaaattattaggttgggtgaggtggtttatgtttataattttagtattttgagaagttgaggtgggaggattgtttgaggtttggagtttgaggttagtttggttaatatagggagattttgttttttttaaaaaaaaaattattatgggtatgtaaaatattatataggaaaaaataatagtatatatatataggtttattataatttatggatttaggtatttatttagggtattgggatgtatgtattgaggtataaggggtataaagtggggattattttattggtttttaaatttatttgtaaatagtattttgataaaataaaagtaaattaaaaaattattgtattatagataaggaattttgaaggagggagtgttggagaaggggagggttttggagaaggttgttagagtaggggatgtttaattaggttgaaggtgaagagggggatttggagtggtttgttagggatttgtggtattggtgagttttagatggaggttttggtgttttagaatgagaagagggttgagtggtggaagtgtaggttgaggtttgttatatggggtttttaggttgtggttgggattgtggattttatttgatgaagaataggtggttataggaggtttttaaggaggtagttgggatgatttatgtttgtaatggatttattttttttgttgagtagggggtgagggtggaagtaggggagtataaggtgatggtggggtggaggaggaaaaatttttttttattgttttagggtttttggttgggttgaagaattaaattgatataaggtagattagtaggagaaaaatatatagattttatttatatgtataagggagtttttttgttttttgtttaaatgattaagatttaaagaagtgattaggtataaaggtttttgtattaggttgaatatagaatggtaattgtgtaattaggaagataaggattaaaagatttgtttatatagattttttttggttttgattttttttatttggtaatgttttttttttttttggtatagggagggtgttttttataaggtgttttagtttttgtttttaggaagaaaaggggaggttagagttttttttttgtatttgttgtttttgaagtgtttttagtgtagagaaattaatatgttagagtggtgtattttggggtggtgtgttttgaatttttttagtggtttggtttagatgggagtttgtggatggagagtagtggatgggttttaggttggagtagtaaggtttggtgttggggaggtgtgtggtagggggtatattgatgagtatttatttttttaatttttgtaagaatttttaggttaggtagttaggtgtgtataatttattgaaggagaaaattgaagtttaagtttagtgtatggtaggggtagagttggggtttaaatttttttgtttagtttttagtttttatattttaatttgtaggaataagtgaatgaatatatgaggttgggtatgtttggggtatagaggagtgagtgaaattagtagaggaggaggtttgtgtaggtggtaggaattaaggatgtagtgttaggtgggttgtggtgagagagttttattttgagggtagtgagaagttgtgggtaggggtgggtggttagtgttatggaaaatttatttttgattttgaggatatgtttttaggagtttatttatattttatgaatttgtatggataa

SEQ ID NO: 3923 - DNA, 2399 bp, Artificial Sequence
  chemically treated genomic DNA (Homo sapiens)
ttgtaggatatataggtggttaggttgagtttttaggaggtgaaatggttttgtttatattggttatggttttttttttttttgttttgttagttttttgttggtttggggtttttatatatgtttgttggtatagttttgttttttttgaattttttttttttttttttttgttgatttagtgtttttttttgtttgggttgtgtaaggattttgggttttgtttttttatttttttttggtttgtttttagtttttatggtgatgtttttgttgggtggaagttagttttttggggtgaatttaggtttttgttgttttagtgtttggttattttttgttggatatatttatttatatttttttgggatatttttttttttatttttggtttttgaagttggggaaatattttttttggtaggtgaggtttgagtgatttagatttgagtagttttggatattatatttttttagttatatagagatggatgtgaggattgggtatatagaggggatatatggaaatgttggttagggttttggttttttttttgaatttgttattgagaggatagaaagtttttggtttttgttattattttgttagtagagggtatttagatattttatattggaagttggaaagatagtgtgtgtgtttttattaagttatatttgaagtttggtttgtatttggatttgttatttttgtgggttgataaaggtttttttgttttagtgagtttttaattgtatttgtatgagtattagttagtataggttatttaaattatagatttgtaggttgggaaggaggtttattttttttatttgttttttagaagtatttttttagttgaggtatagttttagggaagggttggtggggatagattatgggttaggattgttttgggttaggatttgggattttgttgtagttttgttgatttgtagagaaatgtttggtttgtgtaggtttttagtaattatgttgtagaagtgggtttggtttattttgaagatttttttttgttgtggtattttttggtgttggaggaatgagtgttagttggtgttttttgtttggtttgaaaggttgatatgaattgtgtatttgattttggtagttgattgtgttgattttttagttttaattataatgagtatgagtatgaatgttttgaaatatagatgtatatgagttgttaaatatggtgagttattatatttttaatttttaggtaagtttaggtgttaggggaagtgatttatatattaaagagatgaagttttggtttttgtgggtgggggtggggagagggttggggagttgttggttttggggtgggagtgtatatttttgtttgttagattagaggatgtttgagaggtgatagagatggggttttttagttttgtgaaatttgagataggtttgataaattattttaataaaaagttttttgaagagaataattgggggaattgggtggagttttggtagtttttataggttggtaggtgttgagggataggtgatattattattttatggggagtgtaggtatgtgtgtgtgagtgtgaatatgtgtgtaaatgtgtgtgtagttagtgtgtgtatgtgagtgtgtatgttgtgaggatgtgtgtgtgaagggtgtttgtatgtgaatgtgtgtgtgttagtgtgtgtatgtgagtttgtgtgttgggtgtgtgtggagggtatataagtgtgtgttagtgtaagtatgtatgttgtgggggtgtgtgtgtgggtggagggtgtataagtttgtatgaatgtgtatgtgaatatgttagtgtgtgtatgtgtgtgtgttgtggtggtgtatgagtgtgtgtggagggtgtataagtgtgtatgagtgtatgtgtgtgttttgtggggtatatgtgtgtggagggtgtataaatgtgtatgagtgtgtatatgaatatgtgttaatgtgtgtatgtgagtgtgtgttggggtgtgtgagttgtgttgagggtttataagtgtgtatgagtgtgtgtatggatatgtgtgttagtgtgtatgtgagtgtgtgtgtggatggtgtgtaagtgtgtatgtgtgtgtaaatatgtgtgttagtgtgtgtatgtgtgtattgtgggagtgtgtgtggagggtgtgtgtgaatgtgtgtgtagtgtgtgtatgtaagtgtgtatgtttgtgagtgtgtgaagggtgtataagtgtatgagtgtgtgtatgtgaatatgtgtgtgttagtgtgtgtatgtgagtgtgtgtgttgtggggggtatgtgtgtggagggtgtgtgtatgtgaatgtgtgtgtagtgtgtgtatgtaagtgttggtgttgggtgtgtgtgaagggtgtgtaagtgtgtgt

SEQ ID NO: 3924 - DNA, 2399 bp, Artificial Sequence
  chemically treated genomic DNA (Homo sapiens)
atgtatatttatatattttttatatatatttaatattaatgtttatatgtatatattatatatatgtttatatatatatattttttatatatatattttttataatatatatgtttatatgtatatattaatatatatatgtttgtatatatatatttatgtatttatatattttttatatatttataaatatgtatgtttatatgtatatattatatatatgtttatatatattttttatatatatttttataatgtatatatgtatatattaatatatatgtttgtatatatatgtatatttatatattgtttatatatatgtttatatgtatattaatatatatgtttatatatatatttatgtatgtttataaatttttaatataatttatatattttaatatatatttatatgtatatattaatatatgtttatatatatatttatgtatatttatatattttttatatatatatattttataaaatatatatatgtatttatgtatatttatatattttttatatatatttatatattgttataatatatatatatgtatatattaatatgtttatatatatatttatgtaggtttgtatattttttatttatatatatatttttataatatgtatgtttatattaatatatatttatatattttttatatatatttaatatataagtttatatgtatatattaatatatatatgtttatatataaatattttttatatatatatttttataatatgtatatttatatgtatatattaattatatatatatttatatatgtgtttatgtttatgtatatgtgtttgtattttttgtggggtggtagtgttgtttgttttttggtatttgttaatttgtgggagttgttaggattttatttaatttttttaattattttttttagagaattttttattaagatgatttgttaggtttattttgaattttataggattaaaaagttttatttttgttattttttaggtattttttgatttgatagataggaatatgtgtttttattttagagttaatagttttttagttttttttttgtttttgtttgtagaaattaggattttatttttttgatgtataggttgttttttttggtatttaagtttgtttgaaagttgggaatatgatgatttattgtatttggtagtttgtatgtgtttatattttaagatatttatgtttatgtttattataattagggttggagaattagtatagttaattgttaaaattaagtgtataatttatattaattttttagattagatagagagtattagttgatatttatttttttagtattaggaaatgttatagtagaagagagtttttaagatgggttagatttatttttgtagtatggttgttgggagtttgtataggttaggtatttttttataggttagtagagttgtagtaagattttaggttttgatttaaggtagttttgatttatggtttatttttattggtttttttttggagttgtgttttagttggggaggtatttttggaaggtaggtggaggaggtaagttttttttttagtttgtaagtttgtggtttaggtggtttatattaattgatatttgtataggtgtaattgagaatttattgaggtaaaagggtttttgttaatttatagaagtgataagtttaagtgtagattaggttttaggtatggtttgatggaggtatatatgttgtttttttagtttttagtgtagggtgtttgggtgttttttattgataagatggtagtaggagttagagattttttgtttttttagtgataagtttagagggaaagttagggttttggttaatatttttgtgtgttttttttgtgtatttagtttttatgtttatttttgtgtggttggaggagtgtaatgtttagagttgtttgggtttaaattatttaggttttatttgttaggaaaggtgtttttttagttttagggattagaagtggggggaaggatgttttaggaaaatgtaggtggatgtgtttagtaaagagtaattagatattggggtagtaaggatttaggtttattttagaaggttggtttttatttaataaagatattattatgggagttagagatagattgggaggaggtgagaggatagagtttagggtttttgtatggtttaggtggaagggggtattgagttaatagaaaggaagaaaaagggagtttagaggggatagggttgtgttagtagatatgtgtggggattttaggttggtgaggggttggtaaggtaggaaggagggaggttatggttagtgtaagtagggttattttattttttgggagtttagtttgattgtttgtgtgttttgtgg

SEQ ID NO: 3925 - DNA, 2431 bp, Artificial Sequence; identical to SEQ ID NO: 3315
  chemically treated genomic DNA (Homo sapiens)

SEQ ID NO: 3926 - DNA, 2431 bp, Artificial Sequence; identical to SEQ ID NO: 3316
  chemically treated genomic DNA (Homo sapiens)

SEQ ID NO: 3927 - DNA, 2497 bp, Artificial Sequence
  chemically treated genomic DNA (Homo sapiens)
ggtagtttttttgtttatagtatgggttattaggttaaattttgttattattgtggggaatttgatttggagttttatggttatttggatggattttgtgatgatagttatatttttggatttgtgagatagatagagaagttaggagatagtgtttagtattgatagagtataaattttagagtatattttttgtgtagggttgggttagttttaagtgtgtaggttttgttttttaaatttgaggtatttttgtttttttgattttattttgattaggttattgtgatttttgagagatatgtagtttaaatttatttttattaaagatttttgttggttttgggggtatttgtagtttttgaaaagtagatggggttagaggatttatgggaatagttttatttgtttgtgtttagaggaggttaggtggttttgtttttagttttttttgtatttttgttgggggtgtagatatggatgtagtttaggggtagttttttgtttattgtatatttgtaaagggttataggttatttaagtttttgatgggttggttggatttagtaattatatggttttttgttgattaagttagtaagattttgggtattgtagaattttataggggtaaggtaggtagtatgataataaaagttttaaaatatagggtttggtgtaagtttatgataggtttaaggtttttgttttgttattggtttttttgttttaatttttggttttgtggggataaagtttttttggtttgttttatttatggtttttttttagagtttaggtaaatttgggggtattgatgtatttagtttagtttttatatttttttgttattggttttgggaaggggtatttggtattagggagtttttgagtagaatgtgggtttattttgtaagtttttttttagggggattggtataaagttagagtttagtttttttaggttttaggttttatggaagggaaggggatttaggaagattgggtatgggaggaggtttttggggagttagtgttttttagagtttaggtttgtgggtgagttgagtagagggagttgttgttggatttttttggtgtttgttttgtgtttgattttgagggattttattggttgttgtttttgtagttgtgattatggataggttttagttttagattggttgttttttaaagtgaggggaggggttttgtttggtaaagttagaaggataattaagttgtaaagttttttgtgtttttttgggaaaaagagtgggttttttatttatgtgttaggttatgtatatggtattattggaggtttttatatgtagatttgagttagtgttatttagggtgtttttgtgattaaggatttatatataattatatatagaatttagaggtaaattgaaattaaaaatgggttaattatttaaatatttaggtaaaattattatgtttataaatgagttattaggttaatgtggggttatagttgagaattatttgggaaatttatatattttttattttagtttgggggtgaagatttgaattagaagtggttttaggtagtaatttattgttgggttattgtatttatttaggattgtgtttttatataggtatagtatagttttttggtattagtgttgggttttttttggttttttagttttgttttttatttttttttttttagtttagtagttttgtttgtattttagttttttaatttgagttttttagtaatatttttttttatttgtgatttgaataaatgattttgattttaataaatttagggtgagtttttataaatttttgagttattttttggtaagtttttattgattattttttgttatggtgttttttattgagtttatatatttgggaagaaagtataattaggagttgttaggtgagtagtgagagatgttattttttttttagttatttttgtttagttatttttggttagttatttttgtttaattattttttttttagttatttttttttagttatttttgtttagttatttttgtttagttatttttgtttagttattttttttttagttaatttttttttagttattaatgagttttgggaaaagtagatggggttaggggatttataaaatagttttatttgtgtttggattaggttaagtggttttgtttttaaaagtttagttaggttggatttgtgttttttttgtttaggttttttatggttttgggtattgtttttgttgttgtatggggaatttttagttggttttgggataattttgatgttgatgtttatttgttttttttattgttgggttattgtatttaaaatagtatatggtatatgtgagggtaggtgtttattaagtatttgtataatggttgaagagtaggttatggggggagaggatgaaagttagaaagagtgatttgagaatgatgttattttttattatttgtttattttttta

SEQ ID NO: 3928 - DNA, 2497 bp, Artificial Sequence
  chemically treated genomic DNA (Homo sapiens)
tggggaggtgagtaggtagtggggaatgatgttatttttagattattttttttagtttttattttttttttttgtgatttgttttttaattattatgtagatgtttaatgggtatttatttttgtgtgtgttatgtgttgttttaagtgtagtgatttagtaatgaaggagataggtgggtattagtattagggttattttagagttagttaggaattttttatgtagtagtagagataatgtttaaggttgtagaggatttgaataagggaagtataagtttagtttggttggatttttgggaataaggttatttggtttaatttaaatataaataaaattgttttgtgggttttttgattttatttattttttttagagtttgttgatggttgggaaggagttgattgggaaggaggtggttgggtaagggtggttgggtaggggtggttgggtaagggtggttgggaaggggtggttgggaagggggtggttgggtaggggtggttggttaggggtggttgggtaggggtggttgggaagggggtggtgttttttattgtttatttgatggtttttggttgtgttttttttttaggtgtatgagtttagtggagagtattatgatgaagagtggttagtgaagatttattaggaagtagtttagaagtttgtggaaatttattttgagtttattggaattaaaattatttatttggattataggtgagagagaatattgttgaaaagtttgggttgggaggttgggatgtaggtagagttattaggttgggaggggaggggtgagaagtggggttgggaggttgggagaggtttagtattggtgttaaggagttgtgttgtgtttgtgtgagagtatagttttaggtaagtgtggtgatttaataatgaattgttgtttgaagttatttttagtttaggtttttatttttaaattgaaatgaagaatgtgtgaattttttagataatttttggttgtgattttatattggtttggtgatttatttatgagtataatggttttgtttgaatgtttggataattggtttgtttttggttttaatttgtttttgggttttgtgtgtggttgtgtgtgagtttttgattatggagatattttgagtggtattggtttaagtttgtgtgtggggatttttagtagtattatgtgtgtggtttggtatgtgggtgaaagatttatttttttttttagggaagtatagaaagttttgtagtttaattgtttttttgattttattagataagatttttttttttattttaaagagtagttagtttaaggttgggatttgtttatggttgtagttgtaagggtagtagttagtggggttttttggagttaggtatggggtgggtattgaagggatttggtagtggttttttttgtttagtttatttatgagtttgggttttggagggtattgattttttaggagtttttttttatgtttagtttttttgagttttttttttttttatggggtttggggtttggaggagttaagttttggttttgtgttggtttttttaggagggagtttgtaggatgggtttatgttttgtttagaggttttttggtgttaggtgtttttttttagggttagtggtaggagggtgtgagggttgagttgagtgtattagtgtttttaggtttgtttaggttttggggagaggttatgggtggggtaggttaggaaggttttatttttatagagttgaggattggagtaggagagttagtggtagggtaaagattttgagtttgttgtgggtttgtgttagattttgtgttttggggtttttgttgttatgttgtttgttttgtttttgtagggttttgtagtatttaggattttgttgatttaattagtaagaggttatatggttattgggtttagttgatttattagggatttgggtgatttgtggttttttgtaggtgtgtagtggatagagagttgtttttgagttgtatttatgtttatatttttgatagagatgtagggagagttgggaataaggttatttggttttttttaaatgtagataaataaaattgtttttgtgggttttttgattttatttattttttagagattataggtgtttttagagttagtaagggtttttgataagaatggatttgggttatatattttttagggattataatggtttggttagggtggggttaggagggtaggggtgttttaggtttgggaaatgggatttgtatatttggggttggtttagttttgtatggagggtgtgttttggggtttgtgttttgttggtgttgggtattgttttttggtttttttgtttgttttatagatttaaagatgtggttgttattgtagaatttatttgaatggttatggggttttgaattaagttttttatggtggtggtagggtttgatttggtaatttatgttgtgaatagaagggttgtt

SEQ ID NO: 3929 - DNA, 2272 bp, Artificial Sequence
  chemically treated genomic DNA (Homo sapiens)
ttgaggttaaatatttgagattagttagagtaatatagtgatattataattttgataaaaaaaaaaaaaaaaaaaaaaaatgtgaaaaaattagttatgtatgatgttttatgtttgtagatttaattggttgggagattaaggtaaaaggatggtttggatttaagagtttagggttgtggtgaattatgattaaattatggtatttttgttttgataataaagattatattttaaaaaaatataaaataattttataaataaggattttaatgttataagtttttttataggttgtaaatgttttatgttaatttgaattgtattttaaaaagtaatgatttttggggtaaaggttatagaatatagttttaagaaataaatttatatatttattttataagaaataaatttatatttttgtgttataagagtttttgaaggagatattaaatgtagaaaggaaaaattagtattagttattataaaaatatattgaattgtaaagattattgatattataaagaaattgtaaattaatgggaaaaataaaaagttagtaatattatgataggataaattttatatgtaataatattaaatttaaatgtaaatgggttaaatgttttagttaaaagatatagattggtaagttggataaagagtaaagatttattgttgttttgtatttaggagatttattttatgtgtaaagatatatataggtttaaaataaagggatggaggtatatttattaagtaaatggaaagtaaaaaagagtagggtttgtaattttagtttttgataaaatagatattaattgaaaaagattaagagagataaagaatagtattataaagtagtgttatttgtttttttttaggtttttgttttattagttattaggtggtagttatttaggatgttggaatttggttatttttgttttttttagtgggtgaggttggtggttgttttatttgttttaggtatatttttaatagaggtggttgtttgttttttaagttagtttggttttgtttggtatgtataggttttggggattgatatgttgttttgattgagattgttttgattttgttaaattttatgtttggtttgggttatagaagtataagttttttgggtggtattattggttgttttttggattggaatataaagttttttttaagatgatttgtggtttgttttttggtaattaataagtttgtagtgttatatgatttatgagatatggattgaaggtttaaagggagtgtatattatgttttagagttagttgttttttttttttatatggttttatttgtagtatagttgttgtattgaggtttgtgtatgttgggtaagggtaagttggtttaaagggtaattagttatttttgtatggatgtgttagtagtaggtagattagttattaattttatatgttgttagttaggttaaattagtttttttattataaaggtagggttatagtgttatttggtttttttaaggtttttgtttttttagttattaggtggtatttatttaggttttgggaatttggttattttggttttttggagtgggtgagttggtggttgttttatttgttttaggtgtatttttgtagaggtggttggttgttttttgagttagtttggttttgtttggtatgtatagattttagttatggatatgttattttaagtgagtttgttttgtttatggttaaattttaagtttggttagggttatagaaggtagagttttgagggtggtaattttggttgttttttgtatttgaatataaagttttttttaagatggtttatggtttgttttttggtaattaagaagtttatagtgatataagatttttgaggtaaggattggagtttttaaaggtagtatatattttgtttttgagatggttgtttgttttttttatatggttttatttgtagtatagtagtagtattgaggtttgtgtatgttgggtaaggttaagagggtttaaagagtaattagttatttttgtgagggtgtgttaggagttgggggtatagttattaattttatttgttgtaggatatggaatattagtttttttaataaaaaggtagggttaagggttatttgttttttttaaggtttttgttatattagttattaggtggtagttatttaggttgtgggaatatggttatttatttttttgattgggtaaggttggtggttggtttattttttttagatgta

SEQ ID NO: 3930 - DNA, 2272 bp, Artificial Sequence
  chemically treated genomic DNA (Homo sapiens)
tgtgtttggaggaggtggattagttattaattttatttagttaaggaagtggatggttatgtttttatagtttgagtggttgttatttgatggttgatatagtaaaggttttaggaaaagtagatggtttttggttttatttttttgttagaagaattgatgttttatgttttgtagtgagtgaggttggtggttgtgtttttagtttttggtatatttttgtagaggtgattggttgttttttgagtttttttagttttgtttagtatgtataagttttagtgttattattgtgttataaatggagttatataggggaaatgagtagttattttaggagtaaggtgtatgttgtttttgggggttttagtttttgttttaagggttttatgttattgtgggttttttggttgttaagaggtagattataggttattttgagaaggattttatgtttaagtgtagaaagtagttaggattattatttttgggattttgttttttgtggttttggttaaatttagaatttggttgtagataggataagtttatttggagtagtgtgtttgtagttggggtttgtgtatgttaggtaaggttaagttggtttaaagagtaattagttatttttgtaagggtgtatttagagtaggtggagtagttattagtttatttattttaggaagttggggtagttaggtttttaaagtttgagtgggtgttatttaatggttgaagaaatagaggttttaggaaaattagatggtattgtggttttatttttatggtagaagagttgatttagtttgattggtagtgtgtgaggttgatggttggtttgtttgttgttggtatatttgtgtaaagatagttggttgttttttgagttagtttgtttttgtttagtatgtataagttttagtgtaataattgtgttgtaaatggggttatatagaggaaaggagtagttggttttggagtatggtgtgtattttttttgggtttttagtttatgttttatgggttgtatgatattgtgggtttgttggttgttaagaggtagattataggttattttgaggaggattttatgttttagtttagaaagtagttagtggtattatttaggggatttgtgtttttgtggtttaggttagatgtagaatttgataaagttaggatggttttagttagagtagtatgttggtttttggggtttgtgtatgttaggtaaggttaagttggtttaaagagtaagtagttatttttgttaagggtgtgtttggaataggtggagtagttattaattttatttattgaaagaagtagggatggttaggttttaatattttgagtggttgttatttgatggttgatggagtagaggtttgaggaaaagtagatggtattgttttgtagtgttgttttttgttttttttgattttttttagttaatgtttgttttattagagattaggattgtaaattttgtttttttttgttttttatttgtttggtaaatatatttttatttttttattttaagtttatgtgtgtttttgtatatgagatgggttttttgaatataggataataatgggtttttattttttatttaatttgttagtttgtgttttttaattggggtatttagtttatttatatttaagtttagtattgttatatgtgaaatttattttgttatgatgttgttagttttttattttttttattagtttgtagtttttttatagtgttaatggtttttataatttgatatgtttttgtagtggttggtattggttttttttttttatgtttagtgttttttttaggagtttttgtaatataagaatgtggatttattttttgtaaggtaaatatgtggatttattttttgggattgtattttatggtttttattttaagaattattattttttaaaatgtaatttaaattagtataaaatatttatagtttatggaaaggtttgtggtattagaatttttatttataggattattttgtgtttttttgagatatggtttttgttattgaggtagaagtgttgtggtttgattataatttattatagttttgaatttttgagtttaagttatttttttgttttaattttttaattagttggatttataagtataaggtattatgtgtggttaatttttttatgttttttttttttttttttttttttgttgagattatggtattattatgttgttttggttgattttaaatgtttgattttaa

SEQ ID NO: 3931 - DNA, 2313 bp, Artificial Sequence
  chemically treated genomic DNA (Homo sapiens)
taggtaggggttttaggtttaggggtttttgagtagggaagattttagtaggaggtagggagggtgtttttttttatgtatagtattgtaggggtgtggtggggagggggtttttttttatgtatagtatttttggggtgagtttgaggggagttagtattaaaggttattgggatttagggttttggtagaggaagtgaggtttggggtagaggggatttggtttgggtgggggaggggttgtgattaagtttagggtattaggtggaggagggtagagtttggagatggttattattatttgggagttgtttttgtttttagttttgaggtagatgtttgttttggtggggtatgtttaggttatgggaggtgggtaggattattgtgggtgttgtaggggttgttggtggaggttagggtatagggaggggagaaattatagtttggattttatttttagtttaagttatatggaattgggggtttttgtatagaggtttgttttgtagtatggttttgagtagttgtatatatttaggtttaagtggtttttttaattatttttgtgtttatgattgtgtagggaatggttaggattttagggaaattttttggatatttggtgttgtttgtttattttagatttgtttttttgttttttagtttttttttagttggtttttgaggttttttttaggaggaggaggtttttgaggttttttttgtgagggttgatttgaaggtttgagatgtttttttttatttttgtaggtgattttttagaggattttgggtttttagagttgagggttatggagatttttggggtttatttatggttttgggattgtttttattttggtgggattaagttataatttggagtagtttaaggttggtataatagatatttataaattaataaaaataattgtgaaaatataagtaaaataagtttgttggtatttaagagttttgtagtagtagggttagtttgagagttgttttttttgttttatttggggttttagggtgttgtagtttgttattagagggattagatgtttgtggttttttaagggtttagtgtggagttatttatttttattagtatagagaagatttatgttttgtggttgaagtaggggggtagtttttttgatagttgtaggttgtttggttttgtgtttggggtatagttggtggggttttgttggttttgttttagtgtgggtatttggttataggttagtttttttttgaatggtttttgggttatggtatttggggatattatagttgtgttgaatgtatagttatgtgttattagttttttatttggaataaaattattattggttttggttattttgaggaaattttaataagttgtttttaagaaatattttttaataaaagaaatattgtttatattgaagtgttttaaatttgaagaagaaaatgagtatttgaatttaaaagtgaaaaagaaataatttttttagaaaaatggatttgaatagtttgggtttagggtgagattttatattttaaatgttttattgatttatttgggttttttaggtgtaatatttgataatatttattggtaattttgtttatgaatatattatgttggggatttaagtatgttaaattgttttaattggtagttaaatgagagattgtaaaatatgtttttatttaatggtttaatgtttgagtatttattttttttgttgttttgttgttgggagtattggtttttgggtgagggatttttagtaagaagtatttataaatgaaataaaagtttagtaaatttgagttgaaggtaggggaaggagagttgttttttgaatattaatgaggggaggaattgggtggattgtagaaatgttttgtgttggttgtgtaaattattgttttggagttgttagaatttaattaggaaaggaaggggttttgtttgtgttatttgttatagagtttgggttttttagaagaaagaagtgtttttaagaatagaattttattaagtatatattttgagtaggttttgtttttgaaatgtaattgtttatttgaaggttttttatatttttttaagtagtttttttttattttttatagttatatggtgggaattttttttatatggttatataagtatttatgtatttggtttagttgtgtggttttgggtggttttggatttggttttgtggtttgtgtgggtagtttggatggttggtgggtttggttttgttgttttttttatttttgtttattaagtagagaaaaattata

SEQ ID NO: 3932 - DNA, 2313 bp, Artificial Sequence
  chemically treated genomic DNA (Homo sapiens)
tgtggtttttttttgtttggtgagtagagataaagggggtagtaggattgggtttattagttatttgggttgtttatgtaaattatagggttgaatttggagttgtttaaggttatatagttaagttgagtgtgtgaatgtttatgtgattgtgtgaaggaggtttttattgtgtggttgtgggggatggaaaaaggttatttggaaagatgtagaagatttttgagtaaatagttatgttttagaaatagagtttgtttagaatgtgtatttggtgggattttatttttagggatgttttttttttttgagagatttgagttttgtggtgagtggtataggtagggttttttttttttttagttgggttttgatagttttgaggtagtggtttatataattaatatgaaatatttttatgatttatttgatttttttttttattgatatttaggaagtagtttttttttttttgtttttagtttaagtttgttgagtttttgttttatttgtgaatattttttgttggaagttttttatttagagattagtgtttttaatggtagagtagtgggggaggtaagtgtttagatattaagttgttgagtagaggtatgttttgtaattttttgtttagttattaattggagtagtttaatgtgtttgagtttttggtgtgatgtgtttatggatgaagttgttgatggatgttgttaggtgttgtatttggagggtttagatggattaatgaggtatttaaagtgtagaattttattttgaatttagattatttaggtttgtttttttaggaaagttattttttttttatttttagatttaagtgtttatttttttttttaaatttagagtattttagtatgaataatattttttttgttaaaaaatattttttggaaataatttattgaagtttttttagagtggttaaagttgatgataattttattttagataaagaattggtgatatgtggttgtatatttagtatagttgtggtgtttttaagtgttatgatttaggagttatttagagaggagttggtttatgattggatgtttatgttggagtggggttggtaagattttgttagttatgttttagatgtgaagttgagtgatttgtagttgttgaagagattgtttttttgttttagttataagatgtgggttttttttgtgttgatgggggtgagtagttttatattaagtttttggagggttatgagtatttggtttttttggtgatggattgtagtgttttggagttttaggtgggatagagagagtaatttttagattaattttgttgttgtagaatttttggatgttgatgagtttgttttgtttgtgtttttataattatttttattaatttatgggtgtttgttgtgttagttttgagttgttttaggttgtggtttagttttattagggtagggatagttttagggttatgaatgggttttaggagtttttatgatttttggttttgggggtttagggttttttgaggggttatttgtaaaggtgggaggaggtgttttaggtttttaggttggtttttatagagagaattttagggattttttttttttagggagggttttaggggttggttgggagggagttggggaataaaggaataggtttggggtggatgggtagtgttagatgtttgagggatttttttggggttttggttattttttgtatagttgtgggtatagagatgattggaggagttatttgggtttgagtgtgtgtagttgtttagagttatgttgtaggataggtttttatgtagggatttttggttttgtgtagtttgggttgagaatgagatttaggttgtgattttttttttttttgtgttttggtttttgttggtagtttttgtagtatttatagtggttttgtttattttttgtggtttgagtatgttttattaagataggtgtttgttttggagttggggatagaggtggtttttgggtggtggtggttatttttgggttttgtttttttttatttggtgttttggatttggttgtagttttttttttgtttaggttagattttttttgttttagattttgttttttttgttaggattttgggttttagtgatttttgatattgattttttttagatttattttgggggtgttgtgtgtgagagagagttttttttttattgtatttttgtagtgttgtgtgtgagagagagtattttttttgttttttgttagggttttttttgtttaggagtttttgggtttggagtttttgtttg

SEQ ID NO: 3933 - DNA, 2492 bp, Artificial Sequence
  chemically treated genomic DNA (Homo sapiens)
tttatttattaagtagggtggttattttttattttataggtgggtggtgtgaggtttttaggtgaaagggttttgtatataggaggtgtttaataaatgtttgtggtggttgtaataattttttgggggtgaagtaggaagtttgaggggtttagaaatgagagagatagagatagggagagatagagagagagagagagatagagagagagagagatagagagagagagagatagagagagggagagagagagggagagagagagagagagagagagagagagggagagatagagagagagagggagggtttttttttatttttaggttgggtagttaggttttttttatttagatttaattttttttattttgggttttgggtttttttttgttttgtttagtatttgggagttgggggtttttgttgtatggttgagtgtttttggggatttttatttttgtatttatttttggtttagtttggttttaggtttttttttttaggatatttgtagttttggttggttttttgttttttagagtgggtttgatttttgtgttttgggaggaggggtttaggtttggtttggttatttatgtgtttattttgtagatggttatggtggatttgtaaaattggtttattttgggggttatggaggggttgttttgggtttgagtaggaggttgggagttggtggtgatggtatagttgggagtagtggtaggtagttttttaggtgtttatgatttagttggtagtgaggaagttttggagagggatttggagatggaggtttgttttagaggagtggtagtttaattatttattaatttgggatgttagaatgtgatttggggtgtaattagatttggtagggaaggtattttgtgttgggtaggtttgtgtgatttgttttttaattatttattttttggagttgtgggttgatataagtgtttatgtggatgagtttttttttgggttattttttttttaaggattttaattttggggggttttgtttttttatttgtttatattaggtattgtttattttattgggtgggtgttgtttgatgtttttttttaggattttttttgttagatttagtagtagtagtttttggaggggaatgttgttttattttttattgtttttaggtttgtggtttatagtggggttatgttttttgagtttggtttttatagttgttttggtttgtttagtttttttatttgttggagtaggagtagtataaatgttggagttgtttagttttgggtagattttggttttgtatatgtgttgtttgtttatgtggagtttttggtttttttgggtgataaatggggttttttttggttttttaagatgaagttgaagattgtggttttttttgggtttgttgggggtatgtgggtttggtagttgtttttgtatattttaagggttggtttaggggaggtttagaggaaagaggaggtgtttttgtttagggattttggaaaatagagtgtttgggtataaaggaaaagtttggttaaggttaagggttaaggttgaggggagttgggggttaggggaataggtggattttatattattgtatatataatataggtgaatttgaatttaaatgatttattttagttttggtttttaagttatttttattgggaagaagaaatttttaggagtgatttttgagagttgagggtttttggggtggggtagtgtgaggggttgggttagtgtgaggggtaaagtttaatgggtattttatttttgtggtttgggtttttttagttgatggggtgggggatatttatttttttagttttagtttttagggaatggagtagagggtagagggagtgggttgtatttattaggaagtttgggagtgtttttgttgggggttggggtagaggtagtttggtaggtttttagggaggttggggttgggggtaggggtatggttgtgtttgggtatttttaatgtttgagttgatgggggagttagttgtttttgatagttagggaaaggggttaaagggggttttagatttttttagtttggaatgatagaaagtgttggaaggtggggttagtgggagataggtttttaggattagttttgggtaggtagtttggtatttttttaggtttggtttatggatttagaggtgtttgggtttagatttgtttgggagggtagtggttgggtttggtttggtaggggttgaatggatgaggttagttggggttggtgagaggttggggatttttagggtgagagtagtagttggatgagtttttggaattttttgtggtgtttatagatgtagattttggttttttagagggtgttgattagtattgtgttattgattttatttagtatgatgtttgtttttagttgggggtttaatttgtttgggttagggaggagggggttattttaggatgtttaggttgggtagg

SEQ ID NO: 3934 - DNA, 2492 bp, Artificial Sequence
  chemically treated genomic DNA (Homo sapiens)
tttgtttagtttgagtattttagggtgatttttttttttttggtttgaatagattgaatttttagttggggatggatattatgttggatgaggttagtgatatagtgttggttaatgttttttgggagattgaggtttatatttatgagtattgtgaggagttttagaagtttatttagttgttgtttttattttgagggtttttagttttttattggttttagttgattttgtttatttagtttttgttaggttaagtttagttattgtttttttgggtagatttgggtttaggtatttttgagtttatagattaggtttgggagaatgttaagttgtttgtttgaggttggttttgaaggtttgttttttattaattttgttttttagtattttttgttattttaggttgggaaagtttagagttttttttggtttttttttttgattgttaaggataattgatttttttattagtttaaatattaagggtatttgggtataattgtatttttgtttttagttttagtttttttgagggtttgttgggttgtttttgttttagtttttagtaagggtatttttaggttttttggtgggtgtagtttattttttttgttttttgttttgttttttgggggttgggattaaagaaatgggtgttttttattttattagttgggaaagtttaggttgtaggagtgggatgtttgttggattttgttttttatattggtttagttttttatattgttttattttgagaatttttagtttttaaaggttatttttgggagttttttttttttaatggaagtggtttaagagttaaaattgaaataaattatttggatttaagtttatttgtgttgtgtgtgtagtggtgtgagatttatttgtttttttgatttttggttttttttggttttgatttttggttttgattggattttttttttgtatttggatattttgttttttaggatttttgggtagggatatttttttttttttttaggttttttttaaattggtttttagggtatgtagaggtagttgttaggtttatatatttttggtaggtttaaggagggttataatttttaattttattttggaggattagggagagttttatttgttatttagagaggttggggattttgtgtggataggtagtgtgtgtgtagggttgaggtttgtttagggttgggtaattttagtgtttgtgttgtttttgttttggtaagtggaggagttgggtgggttagagtggttgtgggagttaagtttagagggtgtggttttattgtgagttgtaggtttgaggatagtgagaagtaaagtggtgtttttttttaggggttgttgttgttgggtttggtagagagagttttgggggagggtattgggtagtgtttgtttagtaaggtgggtaatgtttggtataggtaggtgggagggtggggttttttagggttggggtttttgaggagggggtgatttaggagggggtttatttatatgggtatttgtattagtttatagttttaaggggtgaataattgaagggtaggttatatgagtttgtttggtataggatgttttttttgttggatttggttatgttttagattatattttgatattttgagttggtgaataattaagttgttatttttttgaggtaggtttttatttttaggtttttttttgaggtttttttgttgttagttgagttgtgggtatttgagggattatttattattgtttttggttgtgttattgttattagtttttagttttttgtttagatttgggatagtttttttatggtttttgagatggattagttttataggtttattatggttatttataaggtgagtatatgggtggttaagttaggtttgagtttttttttttagggtatagaaattaggtttgttttggaggatggagggttagttggggttatagatgttttggaaagggaagtttggagttaggttgggttaggggtgggtatgggggtaaggatttttgagagtatttagttatatagtgggaatttttaatttttagatgttggataaggtaggagggagtttaaggtttagggtggggagagttgagtttggatgagaagggtttggttgtttggtttgggaataaagaaagattttttttttttttttttgtttttttttttttttttttttttttttttttttttttttttttttttttttttttttgtttttttttttttttgtttttttttttttttgtttttttttttttttttgtttttttttgtttttgttttttttatttttgagttttttagattttttattttatttttggggggttgttgtagttgttatagatatttattgagtgttttttgtgtgtaggatttttttatttggaggttttatattatttatttgtgaggtggaaaatgattattttgtttgatagatgag

SEQ ID NO: 3935 - DNA, 2410 bp, Artificial Sequence
  chemically treated genomic DNA (Homo sapiens)
ttataaaagtaatatgaaaatattaatgttgttggtttttattttttgggattaattaagagtaatagaataatttggatagattagaattatatatttaaagagatttggttttttaagaaatgttatttatagaaataaaattattttattatattttagttgttttaaattttatttttgttagtttagtaaggggaagaaatatgtatttttttttttttttttttttttttttttttttttttgtttttgttttaatatttttagttatttgtttttttttgttttagttatatatgggtaaattgttgtttgtttagatgtgggtttaatgtaggtagttttgagttattatttttagtatttgtgatgttattttggtttgtgatgtgggtgtgggtgggtgttatattattagattttatagttaaattatgtgggaagaagttttatatggttttgtttttagttttagaaatttttgaagtttttattttttttaaaatggtttggatgaattttgaagatttttatgtttttaagaagtatgttttgtaggaaatgtagttaaatatgtagattagatttggggatatgggtagtgagatgtatttttatatgtgtaaaagtgtttttttttatgtatataaaggaggtattgttaagtttttagaatagttgttaaggttagggattaggaatgaaagaatatgtttttgtagatttgggtatttttttttgtatgttttttttgggaagattatatggtttttggaatgtgggttttttttatattttatggtaaatgtagtaattagagttgttagtagtgttaagggtttgaaaggagaataaagttgtttttttttgggaatttttgggtaatgttttattgtttattaggtgtttgttttgttggtgggtttgatttttttatttgtaaaatgttttaggagttttttttttgagggggaggttagtgaaatgatggaaaaatagagtatgaatttggtaggggtttttggaattgtatgtgttgtttgtttgtgtttttaagtgttgtttttggagtgaattagagtttgtaggtggattgtattataggttgtggtggaattatttttaggtttatggtagttggatttatagatagttgagaggataattgtttttttttagtggtgagttttggttttattttttaagagttgggttgattttagagtagggttttggaaagggtttgtttttgggaagagtttgtgaatgtttggagattgggtaggtaagagtttttttaaagttggttagttttggaaaaatggtattgggtttttgggttatttggaaattattatttgtttttattttgtaaagtagggataggagggaaatgttaagtaaaaaaaggtataataggagtaggttatttgttttttttttttttttttttattttgagtttggtttttttgtattttatttttttatatatttatttgttagatttattttgttaggttttttatttaatgattttgtttggttttttatttattttgttttttaggttggagtgtagtggtgtgattttggtttattgtaatttttgttttttggggtttaagtaatttttgtgtattagttatttaagatgttgggattataggtgtggattattaagtttagttaatttttgtatttttagtagagatgagtttttattatgttggtttagttggttttaaatttttggttttaagtgatttatttattttggttttttaaagtgttgggattataggtgtgagtttgtgtttagttttaattttttttttttagtagagagttgtttatatgggtagtatttgatatatattttttaagttttattaaattttgttttttttgtttttattgtaatttattttaattgattatgttataataggtaatttttagttttttttagaattaatttagggtattttgttttaagttattttttttatgttaataaaattaatatttattgaatgttttttgaaggttaggtattgttttagttattttattagtattatgttatgaaatgttattaattattttatgagtttgagtattgttttttgttttatagataaagaaattgaggtataagttgtttaagtattatgttttaagtaattaataaaggttgaatttaattaaagtttatattgtttttgtttttgtttttgtttttgagatggagttttatttttgttatttaggttggagtgtagtggtatgattttggtttattgtaatttttattttttaggtttaagggatttttttgttttagttttttaagtagttgggattataggtatgtattattatgttgggttaatttttgtattttt

SEQ ID NO: 3936 - DNA, 2410 bp, Artificial Sequence
  chemically treated genomic DNA (Homo sapiens)
aaaaatataaaaattagtttggtatgatagtgtgtgtttataattttagttatttgggaggttgaggtaggagaattttttgaatttgggaggtgggggttgtagtgagttaagattgtgttattgtattttagtttgggtgataagagtgaaattttgttttaaaaataaaaataaaaataagggtagtatagattttggttgggtttagtttttgttggttatttgaggtatgatatttgagtaatttgtgttttagtttttttatttgtaaaatagggaatagtgtttaaatttataggatggttggtagtattttatgatatgatgttaataaagtggttagaatagtgtttggtttttaggaagtatttaataaatattagttttattgatataggagaaatagtttagaataaagtattttgggttagttttaaggaaggttgagggttatttgttgtggtatagttaattgaagtgagttataatgaaggtagagaaggtagaatttgatagaatttgaagagtatgtattaagtgttgtttatgtgaatagttttttgttggaagaaggagattgaggttgagtataggtttatgtttgtaattttagtattttgggaggttaaggtgggtggattatttgaggttaggagtttgagattagttgggttaatatggtgaaaatttatttttattaaaaatataaaaattagttgggtttggtggtttgtgtttgtaattttagtgttttgggtggttgatgtatgagaattgtttgaattttaggaagtggaggttgtagtgagttgagattgtattattgtattttagtttgggggatagagtgagtaaaagattaagtagagttattgagtaaaagatttagtagagtaaatttaatggatgagtgtgtggaaagatgaggtgtaggaaagttaaatttaagatggagaaggagaaaagagaaatagatgatttatttttattatgtttttttttgtttgatattttttttttgtttttgttttgtagagtaaagatagatggtaatttttaggtagtttaggagtttggtgttatttttttaagattgattagttttgaaaagatttttgtttgtttagtttttagatatttgtaaattttttttaaagataaattttttttaaagttttgttttaaaattgatttagtttttaggaggtgaggttagggtttgttattgaaagggagtaattgtttttttaattgtttgtgggtttagttgttataggtttggaggtggttttattatagtttgtggtgtggtttgtttgtaggttttgatttattttagggataatatttaaaaatgtaagtaggtaatatatgtgattttaggagtttttgttagatttatattttgtttttttattattttattggttttttttttaggagggaggtttttgaggtattttataaataaaagaattaaatttattaataggatgagtatttgataagtagtgaggtattgtttaagagtttttaggaagaggtggttttgttttttttttaagtttttgatattgttaatagttttaattattgtatttgttatgggatgtaaaagaaatttatattttagaaattatgtagtttttttgggagagatatgtagggaaaggtgtttaggtttgtaggaatgtgtttttttatttttggtttttaattttggtagttgttttgagaatttaatagtgttttttttatgtatatgaaggagggtatttttgtatatgtagggatgtattttattatttatatttttaaatttggtttgtatatttgattatattttttgtaaaatatattttttaagaatatgaagatttttaaaatttatttaagttattttgggggaaatgaggattttagaagtttttgaggttagaagtaaaattgtatagaatttttttttatataatttaattataaaatttgatgatgtaatatttatttatatttatattataaattaaagtgatattataaatattagagataatggtttaaagttgtttgtattgagtttatatttaaataaatagtaatttgtttatatgtgattaaggtagagaaagataggtgattagaaatattaaaataaaaataaaaaaaaagagagagagagaaaaaggaaagagaaaatatatattttttttttttattaagttagtgaaaataaaatttaaggtaattgaaatatggtaaggtgattttatttttatagatgatattttttagaaagttagatttttttaaatatgtgattttaatttatttaaattgttttgttgtttttagttggttttaggaaatggaggttggtagtattaatgtttttgtgttgtttttatgg

SEQ ID NO: 3937 - DNA, 2327 bp, Artificial Sequence
  chemically treated genomic DNA (Homo sapiens)
taggttgggtgtagtggtttatgtttgtaattttagtattttgggaggttgaggtgggtggattatgaggttaggagattaatattattttggttaatatggtgaaattttttgtttattaaaaatataaaaaattagttgggtgtagtggtgggtgtttgtagttttagttatttgggaggttgaggtaggagaatggtgtgaatttaggaggtggagtttgtagtgagttgagattgtgttattgtattttagtttgggggatagagtgagattttattttaaaaaaaaaaaaaaaaaaaaaaaaaaaagtttggtagggagtaggatatttggattttattttgttgtttttttggttgtgtgatatttaggttatgttgtttttttgggttttggtttttttatttgtttaagaggggttgatagttgtatttgtttttttagtttttttttaggaaggtggtagttataattagtatttgttgaggttgattttgtattaggtttaggataggtggggtttagggaggtttgttttttgttatgtttttttgttaggggagttttgaggtttttttagtgttatttttatgttatattttgttttagttttgtgtgttttaagttagggtattgagtgtgttagtatttgtagggataggtattggattttgggtggatttgagggtttgtgattatttttttagttgtttttttttagaggttattttttttaaggaaggaaagaatttttttgttattttttgtagtgtggttagtttaggttagtttgtatagtagggttagaattagggtttttggggagggatgtttgtttgtttagtgggaggagatggtatgtttgtgaagttgttatttagttagtttgggggttatgagtgttgtttttggtggtgttgtgtggggagggagggggttgagtagggtgggtatttgtatgtttgtgttttgttggtttttgatagatgatagttttttttttagggtttttagtgtagagttttttggggatattatggttatttttgtttagatgagagggagttggttgtttgtgatagtgttgtaaaatgttgttagggtttttttttttttttttttttttttttttttgtttttttttggttggtggttttttgtaggtttttgtttttgttggtgttggttataatgtttttatttttagggttttggtgttttagttttttgtgtttattgtgtttgtttgttagaatttttgtgtttttggtgtgtgtggtttgttgagttttgagtttttgttttttttagttttttttttttttgtgtttttaggaggtgtttttggaagttatggagttttattggtattaagattgattgttttttggggtgaggtagtaggttgtatagtttggggttttgttttgttatgggataattatataatttattgttttttttgaagtggttgtaatatttgtggtggatagagtgtttggaattttggttgggagtgggtagggttaggtttgggggtagttttggtagtagttgggggtaggggttgtttatattgagaagtttgataggtttaggtgttatttgttgtgtgattttggataggtttttgatttttttgggttttagtttttttttttgtaaaatggaggtaaatgaggatggaaggagatgtagtgtggagtattgagggtagaggagagttgagttgattttattttttgttttagttgtattgagagaggtgatttatgtagttgtttgtttgatttttgttttttaatattttttaatattttttttgttattaggtttaggtttatgggtggttttgagttgtattttttattgagtattaggagaaggtattgtggggttaggggtggttgagatgtttggaggttatagggttgtgagtattggtgttgtttattattttaggtttttagtatgtgttttagtttggttagtttagtggtagggtttttgtttgtggaggaagggaggttaaggtattttttttgagtaggaagtgagaggaatagttttgtatatattgggttttatatggtataatttgaaggtagatagtggtttttttgtatttggggaaattgaggtttagagagttagggattttttaagattagttagtagtagttgtttttttttggggtgttattttttttgttttttttgttttgtgtttgtttagtttttttgttttggtgattgaggattgttaggtaggggttggtgttgggtggggggtggtgggtttttttgtagtgtaaggttgggtt

SEQ ID NO: 3938 - DNA, 2327 bp, Artificial Sequence
  chemically treated genomic DNA (Homo sapiens)
ggtttggttttgtattgtgggagggtttgttgttttttgtttagtattagtttttgtttggtggtttttagttattagagtaggagggttgggtaggtgtagggtaggagggataggggagatggtattttaggaaggggtagttgttgttggttggttttgggaagtttttggttttttgggttttagtttttttaggtatagaggagttattgtttgtttttagattgtgttatgtgggatttagtgtatgtagagttgttttttttattttttgtttaggaaaggtgttttggtttttttttttttataggtagaggttttgttattgagttggttaggttggggtatgtgttgggaatttggggtgatgggtaatgttaatatttgtagttttgtgatttttaaatgttttggttatttttggttttatggtgtttttttttggtgtttagtggagggtatggtttagggttatttatgagtttgggtttgatggtggggggagtgttggggagtgttgggagatagaggttagataaatagttgtgtggattgttttttttagtgtggttggggtagagggtggggttggtttagtttttttttgtttttgatgttttatattgtatttttttttatttttatttgtttttattttatagaggaggaaattgagatttagagagattaggggtttgtttaaggttatatagtaagtggtatttaggtttgttagattttttagtgtaggtggtttttgtttttgattgttgttaaggttgtttttaaatttggttttgtttgtttttagttagggttttagatgttttgtttattgtagatattatagttattttaggaaagatagtagattgtatagttattttatagtagggtagagttttaaattatataatttattattttattttaaagggtagttggttttggtgttgatgggattttgtggtttttagaggtattttttggggatgtgggaggaaagagggttgaggagaataggggtttgaggtttggtaggttatatgtattaagggtatagggattttggtgggtaggtgtggtgggtgtagggggttgggatgttgaaattttgggagtggggatattgtggttagtattagtagggatgggagtttgtaggaaattattaattagagagggatgaggaagagagaaaggaggagggagggaaagttttggtggtattttgtgatgttgttataggtagttggtttttttttatttggataggagtggttataatgtttttaaggaattttgtattggagattttaggaggagggttgttatttgttgaaggttagtaagatataggtatgtgagtgtttattttgtttggttttttttttttttgtatagtgttattagaagtagtatttgtggtttttaggttggttgagtagtggttttatgggtgtgttgtttttttttattgggtaggtaggtatttttttttaggggttttggttttggttttgttgtgtaggttggtttgagttgattgtattgtaggaggtggtgggaaggttttttttttttttgagggaagtggtttttaggggagagtagttgggggggtagttatagatttttaggtttatttagggtttagtgtttgtttttgtgggtgttggtatatttagtgttttagtttgggatgtatagggttgggatagagtgtagtatgaggatgatattgagagggttttggggtttttttagtaggggaatgtggtgagagatgggtttttttaagttttgtttattttgggtttggtgtagggttagttttaataaatgttaattgtggttattatttttttggggaaaagttgagggggtagatatgattgttaattttttttaaataggtgaggagattgaggtttagagaggtaatgtgatttggatgttatatagttaagggggtagtagagtgaggtttaaatgttttgttttttgttaagtttttttttttttttttttttttttttttgagatggagttttattttgttttttaggttggagtgtagtggtgtgattttggtttattgtaagttttgttttttgggtttatgttatttttttgttttagttttttgagtagttgggattataggtgtttgttattatgtttggttgattttttgtatttttagtagatagggggttttattgtgttagttaggatggtgttgattttttgattttgtgatttgtttgttttagttttttaaagtgttgggattataggtatgagttattgtgtttggtttg

SEQ ID NO: 3939 - DNA, 2426 bp, Artificial Sequence
  chemically treated genomic DNA (Homo sapiens)
taatttttttggggttgttagattgttgatatatatgtatatatatatagagtgtatatatatgtatatatgtgtagttgtattttttggtgtgtttgttgtgagggtataggggtgggtaggttggtaggtatgtgaagttgttattagttttgagggattgtgagtgagttgggatttgggggagaaaaaaatgggggtggatgttagttttttgggtggttgttgttattgtttttgtttttttgaggttttttttgtatttttgggtagtgaagttttttgttaagatgggggttgatgttattttgggttgtttagttaggggatttgggggttttggtggttgtttttggaagtgagttagttgtttgttggttgataggtttggaatttttagttagaggatagaaaatttgtatgggttaggtgagtggggtttggttgagggtagttgggtagggggtagtagggtgtggtagtttgtttattggaattttttagggtgtattttaggggggttgtttatttgaagggaagtgaggatgagggtgtttaaaggttgttttttttatttttatttttatttttattttttgttttttgggattgttatgttttggagtgagtgtagttggtttgttttttaaagttttttgttttggttgattagttgggtgagttttggaattggaatttggattgtttagtgtgttgattttataattttgttggggtggatttttagtttggtatttagttgttttttaattttgagtggtatttgtggatgtagttggtttttggtttagggatgtttatttatttttggtttgtttgaagaaagttgttgtttttaatttttttttttttaagtaagtttaaaatttttatgagtaaaagagtttaaagaggtaagaggatattggtgttttaattgttttttttttttttaattttttttttttttttttttttggttggttttatggattatttgggagataaatttatagtggtttagatttatatgatttagtggatgggtattgtgaggaggtttttttaggaagtttttaatttggtgattattatggtgggttatgaatggatgagtgtagagttggttagttggattttttttaagtgtattttttttttttgatatttggttttttggagttgggaatttttttgttgtttttttgtttgtagttaatagagattttttttattgaggaaaaggtatatagatttggaattgttagatattgtaagtttattatgttttaaaaaatattaaaataatattgaaagttttttttttttagtttttttagggagggggttttagatattaaattggggaagttattttttttagaatagttgttagttaaagtttaggtattttttgttttttgtatttgggaaagaggtatgtagtaataattttttttttttgaagttagttaggatatttttgttggagttgatgtttgtgtggatagggttagtatgtgagttgggttgaatttgttagttgatttatgtttaagtgtgaatattttaatttttgatatgaaagtttatttttttttttatttttagggtggattagtggtatttgttttatttttttttatttttttaggaagtataagtggtggtgttatgtgtatgttgagttgtagtttttgttgttttattgagtttttattggattgttaaggaaagggttttaggagattgaggtgtggtgggtgagtttgtttgttggttgtgaattttgggtttggtgtgagtgggttagggagggaggttttgattttttatttaggtaggtttgggagggtttggattgggatagtagggtggaatgatagttaatgattaaaattttggtttgtgttttgttaggtgatagtgtagaaataattgtaaggtttttttgatgatttggagaggtgggattgggtttagaaagtgaaagtgtttattgtgggggaagtatagtgagtgagtggtagagttaggttttgaattttaggttttgatttttttatttatggttttttgtagtttagtttttagtagatgttttttttagatttttttaattaatttagggttgtttaggttattgattagatttgagtttaaagagagggtttgttatttttatataggagatttttgttatttgattgtgttggtttagtttatgggagtatttgaggataggtgaagggttaagttagtttttttttttgggttttttttagttaggagtgttatagttattaagggatttagtatttagggaggagttttgagttggttttttttatatttgaggtggtagggtttatagttgttttgttaggtgtaggggtttagtattttttttgttgatttagaggtgt

SEQ ID NO: 3940 - DNA, 2426 bp, Artificial Sequence
  chemically treated genomic DNA (Homo sapiens)
atatttttgggttagtagaggggatattgagtttttgtatttggtagggtagttgtgagttttgttattttgagtgtagggagggttagtttagggtttttttttaaatgttgggttttttaatgattatagtatttttggttaggaggaatttagaaaaaggggttggtttagttttttgtttgtttttaagtgtttttataaattgggttaatatagttaggtggtagaagttttttatgtgaaaatggtaggttttttttttaggtttaggtttggttagtgatttgggtagttttgaattaattgggagggtttggggagaatatttgttgggagttggattgtaaagagttgtgaatggggaggttagagtttggggtttgggatttggttttgttatttatttattgtgttttttttatagtaggtatttttgttttttgggtttagttttatttttttaaattattagaaggattttatgattgtttttgtattgttgtttagtaggatataggttaaggttttaattattagttgttattttattttgttgttttaatttaagtttttttgagtttgtttgagtaagaaattaaggtttttttttttggtttatttatattaaatttaaggtttatggttagtgggtaaatttgtttattatattttggttttttaagattttttttttggtaatttaatgaaagtttggtggaatgataaaagttataatttagtgtgtatatgatattgttatttgtgttttttaggagggtgagaggagatgaggtaggtgttattaatttattttaaaaatagggagaaggatgagtttttgtgttgggggttggggtgtttatatttaaatataaattaattggtaaatttagtttaatttatgtgttggttttgtttatatagatgttgattttagtaaaaatgttttgattgattttaggagagaggaattattgttatgtgttttttttttaggtataggggataggaagtgtttgggttttgattgataattattttggaagaagtaatttttttggtttgatgtttgggattttttttttgggaggattggaggggaggagtttttagtgttgttttaatattttttaaaatataataagtttataatatttggtggttttgaatttgtatgttttttttttagtgaagaaaatttttgttggttgtgagtagagaagtggtggaaggatttttgattttgggaagttaggtgttggaaggaggaagtatgtttgaagggggtttggttggttgattttgtatttgtttgtttgtggtttattgtggtggttattaaattgagggttttttggaaggatttttttatggtgtttatttattgggttatgtgggtttgggttattgtgagtttattttttaggtaatttatggggttagttaggaggagagggaagaaggaagttagggagggagagagtaattaaaatgttagtgtttttttgtttttttggatttttttgtttatggaagttttgggtttgtttggaggaaaaaaaattaaaaatagtagttttttttaggtaaattaagggtaagtaaatatttttgagttaggagttggttgtatttatgggtgttgtttagaattaagaggtagttaagtgttaggttgggagtttattttagtggagttataaagttaatatattgggtagtttaggttttagttttagggtttatttagttgattggttgagataaggagttttgaggaataagttggttgtatttattttagggtgtgatggttttgaaaggtgggggatggggatgggggtgggggtggagggggtggtttttgggtatttttgtttttatttttttttaggtaggtagtttttttgaggtgtattttgggaggttttggtgggtaagttgttgtattttgttgttttttgtttggttgtttttggttagattttgtttatttgatttatgtaggttttttgttttttggttggagattttaaatttgttggttggtaggtggttagtttatttttggaggtagttattagggtttttgggttttttggttgagtagtttgggatgatattagtttttgttttagtgaggggttttgttgtttaggaatgtaggaggggttttggggaggtggaggtggtggtggtggttgtttagggagttgatgtttgtttttattttttttttttttaagttttaatttgtttatggttttttggggttgatggtaattttatgtgtttgttagtttatttatttttgtgtttttatagtaagtgtattaggaaatgtggttgtatgtgtgtgtatgtgtgtgtattttgtgtgtgtgtgtgtgtatgttggtgatttggtagttttgggaaggtta

SEQ ID NO: 3941 - DNA, 2397 bp, Artificial Sequence
  chemically treated genomic DNA (Homo sapiens)
aatattttgaggataattgattagagggaggaggggttgtattgttttttagtaggttgagttaattattagtttgtattagtatttgatttgtggtatgtgttaatttattattgttaattgtagggatttagtgatttttttgaatttttgttatttttgttatggtttttgttttgtggaggtttgtggaatgggaagtggggaggggaaggagaagggggtggagttagttggagttttttggttaggtttggagttattttgttttgttatagtttttatgggtttagagtgggttttggggtagagggtttgtaaggataggggtgggtggttttgttgagggtggtgttttgagtaggttttattttttagtttgtttagtttggttttattttagttttgttgttttgttattttgtttttttgtgtttattttttattttttgttggggatattttaaggtttgttaaggttggagtaggggtgggatttagttatttaataaatgtttttttggttatgtagggttgggtattggggtggggggttgatttggattttttaagatattagattgtttaattgtttagtttttattggggtaagtgttttgttgagggtgaagggggttgtgagtgtttattagggagtttggataggttttgttttttatagttgttttattttttggagttgttttggtggtagatggtattgttttagaaaggtgaggttggagttgttttttttattaggggtggttaaggatgtttttagggttttttatgtaggtttttagggttattttgggtgtggttgagggtatgtagattatgttgtgtttttttttattttttatgtttgttgtttgtttgatatgttttttagttgttttgttttgtagaagttgtgtggttttttttgtgagtagagttgggttttatgattttttggagtagtgttagggattttttttaggtataattttaaagggggttttaggatttgttaggtttatggaagtggtttttgtaattttttttttggtggtagtttttggtgtattttggtaggggtagtttttttttattatagggattttgtgtgttaggttttagttgtgttgttgttgaattatggatttaatagtagagaagttttgtaggttgtttgtgttggtttgggaaattggggtttagttggggtttgttatggttttggtgttgttttgttttttgttggtgttatggagtaagtggagagatttatttttttggttttaagaggtattaatggaggaggttgagaggtaggagttgaataattgatggttttttttggtttaggatttgttgaaaatgatatggtgtaaggtagaggggttgagagtgttgattataaaatgttgagaagttattttagggtggttatggttagaaggaggatttttatttaggatggggttataggtatttggggtgggtgttagaggtttttgttttgggttattttagggggttaggatatttagaagttgggtttagaggtttatagggttggtttatttttattttttttttatatgtttgttattattggtgttttagtttagtaattttatggtttgttggttttgtttatagtttttattgttttttgtgtgttgggtgtgggtttttgagttttatttttagtttttttagttttaggagaggagtggaggataggggtttaatgtggggtgtggtgtggagtggggagggttgtggtgtttttttagtttttttttttttaatagttttagttttttttttggagaattttttatttgttgggtatatttggtttttttttattattttgtttttagttgggagatttttatttagtgaaatagtgaaataggaagggttttttggttattttgtgtagggtgtagggtatgtagtgggggagtggtttgtttttttagtgttttattgtttatatttttaggggagtatatagatgggtaggttgtggggttttgattttatggtagtgtttgggggtgaatgtttatagtttttgaaattttagtgggagtgtgttattgggtggttttttagtttagtggtttgtaggtggttggtgagagtgagtttaattagatttttgttttataataaggatagaggaatttttgtattttagggttttttgttttggtgtattaaaaaattggattatatgtgggtttggagaatgagtgtaaggttttattgagtggaagtagtttttagtagatgggggagttagaggggagatggtttttttttggagttaggtaatatttttgggatgtttagtagtttgtttttttttattagtgtgtttttttttttatatag

SEQ ID NO: 3942 - DNA, 2397 bp, Artificial Sequence
  chemically treated genomic DNA (Homo sapiens)
ttgtgtggggagaggaatatattggtggaagaagataagttgttggatattttgagaatgttgtttgattttaggggaaaattattttttttttggtttttttatttgttgagagttatttttatttaataaaattttgtatttattttttaagtttatgtgtgatttaattttttggtatattaaggtaagaaattttgggatatagaaatttttttgtttttgttataaggtaggggtttaattgagtttatttttattagttatttatagattgttagattaaaagattatttggtaatgtatttttattggggttttaagagttgtaaatatttatttttagatattgttatggggttagagttttatagtttgtttgtttgtatgtttttttagaggtgtgagtggtggggtattgaagaagtgagttatttttttgttgtatgttttgtgttttgtgtggggtaattagggaattttttttgttttattgttttattgggtagagattttttggttggagatagaatggtggggagaggttagatgtgtttagtaggtaggggattttttaggggggaggttgaggttgttaggaaaggaggggttgagggggtgttatagttttttttgttttgtattatattttatgttaaatttttgttttttattttttttttggggttaaggaggttgagagtagagtttagaggtttatgtttagtatataggaggtagtgggggttgtggatggggttaatgagttatggggttgttgggttgaagtattggtgatggtaggtgtgtgagagggaagtgggggtgagttagttttgtgggtttttaggtttagtttttgggtattttggttttttggaatgatttagggtaggagtttttgatatttgttttaaatgtttgtgattttgttttgagtgggggttttttttttggttgtgattgttttggagtggttttttagtattttgtggttagtatttttagtttttttgttttgtattgtgttatttttagtagattttgagttagagaaggttattaattatttagtttttgttttttagttttttttgttagtattttttaaagttgggaagataaatttttttgtttgttttgtggtgttgataggaagtagggtggtattaggattgtgataggttttggttgggttttggttttttgagttagtataggtggtttgtaaggtttttttgttattaaatttataatttagtggtaatgtagttggggtttggtatatagggtttttgtgatgaggaggggttgtttttgttggaatgtattagaggttgttattagggagagagttataaggattatttttgtggatttggtaggttttagggttttttttaaaattgtgtttggggagagtttttggtgttgttttggaggattatggagtttgattttatttataggggagattatatagtttttgtggggtaagatagttgaggagtatgttaggtaagtgatgggtatggggggtgggggggagtatagtgtggtttgtatgtttttagttatgtttagggtgattttggaggtttgtatggaagattttggaagtgtttttggttatttttggtggaagagatagttttagttttatttttttaggatagtgttatttgttattaaggtagttttagagagtgggatagttgtgagaggtgggatttgtttaggttttttgatgggtatttatagttttttttatttttagtgaggtatttgttttaatgaaaattgagtagttggataatttgatgttttggagggtttaggttagttttttattttaatgtttagttttgtataattaaggaagtgtttgttgaatggttgagttttatttttgttttaattttggtaggttttggagtgtttttggtaggaagtggagggtgaatatagggggataaagtaatagggtagtagagttggggtggggttaggttgggtagattggggaatgagatttatttagaatattgtttttggtagagttatttatttttatttttgtaaattttttgttttagggtttattttaaatttatgagagttgtggtaggatagggtgattttaggtttggttaggaggttttggttgattttgttttttttttttttttttttttattttttattttataggtttttatagggtaggggttgtgataggggtgatagaagtttggagaggttattgagtttttgtaattagtagtaatgagttgatatatgttataggttaagtgttaatgtaggttgataattaatttaatttgttaggaagtggtgtagttttttttttttttgattaattatttttaggatgtt

SEQ ID NO: 3943 - DNA, 2354 bp, Artificial Sequence
  chemically treated genomic DNA (Homo sapiens)
agatattttgtataggtgtgtgtttttattttggttgttgtgtgagttgaggataaaattttggttgttgtgggagttgagtttgtgggtaggttgagttaggggtgggagtgagagggaggggtgagaggggtttgagtatttatttagtgtatgttttatagaattagtttgttttaggaagttttggtgtttagtgttataatgtatattttagttttgtgtttgtatattagattttgggtttgttttatatgggtgttttgagttgattttttttgttggagttgttgaagggttttgtaggttttaatttatagttagtttttaattttgttattagtaggggttttagtttatagtaatgtagttgtttttattgtaggttaattttgttatagtgttgttaatttgaaatatttagtttagagtgagtttttggggaggtgggaggttgtttaagtattttatttgttgtgtgggtaagaagtggtttgtattttattagagtttggggatttaggatttagatttgttgttttgtagttgtgtgattttgggaaggttaggttttattttgggtgtgttttttttttttgaagatttaatttggtttgtgtgttaggagtggagggtttgttggagtttgaggaagatggtagttgggttggtagtagggtgagtagggtttgagtggggttaggttttttatattggataatgatgtttattgtaaagtttatgttttggatttttgataaatattttagtaattgatttgatattttattatgtttaagttgatttgtttttatgttggatatgtgtttattaggatgtgtttttggttgttattggtagggtttggaatgaggatatttgttgtgtattttgttttggagttttagataggtaaaaaaatatttatgtggttttatttaggttatttttttgtttgtatgaattttaggttatttttagaaagggttttatagttttggtgttttattttttgatttttgttaagttgtttttagtagtagttggaattttttgaagtggttgttatagatgttggtaaagtttggtttgggatgtttttattttgtattaggtatggggttgtttttgttgtatatttatttggaaattatttatatgttaagtattgtagaggtaaggggagtttgttattggattgtgtttaatatggttgtagggatatagataagtatattttttggtagaggtatgggtttggttggttggagttgtagtagttgtgtgtggttatagagtttttaaatgagggagatggatggttttgttttatagtgtgtttagagtatgtttatggtgtttgggaagattagggatttattatgtttggttttggttttttttatagtgaagtttttttgttggtaggatttatggttaagtatgggggtaggggttgggggagttttgttagtgattttttgtaggtagtaaggtttttgggagttggttaggaaaatagaaattttattttggagtaggtgtgtaaattaatagtttagaaattaataaggtttttattaaggattatgagttatttgtgttgttttgtttgttttggtatttgtgtaggatatggggtggggggtgggggaagtatatgttaatagggagttggtggttgttttgagagttagttttttttttataatttgtttgaaatttttttttttgtagaagatggaatttagtatattttgagagtttattgtataggttaggtgtatttatgtttattgtttttattagtaaaagagtaaaattaaaattaaataaatgaagattttggtaagattgtttgattttgttttgaggtgagtatatagtagtattgggaaagtgtgtaatttataaagatggtgtagtttgtaggttaggaggggttggggtttgttgagggtagttggggttttgtagtttgatttataatattgtatttagagtggggaggtgttgtttttaggtttatttgtgatttttgaggtataggtagagggttgggtgtgtatgatattgtataggagttttttttgtagtgtggaatttatttatgttgtttgtttttttagtttttaaatgtatttggggtttgagattagaaatagtagaagttttggtggttagtggaatagttatttaagtggatttttattttttgggtattttttgagtatttttttgttaggtattgttttaggggttggtgatgggaagtttattttgtttatgaggtttttttggtatagaggtggatattgagggattgttggtttatatgtatgttgaaatatgtg

SEQ ID NO: 3944 - DNA, 2354 bp, Artificial Sequence
  chemically treated genomic DNA (Homo sapiens)
tatatattttaatatgtgtgtgagttagtggttttttagtgtttatttttgtgttgaaagagttttatgggtaaggtgggttttttgttattagtttttgaaatagtgtttagtagggaggtgtttaaagaatgtttaggagatgagggtttatttaggtaattattttattaattattagagtttttgttgtttttgattttagattttagatgtatttggggattgagggagtaggtgatgtgggtgggttttatattgtggagaggatttttatgtagtgttatatatgtttgattttttgtttgtattttaggagttataggtgggtttggagatagtatttttttgttttgagtgtagtgttgtggattaggttgtaaagttttagttgtttttgatagattttagttttttttgatttgtaggttgtattatttttatgagttatgtatttttttgatgttgttgtgtgtttattttaaggtaggattaagtaattttgttagagtttttgtttgtttgattttggttttgtttttttgttgatagaaatagtaaatataaatgtatttgatttgtgtagtgggtttttgagatgtgttgggttttattttttgtaaagagaaggattttaagtaagttatgagaaaggagttggtttttagagtggttattagttttttgttgatatgtgttttttttgttttttattttgtgttttgtgtaagtattagaataaataggatagtataggtggtttatggtttttggtgggaattttgttaatttttgagttgttggtttgtgtatttgttttaggatggagtttttgtttttttggttagtttttagaggttttgttgtttgtgagaagttattgatagagtttttttagtttttgtttttatgtttggttatggattttattagtaaggaggttttattgtgagggaaattagagttgggtatggtgagtttttggtttttttaggtattgtggatatgttttgggtatattgtgaagtgaggttatttattttttttatttggaagttttgtgattatatatagttgttgtagttttagttagttgggtttgtgtttttgttagggaatgtgtttgtttgtatttttgtagttgtgttgaatgtagtttaatggtagattttttttgtttttgtggtgtttggtatgtggatgatttttaggtgaatatgtagtagaggtagttttgtgtttggtgtagggtggaggtattttaggttgggttttgttaatatttgtggtagttattttaaagagttttagttgttgttgaagatgatttggtaaaggttagagagtgagatattggggttatgagattttttttaagggtggtttgaggtttatataagtaaagagatgatttgggtgaagttatatggatatttttttgtttgtttggggttttaaagtaaggtgtataataagtgtttttattttaggttttgttagtggtagttaagagtatgttttggtagatatatgtttagtatggaaataaattaatttggatatagtggagtgttaggttgattgttaagatgtttgttaaaaatttaggatatgggttttatagtggatattattgtttagtgtgggaagtttggttttatttagattttgtttattttgttattgatttagttgttattttttttagattttagtaggttttttatttttagtatataggttggattgaatttttaggaaagaagagtatatttagggtgggatttgatttttttaaggttatataattgtggagtagtagatttgggttttggatttttaaattttgatgagatgtaggttgttttttgtttatatagtaggtaagatgtttggatagttttttgtttttttaaaaatttattttgggttggatgttttaggttggtaatgttgtggtagagttagtttgtagtgaaaatagttgtgttgttgtaagttggggtttttgttgatgatagggttgggggttgattgtagattgaggtttgtagaattttttagtaattttagtagagggaattagtttaaggtatttatgtggagtgggtttggggtttggtgtgtaggtatagggttggagtgtgtattgtggtattgggtattggaattttttggagtaggttagttttgtgaagtatgtgttgagtaggtgtttaggttttttttattttttttttttatttttatttttggtttagtttgtttataggtttagtttttatagtagttaggattttgtttttagtttatatagtagttaggatagagatgtatatttgtgtaaagtgttt

SEQ ID NO: 3945 - DNA, 2382 bp, Artificial Sequence
  chemically treated genomic DNA (Homo sapiens)
ttttagttttataattaattaaaataaagaataagtaaatataggttttttttaaaaaaggtttaaatgtaaatatattatatgatattaagtttaaattttgatataaaatatttggaataattatttagaaaattataaattttaaaaaataaattttattttataaaataaaaagtgtgtatatattattaattagtgtattaggtttattaagattatgattattagtaaattatatttaagttttattaaaattttaagagtattgtgtgttgttagaggtaaagtattgtgtgaaatgtttgttgagaattgttattttttaagaaggttattaattttattttttgggaattttttatttaatgttattttttgaatagtttttatatatgtttgaaattattaattgtaatagtgtttgtgatgttgattagatggtatatgtgggttatttaattttttttagaatatattttgggggtataaatattttaaaaagttatatttatagtagtttgtattatatagaaattaagattttttttgggagtgagaaattataataataaagtataatatattaggattatagaaggtaggatttggatgatggatgtgtgaatagagatgatggatggtgaattatagagataggttgggtttttaggtttttgggttatggaaggagtgtgttttgtaattagtataggatatagtttagtaagaattatatattttaaggagtttggggtttggagttgggttttgtgtttattgatggggatttagtagttgtgttttttttggtttggtagagttttttgagtagggatttgtgtatggttttagtaggtgtttttttttagggtttttttaaggtgggaagtaaattttttttttttttaggttgtagtgtgagttgagttttagttttagggtttagggaggggttgggtagttttttgatggaaatatatttgtatgagtagttttttttttgtagagggtggggaagaaaaggatgtttggggtagtttagttttatggtgtggtggggttaggggttgtgtttattatggatttgattttttttttttttgtgattttgttttattgtatgtgttgggatgggttttaaagattagtttatattagaaattttgattgaggtttttgagaaatgttattttgaattttgttttagtatttggatgtgtttttttatttgatagagttataaagatttttttagttaaaaataaaagtaaagttttgttagatttgtgtttgtggttttaaatttgttttagttattgagtaggagttgagagggaagagagagagaagaatataagatttatatggggaaggatttttatgagggtgtggtagtgagagtgggtggtaagttgttaaagaggtttaagttatagaagtgggttttatgtgggatttttggaatgagtaggagggtgatgggtggagggtgagggttagaagattttaattagaggtgagaatttaaagatgagttattggttatttaagttaaatagtgaaattattttggtttgtgtttttagttagtggagtagggaaggggttaggatgtgttttttgtaggtgttattggaaaggggttttgatttagattttaagagagggtttttggattttatgtaagaaataatttgggaggagtttataaagtggaaataagtttattaagatagtaaatgaataaaggaatggttattttatagatagggtagtattaaatattgttggttggttatttgtatagatagtttttgattatatgttaaataaggagtggattatttattagttttttaggaattttttttaaaaatatagattatataaggtaatttgtggatgttgttatagtatttttaattgtgaggataattagaggttattttttttattgttttggttttagtaggttttggttggtttttttagtgtattttgttttattagtagggtttttatgatttgtattttgtgattttagtttggttgattttttagtttattttgtgattaagaatgtttaattttttggaaatgtaggttagtatgtttaagttttatttaattaagtttttatttaatatggagttattttggttttaatatttttgatttagggtggttgtagagttggaggtgtagattggggtagattagttttttgagaaaagtatatagagttattgtggggttgtgaggtgggagagatgaatttatattggtatttgattagtgattttttagttgtaatgagaatagaatggagaggtttgggataggaagataggatgtggttgtttatgttattttggtggg

SEQ ID NO: 3946 - DNA, 2382 bp, Artificial Sequence
  chemically treated genomic DNA (Homo sapiens)
tttattaggatggtatgagtaattatattttgtttttttgttttaggtttttttattttatttttattatagttggagagttattgattaaatgttaatgtgagtttattttttttattttatagttttgtagtggttttgtgtgttttttttaggaggttgatttgttttaatttgtatttttagttttgtagttattttaagttagaggtgttagaattagagtgattttatgttgaataggggtttgattaaatgaggtttaggtatgttggtttgtatttttaggaggttaggtatttttagttataggatgagttaggaagttaattagattgggattataagatataggttataaagattttgttgataagataggatatgttaaagaagttggttaaaatttattgaaattaagatggtgaggaaagtgatttttggttgtttttatagttagaaatgttatggtaatatttataagttattttatgtggtttatatttttaaaaagaatttttgaaaagttaataaataatttattttttatttagtatatgattaaggattatttatataaatagttgattagtagtgtttggtgttgttttgtttatggagtagttatttttttatttatttattgttttaataaatttgtttttattttatagattttttttaaattattttttgtatgagatttaagaatttttttttgggatttgaattaggatttttttttagtaatatttgtaggaagtatattttggttttttttttgttttattgattggaggtataggttaaggtaattttattgtttgatttgaatgattaataatttatttttgggtttttatttttgattagaattttttgatttttattttttatttattgtttttttgtttattttgaaagttttatatgaaatttatttttgtggtttaggtttttttggtaatttgttatttgtttttattgttatatttttatagaaatttttttttatatggattttgtgtttttttttttttttttttttttagtttttgtttagtggttgaagtagatttggagttatgaatatgagtttggtagagttttgtttttgtttttaattgggaaaatttttataattttattaggtgaaaagatatatttagatattaaggtagagtttagggtaatattttttaggggttttagttaaagtttttgatgtaggttggtttttgaggtttgttttgatatgtatagtgagataggattataaggaggggaggagttaagtttatggtggatatagtttttgattttattatattgtggggttggattgttttaggtattttttttttttttattttttgtagaggaggggttgtttatgtaagtgtgtttttattaggggattgtttagtttttttttgagttttggagttggagtttagtttatattgtagtttgaggaggaggaaggtttattttttgttttgggagggttttgggaggaagtatttgttgagattatatataggtttttgtttaggggattttgttaggttagaaaggatatagttgttgagtttttattagtgagtatagggtttagttttaagttttgagttttttggagtatatggtttttattgagttgtgttttgtgttggttataggatatattttttttgtggtttagagatttgagagtttagtttgtttttgtagtttattatttattatttttgtttatatatttattatttgaattttattttttgtgattttgatatgttgtattttattattgtagttttttatttttaaaaggagttttggtttttatgtggtataaattgttgtgaatgtaattttttaaggtgtttgtatttttagagtatattttggaaaaagttgaatgatttatgtgtgttatttggttagtattatagatattgttatagttgatggttttaaatatgtgtaggggttgtttagggaatggtattgaatggaaaatttttaggagataaggttggtggtttttttaaaagatggtaatttttagtaaatattttatataatgttttatttttaatagtatataatgtttttagagttttgatagggtttagatgtgatttattaatagttatggttttggtaggtttaatatattagttaatagtgtatatatattttttattttatgaagtgaggtttattttttaaagtttgtagttttttaaatagttgttttagatattttatattagaatttggatttagtgttatataatgtgtttatatttaaattttttttaaaaaaaatttgtatttgtttattttttgttttggttaattatgaagttaaga

SEQ ID NO: 3947 - DNA, 2369 bp, Artificial Sequence
  chemically treated genomic DNA (Homo sapiens)
gtttggggttgaggttggtttttatttattggttaggttttgagtaaatgaattggtttttttgggtttttttttttttgtttttaaaatggtgtaggtgaggataataggagttttaaggggtgttgtgagggtggttagtatgtgttttgttaagggttttataaagtttaatttgtggttatgagagggggtgtagtaggatagggtgggggtagtttttgaaagttttataaattaagagaatagaaaggaaggtattttgtttttatagtggaggttatttttttggttagagggagggttggttgttgtttggttaaggaggggtagagagaatttggtagaatttattgagtttttgtgttggtagttttggaatgggatttttttgggttgtttttggtttgatgaattggttttgaggttatttattttatagtttggtttggattttggttatttagtttttaagaaagtttggaattaggaaaggagtgttgttggtgtggaaagatatatttgtattttaaaatatttggtttttggttgtgttttaggaattgggaggtgagattttttttggtgattgatagttttgtgtttttgggtgtagagttttgtggttggttttggtattttttttttttttttttttttgttttttttggttaatgttagtaataatttagagggtagttttattatttgttaggtttaatgtagtgttttttgtagtagttatgtgaggttttttggatggggagttgttttttttttttgttttgtttttggttttagttatatagtgtttattttttttgtttaagggttaggaggttagattgttggggtaaagttgttatagtagtgagggagagagtgttgttttttttttttttaaaagttattttggtaaggtattagttaaatatttttttggttttagaaggttttttttgtgaagtttgtagtgtttaaatgataattagtaaatttttagagataggtttttgggaattagttgtgttgggtgggatgaaagttgttttgatgttttggagtgagagagtagagagaaggaggaagatagatattatttgttagttgtagggttttgggtagtagtagtatgttaaggaggagttagggggttgtggggagtttaggagggtgtgggaggtttggtagggtttgttattttataggttggttttttatttgggggtttgtttgtttgtggtgattttttagtttataggaggggatggttggtgttgatagttttttttttgttttttttatgaagtttttttttggtagtttttgattttttgtttagaagtaaagttggaatagtttagtagggtggttgttagatgaggaatttggtattgagattggtttaggttatataattagaagaagagttggagatgggatttaagtttttttattttaatttttggtgggttttattttgttttggtttttttttagtaggggttttgtttaggagatattggtaattgtgtagagggattatgggatttttatgagtgattttgggttttggtttagttttttatttttgaaatatttttaaaatgattataagtatgtttatataaatttttttaaaatattttgagaattttttaataatgtgtttattaaaggtaggttttttggtgaggggtggtagggaggttggggtgaagggtaggagttttatgtttttagttttagagagggttaaatatttagggtaggtgaaaggtaggttgtttattatttatttagtgagaatttttgtgggttttttgtagaggtttaggagatgttttttttttggtttatttttaatgttagtttttttttgtggttgttttaaagtttagtttatttggttttttaattgtgagatttttgaattgtttttttattggttgtaggttatagtttttgtttttatttttagtagtattagttggggataggaattgtttgttgttgggatttttttttttagtagattgggagttttttatttttggtatttatatatttgtttgtgtgtttggagtggtagaggaaaggggttggggtgtggtgatggttggtggagttggaggtatttggtatatggaagatgtaggtgggaaggtggttgagttttagtgtatgttgagtgtttattttttttttttgtaggtgtttttttatttattagataaatgtgatgattttagttgtataaaagagaagattttggttttaggaggtaaaataatatgtttaggattagggtaggtttgtggggtgggtatttgaattgttagtggtatgatgtttgagtttttttttat

SEQ ID NO: 3948 - DNA, 2369 bp, Artificial Sequence
  chemically treated genomic DNA (Homo sapiens)
gtgggagaaggtttggatattatattattggtagtttaaatgtttgttttatagatttgttttgattttaggtatgttgttttgttttttggggttgaggtttttttttttgtataattgggattattatatttatttggtgagtgaagggatatttgtagagaagggaggtaagtgtttagtatgtgttgaaatttagttatttttttgtttgtgttttttatgtattaggtgtttttagttttattagttattattatattttagttttttttttttgttattttagatatgtaggtagatgtgtgggtgttaagggtgaggggtttttagtttgttggggaagggggttttggtagtaaataatttttgtttttggttgatgttgttagaagtgagagtaggggttgtgatttgtagttaatggggaagtagtttgagggttttatagttgggaggttgagtgagttaagttttagggtagttatagggaggagttgatgttagagatggattagagaggaggtgttttttgggtttttgtaggggatttatagaggtttttgttgggtgaatgatgggtagtttgttttttatttgttttgggtgtttggttttttttagggttgggaatatgaggtttttgttttttattttagtttttttattattttttattaaaaaatttatttttggtaaatatattattaagggatttttagaatattttagagaagtttgtgtgaatatgtttgtggttgttttaaaagtgttttagaagtgagaggttaaattaaggtttgaagttatttatggaaattttatgatttttttgtatagttattagtgttttttggatggggtttttgttggaaaggggttgagatagggtgaagtttattaggggttggagtggggaggtttgggttttgtttttagttttttttttggttgtgtggtttggattagttttagtgttaggttttttatttggtggttattttgttgggttgttttagttttgtttttgagtggaaggttaggggttgttagggaggagttttgtggggaaagtaaaggggaagttgttagtgttggttgtttttttttgtgaattaaagagttgttgtagataagtaggtttttagatggagaattagtttgtgaggtggtgggttttgttaggttttttatgtttttttgggttttttgtagttttttggtttttttttggtgtgttgttgttgtttgggattttgtgattggtaggtagtgtttgtttttttttttttttttatttttttgttttagaatattagagtggtttttattttgtttggtgtagttaatttttagggatttgtttttggggatttgttggttgttgtttgaatgttgtagattttataggggaagttttttgggattgagaagatgtttagttaatgttttgttaaggtggtttttgaaggggagggggatagtgtttttttttttgttgttgtgatagttttgttttagtagtttggttttttggtttttaaataaggagggtgggtgttgtgtggttggggttaggggtggggtaggggggagggatagttttttatttgaggaattttatgtggttgttgtgggggatattgtgttgaatttggtaagtggtggggttattttttgggttgttgttggtattggttagggagagtggggagaggggggagggggggatattagggttagttatagggttttgtgtttagaggtataaaattgttagttattagaaagggttttattttttagtttttgaaatataattagaggttaagtgttttaggatgtaagtgtgtttttttatgttagtggtgttttttttttggttttaggtttttttggaagttgggtggttgggatttgagttaagttgtggggtaggtagttttagggttagtttattaggttagggatggtttaggagggttttattttagggttgttagtatgagggtttagtgaattttgttagattttttttgtttttttttggttgggtagtagttaattttttttttggttaaaggggtggtttttattgtggagatagggtgtttttttttttatttttttagtttatggggtttttaagagttgtttttattttgttttgttgtatttttttttatgattataaattaggttttatggagtttttagtagggtatgtattggttatttttatagtattttttggggtttttattgtttttatttgtattattttaaggatagggaaaaggaggtttagggaagttagtttgtttgtttaagatttagttggtaagtagaggttagttttagttttaggt

SEQ ID NO: 3949 - DNA, 2425 bp, Artificial Sequence
  chemically treated genomic DNA (Homo sapiens)
tgtattttagggtaattagtttttgtatgggaggagaggggtattttttgtattattttatggtgttattaaaagttgaattatgggttggtttaattttgtagagaagagattatttaatttatttgtggaaatttattttttagtgatattgatgttttttaagaaatttaattttgggtttgagtgatggttggtgtaaaaaataaatttaagattttagtgttttttagaagtttggatttttagggattttgttgtgagttataggatgttattggtttttttttttttgtgggttgagtgtgggggttatgtggatttttttatgagtagatgttattagggttattggttttagtttttttttttatagttgtagtgggggttggggttggggtattttagggagggtttttgtatgagtttgtgttatagtgtgtggtatttggtggagggattaagttgattgttttaggtgagtttttttttttttttttttttttgtttttgggataatttttgttgtttttgtttgtttttgtattttgttttaatttgtggttagtttttttttttgtattttaggtttgagtaaggatttttgttttttttgtttagatttttgtttgttttagtaggttattataattattttatttttgattataggggtaggggattagatagaatgatttattgagttttgtttgtttgtttgtttgtttgtttttttgtttgtttttttgtttttttgtttgtttttttgattgtttgataggtgtaggttgggtttttaagttttgttttgttttggtttttttagtttgggtttttgttggaatagttttgtttttgggttatttgggttttattttttggggaattgggaataaggggtttgagggaggtattttttgggagattttagaaggatttagtgtttttggggttgatgtttgggaattatagagttgggatttagagttaggatttagatttagaatgaggtaggaggtggaggggttgttttgggtgtttgggggttgttagggattgagttttgagttagtttgagatttaggaaattttgttaggagggagaagggagaagtagattttggatattagaaagttaggggaagggttataaaaggagtggatgtgatggaagggtgggtttttgggtttttttagaatatattttttgtgtttagggggattagaggggtagagtttattgtgtgaaagttttattgttatgattaggtagttgggatgtggggtggatgttagaaaagattttatggaataagagagagtttaggatagtaggtaggttttttgatttttttaggtttttgttttatatatgggttttagaatatatatttggttggaatagtttgagggattaaaaggttttagtattttatagagttgaggagttaggttagaaaagtaattttagagtttgttgtgtaggggagatatagagttttttttatttgttaggatggtaggaggggatagggttagggtgttgagggttagatgttggtgttgggggttaaggttttgagagattttaggataggtggttaggtgtttaaggtaaaatagttttttgtgtagattagggtatagtggaaaatattttgatttttttgtttggtatagatttttagatatagagtttttgaataagggtattttaatattttattatatattgaggttaggggttttttaggtggatattaggattttgattttttgttttttatttattttgtaggttagtttaaggttgtttttttggttattttgtttttgtttttttttgaggagttttaagttaataaggttatattggtgtgttttataagtgatttttatttgggagttgtgatagtggtttggaaggtagatagtagttttgttaaggtgggagtggagattattatattttttaaataaagtaataataagtatgtggttagtagttatttgagtttgatgtttgagtagtggaagttttatagaagttatagttgttaggttatgtatgaagggagtattgtggagaagatagtggtttttatagaatgtttataggtttttaatttttattttttattatgggagattagagttgtaggattttaggggaggggtttttttttttattttaaggtattaagtttttttttttgtatttaataaatttttaataaatatttttattgttaattagaaattttgttttattttattttttttttttttatatataatttttagttttttttgggtttttaatttgtggtggaaagaattttgaatttagtgggaaagttgtttatgtgaaggggtttttagttttttgggtatttttgtaggtaaggttttttttatttagata

SEQ ID NO: 3950 - DNA, 2425 bp, Artificial Sequence
  chemically treated genomic DNA (Homo sapiens)
tgtttgggtgaggaaggttttatttgtagagatgtttagggaattgagaatttttttatataggtaatttttttattgggtttagggttttttttattataaattgagaatttaggaaaggttaggaattatatgtgagaaaagaaaaaatgagataaaataagatttttgattgataatgagaatatttattgagggtttattgagtgtagggagaagggtttgatgttttggggtgggaggagagattttttttttgggattttgtagttttagttttttgtggtggggggtgagggttgagaatttatgaatattttgtaggggttattgttttttttatggtgttttttttatgtgtgatttggtagttgtagtttttgtgggatttttattgtttaggtgttaggtttagatagttgttggttgtgtatttgttgttgttttgtttggagggtgtggtggtttttatttttgttttgatggggttgttatttgttttttaggttattgttatggtttttgggtagaagttatttatgagatatattagtgtggttttgttggtttgaagttttttagaggagggtgggaatagagtgattgagggggtagttttgggttgatttgtggggtggatgaggggtagggggttagagttttggtgtttatttggggagtttttgattttagtatatgatgaggtgttggggtgtttttgtttaggggttttgtgtttgaaggtttatgttaggtagaggggttagggtgttttttattatgttttgatttgtatggggagttgttttattttagatatttgattatttgttttgagattttttggggttttggtttttaatattgatatttgatttttagtgttttgattttgtttttttttgttattttgatagataaagagagttttgtgttttttttgtatagtgaattttggggttatttttttggtttggttttttagttttgtgggatattggggttttttggttttttaggttgttttagttaaatgtgtgttttggagtttgtgtatggggtaagggtttggggggattggagagtttgtttgttgttttgggtttttttttattttgtggagttttttttggtatttattttatgttttggttatttggttatagtagtggggtttttatgtagtggattttgtttttttgatttttttgggtataggggatatgttttgaagagatttaggagtttgtttttttgttatatttattttttttgtgattttttttttggttttttggtgtttagagtttgtttttttttttttttttttgatggggttttttgagttttaggttggtttagggtttagtttttggtagtttttagatgtttagggtagtttttttattttttattttattttgggtttggattttggttttgggttttagttttgtgatttttgagtattagttttgagggtattgggtttttttaaagttttttaggaggtgttttttttagattttttgtttttaattttttaggagatggaatttaggtaatttaaggataaagttgttttgataagaatttagattgaggaggttagaatagaataaggtttagagatttagtttgtgtttgttagatagttagagagataaatagagagatagagagataaatagagagatagatagatagatagatagatgaggtttagtaggttattttatttagttttttgtttttgtggttagaggtgaagtggttgtagtgatttgttgaggtaagtaagggtttgaatagggagggtagaggtttttgtttaggtttgggatgtagggagaaaggttgattataagttgagataagatatagaaataaataaaaatagtagaaattgttttaagagtggggaaggagaggggagaagagatttatttaggatggttagtttggtttttttgttgaatattatatattgtgatataggtttatataaaaattttttttgggatgttttagttttagtttttattgtagttgtgaaggaggaagttggggttagtggttttggtggtatttgtttatgagggagtttatatggtttttatatttaatttataaagagaaggggattggtgatgttttgtgatttatagtaggatttttggaaatttaggtttttggaggatattgggattttgaatttgttttttgtattaattattatttaggtttaggattgaattttttagggagtattagtattgttaaggagtgaatttttatagatgggttaggtggttttttttttgtaaagttgaattaatttatggtttaatttttggtaatattatggggtggtgtagagggtgtttttttttttttatgtagaggttgattgttttagagtgta

SEQ ID NO: 3951 - DNA, 2425 bp, Artificial Sequence
  chemically treated genomic DNA (Homo sapiens)
ggtttttagaatattgtattttagggtaattagtttttgtatgggaggagaggagtattttttgtattattttatggtgttattaaaagttgaattatgggttggtttaattttgtagagaagagattatttattttatttgtggaaatttattttttagtgatattaatgttttttaataaatttaattttgggtttgagtgatggttggtgtaaaaaataaatttaagattttagtgttttttagaagtttggatttttagggattttgttgtgggttataggatgttattggttttttttttttgtgggttaagtgtgggggttatgtggatttttttatgagtagatgttattaggattattggttttagtttttttttttatagttgtagtgggggttggggttaggggtattttagggagggtttttgtatgagtttgtgttatagtgttgggtgtttggtggagggattaagttgattgttttaggtgagtttttttttttttttttttttttgtttttgggataatttttgttgtttttgtttgtttttgtattttgttttaatttgtggttagtttttttttttgtattttaggtttgagtaaggatttttgttttttttgtttagatttttgtttgttttagtaggttattataattattttatttttgattgtaggggtaggggattagatagaatgatttattgagttttgtttgtttgtttgtttgtttgtttttttttttttgtttgtttttttgtttgtttgataggtgtaggttgggtttttaagttttgttttgttttggtttttttagtttgggtttttgttggaatagttttgtttttgggttatttgggttttattttttggggaattgggaataaggggtttgagggaggtattttttgggagattttagaaggatttagtgtttttggggttgatgtttgggaattatagagttgggatttagagttaggatttagatttagaatgaggtaggaggtggaggggttgttttgggtgtttgggggttgttagggattgagttttgagttagtttgagatttaggaaattttgttaggagggagaagggagaagtagattttggatattagaaagttaggggaagggttataaaaggagtggatgtgatggaagggtgggtttttgggtttttttagaatatattttttgtgtttagggggattagaggggtagagtttattgtgtgaaagttttattgttatgattaggtagttgggatgtggggtggatgttagaaaagattttatggaataagagagagtttaggatagtaggtaggttttttgatttttttaggtttttgttttatatatgggttttagaatatatatttggttggaatagtttgagggattaaaaggttttagtattttatagagttgaggagttaggttagaaaagtaattttagagtttgttgtgtaggggagatatagagttttttttatttgttaggatggtaggaggggatagggttagggtgttgagggttagatgttggtgttgggggttaaggttttgagagattttaggataggtggttaggtgtttaaggtaaaatagttttttgtgtagattaggatatagtggaaaatattttgatttttttgtttggtatagatttttagatatagagtttttgaataagggtattttaatattttattatatattgaggttaggggttttttaggtggatattaggattttgattttttgttttttatttattttgtaggttagtttaaggttgtttttttggttattttgtttttgtttttttttgaggagttttaagttaataaggttatattggtgtgttttataagtgatttttatttgggagttgtgatagtggtttggaaggtagatagtagttttgttaaggtgggagtggagattattatattttttaaataaagtaataataagtatgtggttagtagttatttgagtttgatgtttgagtagtggaagttttatagaagttatagttgttaggttatgtatgaagggagtattgtggagaagatagtggtttttatagaatgtttataggtttttaatttttattttttattatgggagattagagttgtaggattttaggggaggggtttttttttttattttaaggtattaagtttttttttttgtatttaataaatttttaataaatatttttattgttaattagaaattttgttttattttattttttttttttttatatataatttttagttttttttgggtttttaatttatggtggagggaattttgtatttagtgggaaagttatttaagggaggaggtttatagtttttttgagttatttttttggaaggtttttttttttttagtt

SEQ ID NO: 3952 - DNA, 2425 bp, Artificial Sequence
  chemically treated genomic DNA (Homo sapiens)
gattggaagaggaaggattttttagagagatgatttggggaggttgtaagtttttttttttgggtgatttttttattgggtgtagaattttttttattataaattgagaatttagggaaggttaggaattatatgtgagaaaagaaaaaatgagataaaataagatttttgattgataatgagaatatttattgagggtttattgagtgtagggagaagggtttgatgttttggggtgggaggagagattttttttttgggattttgtagttttagttttttgtggtggggggtgagggttgagaatttatgaatattttgtaggggttattgttttttttatggtgttttttttatgtgtgatttggtagttgtagtttttgtgggatttttattgtttaggtgttaggtttaggtagttgttggttgtgtatttgttgttgttttgtttggagggtgtggtggtttttatttttgttttgatggggttgttatttgttttttaggttattgttatggtttttgggtagaagttatttatgagatatattagtgtggttttgttggtttgaagttttttagaggagggtgggaatagagtgattgagggggtagttttgggttgatttgtggggtggatgaggggtagggggttagagttttggtgtttatttggggagtttttgattttagtatatgatgaggtgttggggtgtttttgtttaggggttttgtgtttgaaggtttatgttaggtagaggggttagggtgttttttattatgttttgatttgtatggggagttgttttattttagatatttgattatttgttttgagattttttggggttttggtttttaatattgatatttgatttttagtgttttgattttgtttttttttgttattttgatagataaagagagttttgtgttttttttgtatagtgaattttggggttatttttttggtttggttttttagttttgtgggatgttggggttttttggttttttaggttgttttagttaaatgtgtgttttggagtttgtgtatggggtaagggtttggggggattggagagtttgtttgttgttttgggtttttttttattttgtggagttttttttggtatttattttatgttttggttatttggttatagtagtggggtttttatgtagtggattttgtttttttgatttttttgggtataggggatatgttttgaagagatttaggagtttgtttttttgttatatttattttttttgtgattttttttttggttttttggtgtttagagtttgtttttttttttttttttttgatggggttttttgagttttaggttggtttagggtttagtttttggtagtttttagatgtttagggtagtttttttattttttattttattttgggtttggattttggttttgggttttagttttgtgatttttgagtattagttttgagggtattgggtttttttaaagttttttaggaggtgttttttttagattttttgtttttaattttttaggagatggaatttaggtaatttaagggtaaagttgttttgataagaatttagattgaggaggttagaatagaataaggtttagagatttagtttgtgtttgttagatagatagagagataaatagagagagagagatagatagatagatagatagatgaggtttagtaggttattttatttagttttttgtttttgtggttagaggtgaagtggttgtagtgatttgttgaggtaagtaagggtttgaatagggagggtagaggtttttgtttaggtttgggatgtagggagaaaggttgattataagttgagataagatatagaaataaataaaaatagtagaaattgttttaagagtggggaaggagaggggagaagagatttatttaggatggttagtttggtttttttgttgaatatttaatattgtgatataggtttatataaaaattttttttgggatgtttttagttttagtttttattgtagttgtgaaggaggaagttggggttagtggttttggtggtatttgtttatgagggagtttatatggtttttatatttaatttatagagagaggggattggtgatattttgtgatttatagtaggatttttggaaatttaggtttttggaggatattgggattttgaatttgttttttgtattaattattatttaggtttaggattgaatttattagagggtattagtgttgttaaggagtgaatttttatagatgggataggtggttttttttttgtaaagttgaattaatttatggtttaatttttggtaatattatggggtggtgtagagggtgtttttttttttttatgtagaggttgattgttttagagtgtagtgttttgggaatt

SEQ ID NO: 3953 - DNA, 2473 bp, Artificial Sequence
  chemically treated genomic DNA (Homo sapiens)
aaagtattaattaatgatagaataaggaaaatggtataattggtttaaaggagaatttaagtattatatatagatatgtaggtaaatataaatgttggtatttatttataagtagatatgaaattggttaataatttgaggataataattaattgtattttattggatataatttatttgtatttttatggtattaagtatttgtattattattggttttttttttaagttttgagagttaggaaatagtttaaagatgatgaaaggtatagatattttggagagttatgttagatagaatatttagtaatttttatagattttttggtttatattaatattttttataattttttttgatagtatagtgtagttattattattttagagaagaagtgaggggttatgttgtgttttttggatttttgttttttaatttgtaaaatgggtatgataagagtttttgataatttagagatatgaggttttgttgggataagtattgtgggaaatgtgaagtgttaagggatagtgttttaaattttagtgtggtttttttttttgatttagtttatatttttgttttattttggaagatttatttttttttttttatattaattttgatttgataatatttttgaaattagagaatgaggtgttgattttgtatgttttttttttttaatatatatgaatatagataaaaagttattgagataagaaaggtaagtttatttttgtattaattaatttagtgttttgtgggaagtataggattaggaagaaattaaatgatagtttataaatatatatatatatatatatatatatatatatatattttattaattattattattattattgttgttattattaatgtattttgtaaatttatatataatttgtaaatttttttttgaaataagagagagagggtaattgaaattatttaaggtagtatttggaatatgtaggttaaagattgagttagggagggattgttattatatgggttgtggggaggtagagtttttttgtgtttttgagagtatttttttttggggttttattagtttttaatttgttttttgaatttttatttttttttttgttttgtgtttttggaaatttagatagtggttttatttttgtgatttatttagtaggaatgtgggagtttttgaattgttttagttaaagttttttaatttttttttggtgatgaatgggtgaggtttttaaatgaaatgtggaggtttttagttttagtttgtggttttttttttttttggtgtaattatttttgtgtagaatatgttaagtgttttgttttttgggaatttgttttgtatgtaaatatttggtgattaagtgaggtttatttaattaagtattttgtaatgatttttaaattaaagaatagtggattaggagtttagtttgtgttggtgatgggaaaggtagttttatattataaggaggtagatagtgatttggtgtggggaggtggttgggttaagtggggtagagtaggtgttttgggaattttgttagaattatttatttatttatttaattaatttatttttggagtattttttggagttagagtagttggtgaataataataataataataatagggttaggtattgtgttaataagtttgttgaataataagagtgaggaggagttagagatagttattgagagttgattttattaggtatgaattgttagtagtagtgatggtaataataagtatttttattgtagtagtaaatttttgaataggattttgttgtggttttgtgtgttttgaaattgttgggtttttgttatggatttggtttttggaaatagtttttatttttgttgttgttttattgatttattggttttttatttattagtggtttattttttatatttgtgtaatgggtagttggatttagattttttttaagatgtttttgggttttaggagtttagggtgttttttttgtttttgggggttataggaatggtggtgttattttgggggttttagttgtaatattgtagaaggttttagagtttagttttatatagttttaggatagagtaagggtgatttttagtttagatttttataaattgtgggatttttattaggtagtttgttttttttgatggataagttttttattttttaattgaaataatttttttatttgtttttagggtttttgtaagggaattatatagatttatggatatagatgttttttgaaaattatttatttggtggtagaagttattatgttttaaatttggatttatgaatatattttaatgtatttatttgtttatttgttttggtttttttatttttattataatttggaaaagggttttaattgttttttaatttgggagattattttagaataaagggtttttatgtgattttagtgtttgagttgat
